United States Patent Application Publication US 2024/0131193 A1 - sequence listing, part 9

SEQ ID NO: 15672 - DNA, 1413 bp, synthetic construct
  source 1..1413: mol_type = other DNA; note = Synthetic coding sequence
atggatcttcgagatcaggagctagtgaaaatcgtggggatcaggtatgaggtggggcccccaactctctgctgtctaaaactcgcttttatcgaccctgctacggggaagctcatggacaagtccttctccatacgataccacgatatgccggatgtgatcgacttcttggtgctaaggcagttctatgacgaggcccgccagcgaaattggcaaagctgtgaccgcttcaggagcattattgacgacgcctggtggttcggtactgtactgtcacaggagccataccagccccagtatcctgatagtcattttcagtgctacatagttagatgggacaacaccgaaattgagaagctaagcccttgggatatggaacctattccagacaacgtcgatcctcctgaagagctaggagctagcattagcgtcacaacagacgagttggagaagttactttacaaacctcaggccggagaatggggtcagaaatccagggatgaggaatgtgataggatcataagtggcatagatcagctcctgaatctcgatatagccgctgcgtttgccgggcctgtggatttgtgtacatacccaaagtactgcacggtggtggcctacccaacagacctgtacactattcggatgcgcctggtcaaccgcttttacaggaggctgagcgcgctggtatgggaagtgcgctatatagaacataatgctcgtacctttaatgagcctgaatcagtgattgccaggtctgccaaaaagatcactgatcaacttcttaaattcattaaaaaccagcactgtacaaacatctccgagctgtcgaacaccagcgaaaacgacgaacagaacgccgaggacctggatgactctgacctgcctaagacgtcttcaggacgaagacgggactatagggatatcatagacactcccatggacttcggaacagtgagagagaccttggatgcgggtaattatgacagtcccctggagttctgtaaagatattcggctgattttctctaatgctaaggcctacacaccgaataagcgctccaagatttattcaatgacactaagactctccgcacttttcgaggagaagatgaaaaaaatttcttccgacttcaaaattgggcagaaattcaacgagaaactcagacgatcacagcgctttaagcagagacagaattgcaaaggtgactcacagcctaacaagtccatcagaaatcttaagccgaagcgacttaaaagtcaaacgaaaatcatccccgaattggtgggctcacctacccagtctacctcgtcccgcacagcctaccttggcacgcacaaaacaagcgcagggatatccagcggggttacttccggtctgttcagattctcgagaatcatccgcaaagagtag

SEQ ID NO: 15673 - DNA, 516 bp, synthetic construct
  source 1..516: mol_type = other DNA; note = Synthetic coding sequence
atgtgtggtagggccccccccccagagatcactggccgcgaaccaggttaccatcttgtggaacagtcctgctggctgaagcctttacccaggaatctggggcattccctcttctggacagtgtggaagccaagacccgttagccagctggtagcccagcaagttacacagcagttcgtccccccaacccagagtaaaaaggagaagaaggacaaagtagaaaaagaaaaaagcgagaaggagaccaccagcaaaaagaatagccacaagaaaacccggcccagactaaaaaatgtagataggtcctcagcccaacacctcgaagttacggtgggcgatcttactgtgatcattactgattttaaagaaaaaactaaaagcccacctgctagctcagcagcgagtgctgaccaacactcacagagtggctcatcatcagacaacaccgagcgaggaatgtccaggtcgtccagcccgcgcggggaagcatcgtctctgaatggcgagagccactag

SEQ ID NO: 15674 - DNA, 417 bp, synthetic construct
  source 1..417: mol_type = other DNA; note = Synthetic coding sequence
atgggtgataaaaagtccccgaccaggaagcctcggcccgtctcccagctggttgcccagcaagtcacacagcagtttgtgcctccaactcagtctaagaaggaaaagaaggataaggtggagaaagagaagagcgaaaaggaaaccacctcaaagaaaaattctcacaaaaaaacacggccgcgccttaaaaatgtggaccggtcctccgcccaacacctggaggtcacagtgggcgacctgactgtcattatcacagattttaaggagaaaaccaagtctcctccggccagctccgctgcatctgccgaccagcacagccagtccggctcttcctccgacaacacagaacgagggatgtccagaagctctagcccacgtggcgaagcttccagcctgaacggcgagtcccattag

SEQ ID NO: 15675 - DNA, 1047 bp, synthetic construct
  source 1..1047: mol_type = other DNA; note = Synthetic coding sequence
atgggacactgttgctgcaagccctataattgcctgcagtgtctcgacaagactaacgagtcagccctggtgaaggagaaggaactgtctatcgaactcgccaacattagagacgaggtcgcttttcatactgcaaaatgtgaaaagctgcagaaagaaaaagaggaattagaaaggaggttcgaggatgaggtcaagcgactggggtggcagcaacaggcagaattacaggaactcgaggagaggctgcagctgcagttcgaggccgagatggcgcgcctccaggaagagcacggagatcagcttctgtcaatcagatgccaacatcaggaacaggtagaagatttaacagcttctcatgacgctgctctgttggagatggaaaacaatcacacagtggccatcaccattttacaggacgaccacgatcataaggtccaagaactcatgagtacacatgaactcgagaaaaaggaactcgaggaaaatttcgaaaaacttaggctgtctcttcaggatcaggtggataccctaacttttcagagccaatctctgcgcgatagggccaggcgatttgaggaagccttaagaaagaatacagaggaacagctggaaatagcactggctccctaccagcacctggaggaggatatgaaatcattgaaacaagtgttggaaatgaagaaccagcagatccatgaacaggaaaagaagattttggaactcgagaaattggcggagaagaacatcatcctggaggagaagatccaagtgttgcaacaacagaacgaggaccttaaggccagaattgaccagaatacggtcgtaacccgtcagctctctgaggagaatgccaatcttcaggaatatgtggagaaagaaacccaggagaagaagcgactgtctcggacaaacgaagagctattgtggaagcttcaaaccggtgatcctacctctcctataaagctatcccctaccagccccgtttatcggggaagttcgagcggaccaagttcgccagccagggtgagcacaacacctagatag

SEQ ID NO: 15676 - DNA, 2664 bp, synthetic construct
  source 1..2664: mol_type = other DNA; note = Synthetic coding sequence
atgaacagcggcggaggcctcccacctccttctgctgcagccagtccttccagctccagtttggctgccgccgttgccgtagtcgcgcccccaggggtgggaggagttccagggggcgccgctgtcggagtcaaacttaaatactgcagatactatgcgaaagataagacctgcttttatggcgaggaatgccaattcctgcatgaagatcccgcagctggagccgcccccggcctgggactgcattccaacagtgtcccgctcgccctggccggggcccctgtcgccgggttccctcctggcgccgtcgccggaggcggcgcaggccccccacccgggcctaaaaagccagatctgggcgacccaggaactggggcggcggcaggtgggggagggtcgtctggaggtttagacgggccacgacttgcaatccctggtatggacgggggggctttgaccgacaccagtcttacagacagctacttttccaccagctttattggcgtaaatgggtttggcagcccagtcgagaccaagtatcccctcatgcagaggatgactaacagcagctccagtcccagcctgcttaatgactctgcgaaaccttatagcgctcacgaccctctcacatccccagcttcgtccctgttcaatgattttggagctctgaatatctcccagaggcggaaacccagaaaatataggttaggcatgctggaggagaggttagtgcctatgggctctaaggctagaaaagctaagaaccccatcggctgcctcgcagaccggtgcaaatccggggtccccattaatatggtatggtggaacagggtaaccgagaataacctgcagacccccaatccaaccgcttctgagtttatcccaaaaggaggttctacctcccggctttcaaacgtctcacaatctaatatgtcggccttctcccaggtgttctcacatcccagcatgggttctccagccaccgcaggtctggcccctgggatgtctctgagcgccgggtctagcccacttcacagtccgaaaatcacacctcacacctctccggctcctcgccgtcggtctcataccccaaaccctgcctcttacatggtgcctagttctgcgagtacgagcgttaacaacccagtttctcagacaccgtctagtggccaggtcattcagaaggagacagttggggggaccacctatttttacaccgacacaactcccgcccccctgactggcatggtgttcccaaactaccacatttatcctcccactgcacctcacgtagcgtacatgcagccaaaagcaaatgcaccttccttcttcatggccgatgaactgagacaggaactgatcaacagacacttgatcacaatggcccaaatagaccaggcagacatgccagccgttccgaccgaagttgacagctatcattccttatttcccctagagcctctaccccccccgaaccgcatccagaaaagtagtaactttggctacattacttcctgctataaggccgtgaacagtaaagatgacttgccgtactgccttcggcggatccatgggtttagacttgttaatactaaatgtatggttctcgtggatatgtggaagaagatccagcactcaaacatcgttactttgagggaggtgttcactactaaagctttcgcggagcctagtctcgtcttcgcgtatgatttccatgcaggtggcgagacaatgatgagtcgtcatttcaacgaccccaacgccgacgcgtactttactaaacgaaaatggggtcagcacgagggaccgttgcccagacagcatgccggcctactccccgaatcgttaatctgggcctatatcgttcaattgtcttctgccctgaggacgattcacacagccgggctggcttgcagagtgatggatcctacaaaaattttgattactggcaaaaccaggttgagggttaactgtgtcggcgtgtttgatgtcctaacttttgacaatagccagaacaacaaccccctcgctctgatggcccagtaccagcaggctgacctcatctctcttggaaaagttgtgcttgcactggcttgtaactccctggcaggcatccaaagagaaaatctgcagaaggctatggagcttgtgactatcaactattcgtcagatcttaagaatctgatcctgtacttactaactgaccaaaaccgcatgaggtcagtgaacgacatcatgccaatgattggcgcaagattctacacacagttagacgccgctcagatgcgtaatgatgtgatcgaggaggacctcgctaaggaggtgcaaaacggacgcctgttcaggttacttgccaagctaggcaccatcaacgaacgccccgagttccaaaaagacccgacgtggagcgagaccggcgacaggtatctgctaaaactgtttagagaccacttatttcaccaggtaaccgaggcaggggccccctggatcgacctgtcccatataatatcgtgcctgaataagctggatgccggcgtgcctgaaaagattagcttaatttcccgggatgaaaaatcggtgctggtggttacctattccgatcttaagagatgcttcgagaacaccttccaggaactgatcgcggcagcaaacggccagctgtag

SEQ ID NO: 15677 - DNA, 1710 bp, synthetic construct
  source 1..1710: mol_type = other DNA; note = Synthetic coding sequence
atggcaacactcgtggtcaacaagctgggagccggggtagactctggccggcagggaagcagggggacagccgtcgtgaaagtgctcgaatgcggcgtctgcgaagacgtgttcagcctgcaaggagacaaggttccgcgtcttttactttgcggacatactgtgtgtcacgattgtcttactcgcctcccccttcatgggcgggccataaggtgtccgttcgaccgtcaggtgaccgacctgggcgatagtggagtgtggggcttgaagaaaaattttgccttgttagaactgttggagcgacttcagaacggtccaattggccaatacggcgccgccgaagagtcaatcggtatcagcggggaaagtattattaggtgtgatgaggacgaagcgcatctggcatccgtgtactgtaccgtgtgtgcaacccacttgtgcagcgagtgcagccaggttactcattcaactaagacactggccaagcacaggagagtgcccctggcggataagcctcacgaaaaaaccatgtgctctcagcaccaagtgcacgcaatcgagtttgtgtgcctggaggagggctgccagactagcccccttatgtgttgcgtgtgcaaggaatacgggaagcaccaaggccataaacacagcgtactggaaccagaggccaaccagattagggccagcatcctcgacatggcacactgtattcgtacgtttacggaggaaatcagcgactatagtaggaagctggtgggaatcgtgcagcatattgagggcggtgagcagattgtagaagatggaatcggaatggctcacacagagcacgttcctggcaccgccgagaacgctagatcctgcattagggcctatttttacgacctgcacgagactctgtgccgtcaagaagaaatggccctgtccgtggtggacgcccacgtgcgagagaagctgatctggcttagacagcaacaggaagacatgacaatattactgtctgaggtcagcgctgcctgcctgcactgcgaaaagaccctgcagcaggacgactgtagggtggttttagcaaaacaggaaattacccggctccttgagacactacagaaacagcagcagcagttcacagaagtcgctgaccatatccagctcgacgcttccatccccgtgacgtttacgaaggacaacagggtgcacattggtcccaaaatggagataagggttgtgacactcggcctggacggcgcgggaaagacaacaattctgtttaagctgaagcaggacgaatttatgcagcctatccccaccatcggtttcaatgtcgagactgtggagtacaaaaacctcaaatttactatttgggacgtggggggcaagcataaattaagaccactttggaagcactactacttgaatacacaggcagttgtgtttgtcgtcgattctagccatagagataggatctccgaggcacatagcgagttggctaagctcctgactgaaaaagagctgagggatgcactgctattgatcttcgctaacaaacaagacgtggccggggctcttagcgtggaggagattaccgagcttctgagcttgcacaagctctgctgcggaaggagctggtacatacaagggtgtgatgcccggagtgtgttccagataatctgtgaccagtacaccggaaaggaagtggtgacagaaaaagggtag

SEQ ID NO: 15678 - DNA, 2061 bp, synthetic construct
  source 1..2061: mol_type = other DNA; note = Synthetic coding sequence
atgggcaggattcatcaggcaatggtgaccagcctaaacgaagacaacgagagtgtaaccgtggagtggattgagaatggggacactaagggaaaggaaattgaccttgagtcgattttcagcttgaaccccgatcttgtcccggacgaggagatagaacctagccccgaaacaccccccccgccagcatcttcagctaaagtcaacaaaattgttaaaaaccggcgaaccgtggcctctatcaagaacgaccccccctctcgggataatagagtggtaggaagcgctcgagccaggccatcccagtttcctgaacaatctagcagtgcccaacagaatggtagcgtctccgacattagtccagtgcaagctgcgaagaaagaatttggcccccccagccgacgcaaaagtaattgcgtgaaagaggtcgagaaactccaagagaaacgggagaaacgccgattgcaacagcaagagctccgcgaaaagcgtgctcaggatgttgacgccacaaaccctaattacgaaatcatgtgcatgattagggatttccggggttcactggattacagacctctgactaccgccgaccccattgatgagcaccggatctgtgtctgcgtgaggaagcggccactaaataagaaagagacccagatgaaagacctggacgtcattactatcccttccaaagacgtggtgatggtccacgaacccaaacagaaagtggatctgacccggtatctggaaaaccagaccttcaggttcgactacgcatttgacgacagcgctccaaacgagatggtgtaccgatttactgcccgccctctggtcgagacaattttcgagagagggatggctacctgtttcgcctacggtcagacgggcagcggaaaaacccatactatgggtggtgatttcagcggaaagaaccaagattgtagcaaggggatctatgcccttgccgcacgggatgtctttttgatgctgaaaaaaccgaactataaaaaactggagctgcaggtttacgccaccttcttcgaaatttatagtgggaaggtgtttgacttactgaatcgtaagacaaaacttagggtgttggaggatggaaaacagcaggtccaagtcgtggggctccaggagcgggaggtgaagtgcgtagaagacgtactaaagttgattgatatcggaaacagttgccgaacgtctggacagacttcagcgaacgcacattcctcccggtcccacgccgtgtttcagattatccttaggaggaaaggaaagttgcacggcaagttcagcttgatcgacttggccggaaacgagaggggcgctgacacctcctccgccgacagacagaccagactggagggcgctgagattaataaatccctcctggcactcaaagaatgtatacgagccctgggacggaataagccacacaccccatttagggcttccaaactcactcaagtcctgagagactccttcatcggtgaaaatagtaggacttgcatgatcgccacaattagcccgggcatggcttcctgcgagaacacactgaataccctacgatatgccaaccgggtgaaggaactgaccgtggaccccaccgctgctggggacgtgcgccccatcatgcaccacccaccgaaccagatcgatgatttagagacgcagtggggagtaggatcatcaccacagagggacgacttgaagctgctctgtgagcaaaatgaagaagaggtctctccccaactctttacatttcacgaagcggtgagccagatggttgagatggaagagcaagttgttgaagaccacagggccgtttttcaggaaagtatcaggtggttggaagatgaaaaggcgctgctggagatgacggaggaggtcgactatgatgtagacagttatgcaacccagctagaagccatccttgaacagaagatagacatactcaccgaactacgtgacaaagtaaagagtttcagagcagccctgcaggaagaggagcaggcgagcaagcaaattaatcctaaaagaccaagagccctgtag

SEQ ID NO: 15679 - DNA, 618 bp, synthetic construct
  source 1..618: mol_type = other DNA; note = Synthetic coding sequence
atgtctgtggatcccatgacctacgaggcacagttctttggtttcacaccacagacttgcatgctcaggatctacattgcattccaagactatctttttgaagttatgcaagccgtggaacaagttatcttaaagaaactggacggcattcctgattgcgacattagccctgtacaaataagaaaatgcaccgagaaattcctttgctttatgaagggtcactttgacaatcttttctcgaaaatggagcaattgtttctccagctgatcctgcggattccaagcaacatccttctgcccgaggataaatgtaaagaaaccccatactccgaggaagatttccagcacttacagaaggaaattgaacagttacaggagaagtacaaaacagaactgtgcactaaacaggccctactagcagagctggaggagcagaagattgttcaggcaaaattgaagcagactctgacgttttttgacgagctgcacaatgttggtagagatcatggcacatcagacttcagggagagtctggtctccttagtacaaaattcccggaagttgcaaaatataagagataacgttgagaaggaaagtaaacgcctgaagatctcttag

SEQ ID NO: 15680 - DNA, 1866 bp, synthetic construct
  source 1..1866: mol_type = other DNA; note = Synthetic coding sequence
atggtactgtgccccgttatcggaaagctgctgcacaaacgggtggtcctcgccagcgcatccccgagaaggcaggagatcctttccaatgcaggactgaggtttgaggtggtcccctcgaagtttaaagaaaaactcgacaaggcgagctttgccaccccctatgggtatgctatggaaaccgcgaagcaaaaggctttggaggtggccaataggctataccagaaggacctgcgcgcacccgacgttgtgatcggagccgacacaattgtaacggtcggagggctcatcctagagaagccagtggacaagcaggatgcatataggatgctctcaaggttatcaggacgtgagcactcagtgtttaccggggtcgccattgtccattgctccagcaaggaccaccagcttgataccagggtttctgagttctatgaagaaacaaaggttaaattctctgaacttagtgaggagctcctgtgggagtacgtacattccggcgaacctatggacaaagccggagggtacggcattcaggcactgggtggcatgcttgtcgaatcagtgcacggggacttcctgaacgtggtgggtttcccattaaatcacttctgcaagcaattagtgaaattgtattacccaccaagaccggaggatttacggagatccgtaaagcacgactccatacctgccgcggatacttttgaagacctttcagacgtggaaggcggcggctcggaacctacacaacgcgatgcaggcagtcgggacgagaaggcagaagctggggaggccgggcaggctactgctgaagccgagtgtcatcggaccagagagactctgcctccctttcctacaaggctgctcgaactgatcgagggatttatgctgtcaaaaggattgctcaccgcttgcaagctgaaggtgtttgatctcctgaaggatgaggccccgcagaaggcagcagatatcgcatctaaagttgatgcaagcgcatgcggcatggaaagactgctcgatatatgtgcagcaatgggattgcttgagaaaacagaacagggctatagcaacaccgaaacagccaacgtctatctcgcatcagacggcgagtattccttacatggatttattatgcataacaacgatctcacttggaatctgttcacatacttagagtttgctattcgggaggggacaaatcagcaccatagagccttgggcaaaaaggccgaggaccttttccaggacgcatactaccagtctcccgaaacacgtctgaggttcatgcgagccatgcatgggatgacaaaactgactgcctgtcaggtggcgaccgcctttaacctttctcgcttttcttccgcttgtgatgtgggggggtgtactggagccctggcgagagaacttgcccgagagtacccccgcatgcaggtcaccgtcttcgacctcccggacataatagagctcgccgcacatttccagccaccagggccccaggctgtgcagattcattttgccgctggggatttcttcagggatccactcccatctgccgagctatatgtactgtgtcggatcctccacgactggcctgacgataaggtgcacaagcttctgagccgggttgccgagtcatgtaaacccggggccggcctgttgcttgtggaaacacttctggatgaggaaaagagagtggctcagagggccctaatgcaatccctgaatatgctggttcaaaccgaaggcaaggaaagatcactgggggagtaccagtgcctgcttgagctgcatggattccaccaagtgcaggtcgtccacctcggcggcgtgctggacgccatactggccaccaaagtcgccccctag

SEQ ID NO: 15681 - DNA, 2541 bp, synthetic construct
  source 1..2541: mol_type = other DNA; note = Synthetic coding sequence
atgttgtttactgtgtcgtgctccaagatgtccagcattgtggacagagacgattcttcgatatttgacgggctggtggaggaggacgataaagacaaagcgaaaagagtcagtcgcaataagtccgaaaagaaacgacgggaccagttcaatgtgttgatcaaggaactcgggtcaatgttacccggaaacgcacgaaagatggacaaatcaacggtgttgcagaagagcatcgatttcttgagaaagcacaaagagatcactgcgcagtcagacgcttccgagattaggcaggactggaaacctacattcctctctaacgaggagttcactcagctcatgctcgaggccctagatggattcttccttgcaatcatgactgatggtagcatcatctatgtcagcgaatctgtgacctccctgttggagcacctccccagcgatctcgtggatcagtcgatctttaacttcattcccgagggggagcatagcgaagtatacaagattctgtctacccatttactggaatctgactccttaactccagaatacctcaagtccaagaatcaattggaattttgttgtcacatgttgagaggaaccatcgatcctaaggagccatctacttatgagtacgtgaagttcatcgggaattttaagtcacttaatagcgtttcttccagcgctcacaacgggtttgaaggtaccatccagaggacgcatcgaccttcatatgaagacagggtctgtttcgtggcaacagttaggttggcaacaccccagttcatcaaagagatgtgcaccgtggaggaacccaatgaggaatttacaagtaggcatagtctggagtggaaattcctatttctggaccatcgggctccccctatcatcggctatttaccctttgaggtgctcggcacgtccgggtatgactactatcacgttgatgatctcgagaaccttgcgaagtgccatgaacaccttatgcagtatggaaagggaaaatcttgctattaccgcttcctgaccaaagggcagcagtggatctggctgcagactcattactacataacttatcatcagtggaatagccggcctgaattcatcgtgtgcacacacactgtggtttcctatgctgaagtgagagccgaacgacgcagagagctgggcattgaagagtccttgcccgagacagccgccgacaaatcccaagactccggtagcgataaccgaattaacaccgtgtccctcaaagaggcgctcgaacggttcgaccactcccctaccccgagtgctagcagccggagctcaagaaagagttctcatactgccgtttccgacccatcttccacacccactaagattcccacagacactagtactcctcccagacagcatctgcctgcccatgagaagatggtccagagaagaagcagcttttcttcccagtctataaacagccagagcgtcggctcttctctaacacagcccgtgatgtcacaggcaacgaacctgcctatccctcagggtatgagccagttccaattttccgcccagctgggtgccatgcaacacctgaaggaccagcttgagcagaggactcggatgattgaagctaacattcacaggcagcaggaagagcttcggaaaattcaggaacagctccaaatggtgcacggacagggactgcagatgttcctccagcagtccaatcctgggctgaattttggaagcgttcaactatcgagcggaaattccagcaacatccagcagttggctcccatcaacatgcaggggcaggtagttcccactaatcaaatccaatcaggcatgaacaccgggcacatcgggacaactcagcacatgatccaacagcaaacattgcagtcaacttctactcaaagtcaacagaatgttctcagcgggcactcccaacagacatccctgcccagccagacgcagtcgacattgacagctcccttatataacactatggttatttctcagcctgctgccggaagtatggtgcagattccctccagtatgccccagaactctacccagagtgctgctgtgaccacctttactcaggatagacaaataaggtttagccaggggcaacagctggttacaaaattggtcacagcccccgtggcatgcggagccgtcatggtgccctctactatgctcatggggcaagtcgtgacagcatacccgacattcgccactcagcaacaacagtcacagacgttgtctgtgacacaacaacagcagcagcaatctagtcaggagcaacagctgacctctgtccagcagccttctcaggctcaattaacgcaaccccctcagcaatttctgcagaccagccgactgttgcatggaaatccgtctactcaactgattctgtctgccgccttccccttacagcagtccacttttccgcagagccaccatcaacagcaccaaagccagcagcaacagcaactgtctcgtcaccggacagactcactccccgacccatccaaggtccaacctcagtag

SEQ ID NO: 15682 - DNA, 1818 bp, synthetic construct
  source 1..1818: mol_type = other DNA; note = Synthetic coding sequence
atggttctttgccccgtgataggaaagctcctgcacaaacgggtggtgctagcgtctgcttcaccgcgaagacaggaaattctgagcaatgcaggactgcggttcgaagtggtgccatcgaaatttaaagagaagctagataaggcttcctttgccaccccatatggatatgctatggaaacagcaaagcagaaggcactagaggttgctaataggctgtatcagaccgttggcggcttaattctggaaaagcccgtggataaacaagatgcctacagaatgttgagtcggctttcaggacgagaacattccgtgtttaccggcgttgccatcgtgcactgcagtagtaaggaccatcaattagacaccagagtatcggaattctacgaagagacaaaagtaaagttcagcgaactctcagaagagctcctgtgggaatacgtgcatagtggcgagcccatggacaaggcaggcggctacgggatccaggcactgggcgggatgctagtggaaagtgtgcacggagactttctcaacgtggtaggatttcccttgaaccacttctgtaaacagctagttaagctctattacccgcctcggcccgaggatctgcgccgaagcgtgaagcacgactctattcccgccgcagatacttttgaggacctgagtgatgtcgagggtggaggttcagaacccacacagagagacgccggatcacgggacgaaaaggcggaggccggcgaagcaggccaggccacagcagaagccgaatgccatcgcacgagggagactctcccacccttccccaccagactcttggagctgatcgagggattcatgctctctaaagggctattgacagcatgtaaattaaaggtgtttgaccttctgaaggacgaggcccctcaaaaggccgccgacattgcctccaaggttgacgcttctgcttgcgggatggagcgcctcttagatatctgtgcagccatgggccttctggagaagacagagcagggatacagtaacaccgagacagctaatgtatacctcgcctccgacggagagtactctctgcatggttttattatgcacaacaatgacctgacatggaacctcttcacttatcttgaatttgcgatacgtgagggtactaaccagcaccacagggctctcggcaagaaagcagaggatctgttccaggacgcatattaccagagccctgagacccgacttaggttcatgcgagctatgcacggtatgaccaagctcaccgcatgccaggtggccacagcttttaacctcagtaggttttcctccgcctgcgatgtcggaggttgtactggagctctggctcgcgagctcgcccgagagtacccaagaatgcaggttacagtttttgacctcccggatattattgaactcgcagcccactttcagccgcccggtccccaggcagttcaaatccatttcgcggcaggcgatttctttcgtgaccctttgccctccgcagagctgtatgtactctgtcggatccttcacgattggcctgatgacaaagtgcacaagctgttgtctcgggttgccgaatcctgtaagccgggagccgggttgctcctggtggaaacactgctggatgaggaaaagcgggtcgcccagagggccctcatgcagagcctaaacatgctggtccaaactgagggcaaggagcgtagcctcggagaatatcaatgcctactggagcttcacggtttccaccaggtacaagtggtacacctgggaggcgtcctcgatgccatcctggctacgaaggtcgcgccctag

SEQ ID NO: 15683 - DNA, 696 bp, synthetic construct
  source 1..696: mol_type = other DNA; note = Synthetic coding sequence
atgacagtgggtaagtcgtctaagatgctgcagcacatcgactaccgcatgagatgtatcttacaagatgggagaatattcatcgggactttcaaggcattcgacaagcacatgaacctgattttgtgcgactgcgatgaatttcggaagattaaaccgaagaattccaaacaggctgaacgtgaggaaaaacgcgtgctcggccttgtgctgctgagaggagaaaatctggtttcaatgacagtggaggggccgccccctaaggatactggcatcgcccgtgtcccactggcgggcgccgctggaggacctgggatcgggagggcagctggccgtggcatcccagccggtgtgcccatgccacaggcccccgccggcctggccggccctgtcaggggagtcggaggcccttcccagcaagtgatgactcctcaggggcgcggaaccgtggcagccgcggctgccgctgctaccgcaagcatagcgggggccccaactcagtacccccctgggaggggggggcctcctccccccatgggaaggggggccccacctcctggcatgatggggccccctcccggaatgaggccccccatgggcccaccaatgggaatcccacctggcagagggacccccatggggatgccacctccaggaatgaggcctcctccgccaggaatgcgggggttactatag

SEQ ID NO: 15684 - DNA, 855 bp, synthetic construct
  source 1..855: mol_type = other DNA; note = Synthetic coding sequence
atgtggcgcgggctagccctggccagggctattgggtgtgccgcgcgcggtcggggtcaatgggctgtgcgcgcggcagattgtgcccagagcggacgacacccaggcccagccgtggtctgtggacgtcgcttgattagcgtgctggagcagataagacactttgtgatgatgcccgaaatcaacaccaaccacctggataaacagcaggtgcagctgttggccgaaatgtgcattttgattgatgagaacgacaataagattggtgcagagaccaagaagaactgccatttgaatgagaacattgagaaagggttactccaccgagccttcagcgtctttttattcaataccgagaacaagcttttgctgcagcaaaggtctgacgcaaagatcacattcccaggctgtttcaccaatacctgttgttcccatccactgtcaaaccctgccgaacttgaagagagcgatgctttgggagtaagacgggccgctcagaggaggctgaaggctgaattaggaatccctctggaggaagtcccaccagaggaaataaactaccttactaggatccattacaaggcgcaatccgacgggatatggggagagcacgagatcgattacatattgttagtacgaaagaacgtcaccctgaaccctgatccgaatgagatcaagtcatactgttatgtgtcgaaggaagagctgaaagagcttttgaaaaaggctgccagcggcgagatcaaaattaccccctggttcaaaatcatagccgcgactttcctgttcaaatggtgggacaacctcaaccacctgaatcagtttgtggaccatgagaaaatttatcgcatgtag

SEQ ID NO: 15685 - DNA, 180 bp, synthetic construct
  source 1..180: mol_type = other DNA; note = Synthetic coding sequence
atgaccaggggtaatcagcgcgaattagcccggcagaagaacatgaagaaacagtccgattccgtgaaaggcaaaaggcgcgatgatggtctgtctgcagcagcacgcaagcagagggattctgaaatcatgcagcagaaacagaagaaggccaatgagaagaaggaagaacccaaatag

SEQ ID NO: 15686 - DNA, 3039 bp, synthetic construct
  source 1..3039: mol_type = other DNA; note = Synthetic coding sequence
atggaggaatacgagaagttctgcgagaaaagcctcgccaggatacaggaagcatccctgagtactgagtcatttctgccagcccagtctgagtccatcagcctaattagatttcacggcgtggctatcctatcaccgctgcttaatatagagaagaggaaggagatgcaacaggaaaagcaaaaggctctggatgtggaagcgagaaagcaagtcaaccgcaagaaggccctgttaactcgagtgcaagaaatcctggacaatgtgcaggtgcggaaagctcctaatgcaagcgactttgaccagtgggaaatggaaactgtctactctaatagcgaggtccggaacctgaacgtgcccgcaacctttccgaattccttcccatcccataccgagcactcaacagccgccaagctcgacaaaatcgccggcattttacctctggacaatgaggatcagtgtaagacagacggcatcgacctggcccgcgactcagaaggctttaactccccgaagcagtgcgactcatcaaatatttcccatgtggaaaacgaggcatttccgaaaacttcctctgctacaccacaggagactctcatttccgatggcccattcagtgtaaatgaacagcaagaccttcccctcttggcagaggtcatcccagatccctatgtgatgtctttacagaacttaatgaagaaatccaaggagtatatagaacgcgagcagagtcgccgctctctcaggggctcaatcaatcgcattgtcaacgagtctcacctggataaggagcacgatgctgtggaggtagccgattgcgtgaaagaaaaaggccagctcacaggtaagcactgcgtatctgtgattcctgacaagcctagcctgaacaagtccaacgtgctcctccagggggcttctacccaggcttcaagtatgtcaatgccagtgctggcctctttttctaaggtagacatccccatcaggaccgggcatcctactgttcttgagtccaattcagactttaaggtgatcccgacatttgtgaccgagaataacgttattaaaagcctgaccggaagttatgcaaaactgcccagccccgaaccttcgatgagccctaagatgcaccggcgcagatcaaggaccagctccgcctgccacatcctgatcaataaccccatcaacgcgtgtgaactgtcaccaaaggggaaagaacaggctatggatttaataatccaagatacggacgagaacaccaacgtccctgaaatcatgcccaagctgccaactgacctcgcaggcgtgtgtagctccaaagtgtacgttggcaaaaacacatccgaggtgaaagaggacgtggtcctcggtaagtcaaatcaggtgtgtcaaagctcaggtaatcacttggaaaacaaggtcactcatggcctggtgacagtagaggggcagctgacatccgatgagcgtggtgctcatattatgaatagtacttgtgctgccatgccaaagctgcatgagccttatgcgtcgtcacagtgtattgcctctccgaattttggcacggtgtctgggttaaagccagcctctatgctcgagaagaattgttcacttcaaacggagctaaacaaaagctatgatgtgaagaatccctctcctcttttgatgcagaatcagaatacccggcagcaaatggacacacctatggtcagctgcgggaatgagcagttcctggataacagcttcgagaaagtaaaacgccggttggacctggacatcgacgggcttcagaaggaaaactgcccttatgtgattaccagtggcatcacagagcaggaaaggcagcacctgcccgaaaagcgatacccgaagggctccggcttcgtgaacaagaataaaatgctaggcacctccagtaaagaatccgaggagctgctcaaatctaagatgctggctttcgaagagatgcggaaaagattagaggagcaacatgcacaacagttgtctctgctgatagctgaacaagaaagggaacaagaaagactgcagaaggaaatcgaagagcaggaaaagatgttgaaagagaagaaggcaatgaccgcagaggcttccgagctggatatcaataacgccgttgagctggagtggcgaaagatatcagactcatcacttttggagacaatgctgtcacaggccgactcactgcatacatccaatagcaactcaagcgggtttacaaatagcgcaatgcagtacagttttgtgagtgcaaatgaggctcctttttatttgtggggttcttctaccagcggtctaaccaagctgtctgtgacacgaccctttggacgcgccaaaacgagatggtcccaggttttttctttggagatccaagcaaaattcaataagatcacagccgtggccaaaggcttccttacaagacggctgatgcagaccgacaaactgaagcagctccggcagacagtcaaagatactatggagttcatcagatcgtttcagagcgaggcccccctcaagcgcggcattgtctccgctcaagatgccagtttacaagaaagggtcctggcccagctgcgagccgccctgtatgggatccatgatatcttttttgtgatggacgctgctgagcggatgagtattctgcaccacgatagagaggtgagaaaggagaaaatgctgcgccagatggataagatgaaatcacctagagtggcactttcagcggcaactcaaaaaagtctggatagaaagaaatatatgaaggcggctgagatgggtatgccgaataagaagtttctggtcaagcagaatccatccgagacgagggtgctgcagccaaaccaagggcagaatgcccctgtgcacaggctactaagccgccagggaacgccaaagaccagtgtgaagggtgtcgttcagaaccgtcagaaaccctcacagtcccgtgtcccaaatagagtgcctgttagcggcgtatatgcgggcaagatccagagaaaacgccctaatgtggcgacaatttag

SEQ ID NO: 15687 - DNA, 267 bp, synthetic construct
  source 1..267: mol_type = other DNA; note = Synthetic coding sequence
atggcgagtgcctctgcgcgaggtaaccaggataaggatgcacacttccccccccccagcaaacagtcactgcttttctgccctaagtcaaaactgcatatccaccgagctgagatctcaaagatcatgagggagtgccaggaagaatctttttggaagagggccctgcccttctccctggtaagtatgcttgttacgcaagggctggtgtatcagggctacttagccgccaattcccggttcggctcactccctaaagtggcctag

SEQ ID NO: 15688 - DNA, 738 bp, synthetic construct
  source 1..738: mol_type = other DNA; note = Synthetic coding sequence
atgaacggaagagcagactttcgagagcctaacgcggaggtgccacgcccgatcccccatatcgggcctgattatatcccgaccgaggaagagcggagggtattcgccgagtgcaacgacgagtccttttggttcaggtccgttcctctagcggctacttcgatgttaattacccagggacttatttccaaaggtatcctctccagccatcctaaatacggtagtatccctaaactgattctggcctgtataatgggctatttcgctgggaaactctcttatgtgaaaacctgccaggagaaattcaaaaaacttgagaattctcctttgggcgaggccctgagaagcgggcaagctcgtcgatcaagccctcccggacattattatcaaaaaagcaagtatgactcttctgtgtccggacagagcagctttgtgacaagtcctgcagcagataacatcgaaatgttaccacattacgagccaataccatttagctcttctatgaacgaaagtgctcccacaggaatcacagatcacatcgtgcagggaccagatcctaacttagaagagtcgccaaagagaaaaaacatcacttatgaagaactgcggaataaaaacagagagtcctacgaggtttcccttacgcagaaaaccgatcccagcgtccggcccatgcacgagcgagtaccaaaaaaagaagttaaggtaaacaagtatggcgatacctgggatgaatag

SEQ ID NO: 15689 - DNA, 1551 bp, synthetic construct
  source 1..1551: mol_type = other DNA; note = Synthetic coding sequence
atgtcataccctgccgacgactacgaaagcgaggcagcatacgacccctatgcttatccttcagactatgacatgcacaccggagacccgaaacaggatcttgcctatgagcgccaatacgaacagcagacctatcaggtcatccctgaagtgattaaaaactttattcaatactttcacaagactgtgtccgatctaatcgaccagaaagtttatgaacttcaggcaagccgcgtgagttcagatgtgatcgaccaaaaggtttacgagattcaggatatttacgagaatagttggacaaagttgaccgagagattcttcaagaatacaccttggcctgaagccgaagccattgcgccccaggtgggtaacgacgctgtcttcctcatcctctacaaggaattgtactataggcatatttatgcaaaagtgtcgtttcagagtttctctcaataccgctgtaaaaccgccaaaaagagcgaggaggagatcgatttccttagatcaaacccaaagatctggaacgtgcattcagtcctcaacgtgctccatagcctcgtagataagtctaacatcaaccgtcagcttgaggtgtatacctctggcggtgaccccgaatcagtggctggtgaatacggcagacactccctctacaaaatgttaggctatttcagtctggtgggactgctacgccttcacagcctcctcggcgattactaccaagcgatcaaagtgctggagaatatcgaactcaataagaagagtatgtatagcagagttcccgagtgtcaagtgactacctactactatgtggggttcgcatatctgatgatgagacgctatcaagatgccataagagtcttcgctaacatattgctgtacatccagcggactaagtcaatgtttcaacggaccacctacaagtatgagatgattaataaacaaaatgagcagatgcacgcactactggcaatcgcactaaccatgtacccaatgcggattgatgagtcaatccatttgcagctcagggaaaaatacggtgacaagatgctcagaatgcagaagggcgatccacaggtgtacgaggaattattctcctacagctgtccaaaatttctcagtcccgtggtaccaaactacgacaacgttcatcctaactaccataaggaaccatttctgcagcagctgaaagttttttccgacgaagtgcagcaacaggctcagctcagcacaatccggtcatttcttaagctatatacaactatgcccgtggccaaactggctggtttcctggacctgaccgaacaagaatttagaatccaactcctggtcttcaagcataagatgaagaatctggtgtggacatcaggtatctctgccttagacggtgaatttcagtctgcatccgaggtggacttttatattgataaggacatgattcatatcgccgacaccaaagtggcccgaaggtacggcgatttcttcattagacagattcacaaattcgaggaactcaaccgtacattgaaaaagatgggtcaaagaccatag

SEQ ID NO: 15690 - DNA, 2502 bp, synthetic construct
  source 1..2502: mol_type = other DNA; note = Synthetic coding sequence
ctttcacgacgtgtgccttgcgtgagaagaggatgtcggccccctcttccaccattacctggctcccaaagtagagcctggtctagagatcgggaggctccactggatccggggaggccggctcaaagcgggcgacgacccacaagcaggtcagtgtcacacgcttgcagctggaacggaggctctctggatccactggaagggacccctgctctcctgcgcagtgcggaacggctcatgcgcaaggttaagaagctgcggttggataaggaaaacaccggctcatggagatcttttagcttgaacagcgaaggggccgagagaatcacctcatacgatttccactccgaaagcgggctgttcctgttccaggcaagcaactctctatttcactgccgcgacgggggaaagaacggcttcatggtgtcaccaatgaaacccttggaaatcaagacacagtgctcagggcccagaatggatccaaaaatctgcccggccgatcccgcgttttttagtttcattaacaacagcgatttatgggtggctaacatagagactggagaggagagaaggctgactttttgccatcagggtctttccaatgtgttagatgaccccaaaagcgcaggggtggccacattcgtgatccaggaggagtttgaccgttttaccggatactggtggtgccctacagcctcgtgggagggctccgagggcctgaaaaccctgaggattctctatgaagaggtagacgagtccgaggtggaagtgatccacgtgccttccccagccttggaggagagaaagaccgactcataccggtaccctcgaaccgggagcaaaaatccgaaaatcgccctgaagctggccgaattccaaacagatagtcagggaaagatcgttagtacgcaggagaaggaactcgtacaacccttctcgtcgctgttccccaaggtcgaatacatcgccagggctggctggactagggacgggaagtacgcctgggcaatgtttctggatcggccacagcagtggctgcagctggtattactcccacctgccctcttcattccctcgacagaaaatgaagaacagcggctggcgtccgcccgggccgtgccaagaaacgtgcagccttacgtggtgtacgaggaagtgactaatgtttggatcaacgtgcatgacattttctatccatttcctcaaagcgagggagaagatgaactgtgttttttaagagcaaatgagtgcaaaacaggtttttgccatttgtacaaagttactgccgtgttgaagagccagggatacgactggagcgagcccttctcacccggcgaagacgaattcaagtgtccaatcaaagaggaaatcgccctaacctccggtgaatgggaggtgctggctaggcacgggagtaaaatctgggtgaacgaggagaccaagctcgtgtacttccagggaaccaaggacaccccccttgagcaccacctgtatgttgtgtcctatgaagccgcaggtgagatcgtgcggttgacaactcctggcttctcacatagctgtagcatgtcacagaattttgatatgttcgtgtcccactactccagcgtgtccactcccccctgcgtgcacgtgtataagctgtccgggccagatgacgatcccctgcacaaacaaccaaggttctgggcatctatgatggaggccgcctcttgccctcccgattacgtacccccagagatcttccactttcacactagaagtgacgtacggctttacggaatgatttataagcctcacgcactccaacccgggaaaaaacatcctactgtgctctttgtgtatggaggcccacaggttcagctcgtgaataattcatttaaaggaataaagtaccttcgcctgaataccttggcatccctcgggtatgcagtggtggtgatcgacggtcggggttcctgtcagagaggtcttaggtttgaaggagctctgaaaaatcaaatgggccaggtggagatcgaggaccaagtagagggactccagttcgtagcagagaagtacggcttcatagacctgagccgtgtggccatccacggatggagctatggagggttcctctccttgatggggctaatccataaaccacaggtgttcaaggtggcaatcgccggggcaccagttacagtctggatggcgtacgataccggttacactgaacgctacatggatgtacctgaaaacaaccagcacggatacgaagctggatccgtggccctccatgtggagaaactccccaatgagccgaacaggttgctgattctgcatggtttccttgatgagaacgtccacttctttcacaccaattttcttgtatctcaactgatccgggcagggaaaccgtaccagctacaaatctatcctaatgagcgacactccatacgctgccccgaatcaggggaacactacgaagtgacccttctgcatttcttgcaagaatacctttag

SEQ ID NO: 15691 - DNA, 5073 bp, synthetic construct
  source 1..5073: mol_type = other DNA; note = Synthetic coding sequence
atggattgcctgctcgagctaagtgccactgacacaaagatcgaggaatctagctcccagtcctttgttgcaagcgaaaatcaggtcggcgcggcggagagcaagataatggaaaagaggcccgaggaggaaagcgaagacagcaaaatggacagttttttggacatgcagttgactgaggacctggactccttgatccaaaacgccttcgagaaactaaattcttcccctgacgaccaagtgtacagtttcctaccctcacaggatgtgaattcttttaacgactctagtgagtttatcaaccccgactcttccaacatgacacccatttttagcacacagaatatgaatctaaatggcgaaaatctcgagaattctggttcgaccctttcactcaatcctttgcccagccatagtgtattaaatgagtcgaagtgcttcattaaggataacaccctcgcactcgaatcaaactaccccgaagattccctgctcagctcatcattgaacgtggcaagtgacagcattgcaggttgcagctccttaaatcagaaacagaaagagctattggagagtgagtgtgtggaggcacaattttccgaggcacctgtggatcttgacgcttccgaaccacaggcttgtcttaacctacctggcctggacctgcccggcaccggcggcgaccaaaagagcacccgcgtcagcgacgtctttttaccatctgaaggattcaatttcaagccccacaaacaccctgaactacctactaagggtaaggatgtgtcatactgtcccgtgctggcccccttgcctctcctgctgccaccccccccaccacctcccatgtggaaccccatgatacccgctttcgatctgttccaaggaaatcacgggtttgtcgcccccgtggtgaccaccgccgctcattggagaagtgtgaactatacatttccccctagtgtaataagtcacacttcgcctaccaaggtgtggaggaataaagatggcacttcagcctaccaggtgcaggaaacaccagtgtcccaagtagtgcggaagaagacaagttatgtcgggctggtgttggtgttattgcgaggcttacctggctccgggaaatcatttctggcccggactctccaggaagataatcctagtggggtgattctgagcaccgacgattacttttacatcaatggacagtaccaattcgacgtgaagtacctaggagaggcccatgaatggaaccagaatagggccaaggaagcttttgagaaaaagattagtcctattattatcgataacacaaatctccaagcgtgggaaatgaaaccctacgtggccctaagccagaagcacaaatacaaggtgctgttccgagagcccgacacatggtggaaatttaagcccaaagagttagcccggcgcaacatccatggcgtgtctaaggagaaaatcactaggatgctcgaacactaccagagattcgttagtgtgccgatcatcatgagtagttccgtgcccgaaaaaatcgagcgcatcgagttatgcgcctatagctgtgaggacaggtctacatctccaagggatgacgaggacatcatatcagagaaagaggagaacatcctgtcactgtccctgaaacatttagagttcactgaagagaaaaacctggacgttaccaaggaaaccatgttaccagaaaacgtcgcttatctttccaacgccgacctgaataagcggcggaaggagattagtgacatgaaccctagtatccagtccgctctgatcctcgaaaccccccacatgtatttttcagattccgagagcaagttgcaggccaccgacaagtccgaaaacgaacagattgagatggttgccgtcaaggggtattccaaaaccgatactgattcctccatggagagggtttcaccaagcacatgctgttcggagaataatcaagaagactgtgatctggccaacagcggacccctgcagaacgaaaagtccagtcccggcgaaattgtcgaagaacgggcgaccgtgaccaagaaggccttcggtaaacagaagagtaagtcgaccctggagaaattccctagacatgagctaagtaactttgtgggagattggcccgttgacaagaccattgggcagcgcaccaagagaaatcgcaagacagaaaaaacttcaagcgtccagtctgataaaaagtacaactatccacagtcacacaagctggtcaactcggttagtgtgaatacagattgcgtccagcaaaggggctcgccccacgagtcagtggaggatggtcgaaagtcgcagtgcgatgatgcctccgaacccctgaactcctacaagtacgacgcgtataagaacatcgataaaaattctttcaacattatgggcgactggccctccagcgacagtctggctcaaagggagcacagatccaggatgcccaaaactggactgtccgagccaaatctcgaaataggcacgaatgacaagatgaacgaaatcagcctgagcacagcccatgaagcttgttgggggaccagttcacaaaagctcaaaaccttggggtcttccaacctggggtcctccgagatgctgctgagtgaaatgacctgcgagagccagacatgcctgagtaagaaatcacatggtcaacacacatctttaccacttactttcaccaattcagcaccgactgtatcaggtgttgtagagccccagaccttggccgagtgtcaggagcaaatgcctaaaagagacccaggaaaagaagttggcatgtgcactcagacagagccccaggactttgccctcctgtggaagattgaaaaaaataaaatttccatatcagacagtattaaagtgctgacgggacgcctggacggctttaaacccaaagtcttcaatataaacacaaagtccgatgtgcaggaggccataccgtatcgggtgatgtatgataagtcaactttcgtcgaagagagtgagctaacatcggccgatgaatccgagaacttgaacatcttatgcaaactcttcggctctttctccctggaagcactcaaagatctgtacgaacgctgtaacaaggatatcatctgggctacatctctccttttggattctgaaacaaagctgtgcgaagacaccgaatttgagaatttccagaaaagctgcgacgggtcccagatcggacctttttcactgggcctcaatctcaaggagatcatctcccaacgaggaaccctcgaaaattccaacagccccgtaccggaattctcccacggcattggaatctctaatgcggactctcagtccacctgcgacgctgagagaggaaattccgaacaggcggagatgcgcgcagtcacccctgagaaccatgaatccatgacgtccatttttccgtccgcagctgtgggtctgaaaaataacaacgatattcttcctaacagccaagaggagttgctttatagcagcaaacagtctttcccaggcatccttaaggccaccactcccaaagatatgagcgagacggaaaaaaacctggtggttaccgaaacgggcgataacattcacagtccatctcacttttcagacatttttaactttgtgagctccacatccaacctcgagcttaacgaagaaatttattttactgattcacttgagatcaagagaaatgaaaactttcctaaggactacgtgaaattctccgacgaagaagaattcatgaatgaagatgagaaagagatgaaagagatcctgatggcagggtccagtctctctgctggcgtcagcggcgaggataagacagagatactgaacccaaccccggccatggctaagtctctcaccatagattgtctggagttggccttgcccccggagttggcattccagttaaatgaactgtttggaccagtggggatagattccggctccctgaccgtggaggactgtgtggtacatatcgatctgaatctcgccaaagtgatacatgagaagtggaaagaaagtgtaatggagcggcagcgtcaggaagaggtatcctgtggaaagtttatgcaggaccctagcttggtgggccacacaggcctggacaatccggagcagaagagctcacagcggactggaaagaaactgctcaaaactctgactgcatctgagatgttgcctctcttggatcactggaatactcagactaagaaagtgtccctgcgcgaaatcatgtccgaggaaattgcgctgcaggagaagcacaacctaaagcgtgaaacattaatgttcgagaaggactgcgccactaagctcaaggagaagcaactgtttaaaattttccccgcgattaatcaaaattttcttgtggatatttttaaggatcataattatagcctcgagcatactgtgcagttcttaaattgtgtattggaaggcgatccagtgaagactgtcgtggcccaagagtttgtgcaccagaatgaaaatgttacaagtcacacagggcagaaatcaaaggaaaaaaaacccaaaaaactcaaagagaccgaggagacaccatctgaactgagctttcaggacttcgagtaccctgactatgacgattatcgggctgaagcctttctgcaccagcagaagagaatggaatgctacagcaaagccaaagaggcctaccgaatcggtaaaaagaatgtggccacattctacgctcagcaggggactctgcacgagcagaaaatgaaagaggccaatcatctagctgccatcgagatcttcgaaaaggttaacgcctcactgcttccacaaaacgtccttgatctgcacggcctgcatgttgatgaggccctggagcacttaatgcgtgtcctcgagaaaaaaactgaggagtttaagcagaatgggggaaaaccatatctgagtgtgatcaccggacgaggtaaccactctcagggcggagtggcacgcatcaaacctgcagtgataaaatatctcatcagccactcttttaggttctctgaaattaagcctggctgtttaaaggttatgttgaagtag

SEQ ID NO: 15692 - DNA, 477 bp, synthetic construct
  source 1..477: mol_type = other DNA; note = Synthetic coding sequence
atgggctctggctcaagccgcagctccaggaccctgcggcgtcggcggtcacctgagtccttacccgctggacctggtgcagctgccttggagggcggtacccgtagacgcgtgcctgtggccgccgccgaagttcctggcgccgccgcagaagaggctcccggacgggatccctcacccgtagccccccctgacggtcgggatgaaacactgcgtctgctggacgaactcctggccgagtcagcggcatgggggccccctgagcctgcacccagacgacctgcaagattacggcccactgcggttgccggatccgctgtttgcgccgaacagtcaacagagggccatccgggtagcggtaacgtgtcagaggctccgggctctgggcgcaagaaaccagagcgaccggctgccattagctacgaccatagcgaggaaggcctcatggcttctatcgagcgcgagtactgcagatag

SEQ ID NO: 15693 - DNA, 738 bp, synthetic construct
  source 1..738: mol_type = other DNA; note = Synthetic coding sequence
atggagaagacagaattaatccagaaggctaagcttgccgagcaggccgagcgttacgacgacatggctacatgtatgaaagcagtgactgaacaaggcgctgagctgtcaaatgaagagcgcaatttgttgtctgttgcttataaaaatgtggtgggaggtcgccggtcagcatggagagttatttcctcgattgaacagaagaccgacaccagcgacaaaaagttgcaactgatcaaagactacagagagaaagtggaatcagaattaagatcgatttgcacaacggtgctggaactactggacaagtatcttattgccaacgccaccaacccagaaagtaaggtattctacttaaagatgaaaggcgactacttccgttacttggccgaagttgcctgtggcgacgacagaaagcagaccatcgataatagccagggcgcgtaccaggaagcgtttgatataagtaaaaaggagatgcaaccgacccaccccattagacttggtttggccttgaattttagtgtgttttattacgagatcctgaacaaccctgagctcgcgtgcaccttggctaagacggcctttgatgaggcgattgcggagctcgataccctcaacgaagacagctataaagactcaactctcatcatgcagctcctacgcgacaacctcaccttatggacatcggacagcgccggtgaggagtgtgatgcagccgaaggagccgaaaactag

SEQ ID NO: 15694 - DNA, 1014 bp, synthetic construct
  source 1..1014: mol_type = other DNA; note = Synthetic coding sequence
atggagcagccctggccacctcctggtccttggagtctgccaagggcggagggtgaggcagaagaagaatcagactttgatgtgttcccctcatctccccggtgtccccagctgcccggcggcggcgcccaaatgtactcccacgggattgaactcgcttgtcagaaacaaaaagagtttgttaagagctccgtagcttgtaagtggaatctcgcagaggcccagcaaaagctggggagtttagctttgcataactctgagtctcttgaccaggagcatgctaaagcccagaccgctgtaagcgagctccgtcagcgagaagaagagtggaggcaaaaggaggaggcccttgtgcaaagggaaaaaatgtgcctctggtccacagatgctatttccaaggacgtttttaataaatcgttcatcaaccaggacaagaggaaggacactgaagacgaagacaagagtgaatcctttatgcaaaagtacgagcaaaaaattaggcattttggaatgctctcccggtgggatgactctcagaggtttctgtctgaccacccttatctcgtatgtgaagaaaccgctaaatatttaatattgtggtgtttccacttggaggcagagaaaaagggagcgctgatggagcagatcgcacaccaagccgttgtgatgcaatttataatggagatggcaaaaaactgcaacgtcgatccacgggggtgcttccgtctgttctttcagaaggcaaaggcggaggaagaaggctatttcgaggcctttaaaaacgaacttgaggctttcaagtcacgagtgaggctttacagccaatcccaatcctttcaaccgatgactgtgcagaatcacgtcccgcacagtggcgttgggagtatcgggctgttagagtctttgccccagaatcccgactacctccagtacagtattagcactgccctatgtagtctgaatagtgtagtgcataaggaggacgacgagccgaaaatgatggacaccgtgtag

SEQ ID NO: 15695 - DNA, 927 bp, synthetic construct
  source 1..927: mol_type = other DNA; note = Synthetic coding sequence
atggagcagccttggcccccaccaggtccttggagtctaccacgggccgaaggtgaggcagaagaagagtcggattttgatgtatttcctagctccccccggtgcccacagctgcccggcgggggggcccagatgtattcccacggaattgaactcgcatgccaaaaacagaaggaatttgtgaagtctagtgttgcatgcaagtggaatctagcagaggcccaacagaagctgggatccctcgctctccacaacagtgaatcacttgatcaggaacacgcaaaagcccaaactgcagtgtctgaacttcggcaacgggaagaggagtggcgccagaaagaggaggccctagtgcagagggagaaaatgtgcctgtggtctacggacgccatctccaaggacgtgtttaacaagagctttattaatcaggataaaagaaaggataccgaagatgaggataaatctgaatctttcatgcagaaatacgagcagaagatccgtcatttcggcatgcttagtcgttgggacgactcacagaggttcttaagcgatcatccctatttggtgtgcgaagagaccgccaagtacctgatcttgtggtgtttccacctggaggccgaaaaaaaaggggctctcatggaacagatcgcacatcaggccgttgtcatgcagttcataatggaaatggccaagaactgcaacgtggatccacggggttgtttcaggctcttcttccagaaggctaaagctgaggaggaagggtacttcgaagctttcaagaacgagctggaagctttcaaaagccgcgttaggttgtattcccagtctcagagcttccaacctatgaccgttcaaaatcatgtaccgcattcaggagtcggttccattggacttcttgaatctctgccccaggctcccagattttag

SEQ ID NO: 15696 - DNA, 4227 bp, synthetic construct
  source 1..4227: mol_type = other DNA; note = Synthetic coding sequence
atgtggagcctgaccgcatctgagggagagtccaccacagctcacttctttctgggggctggcgacgagggtctcggcaccaggggaatcgggatgagaccagaggagtccgactccgagctacttgaagacgaagaagacgaggtaccccccgagccacagattatcgtaggtatttgcgccatgactaagaaaagtaagagcaaaccaatgactcagatccttgaacgcctttgtcggtttgactatctcactgtagtgatcctgggggaggacgtgatccttaatgaacccgtggaaaattggccatcatgccattgtctgatttcctttcacagtaagggtttccctcttgataaggccgtcgcgtactccaagctccggaatccctttctgatcaatgatctggcgatgcagtactatatacaggatagacgagaggtgtacagaatactccaggaggaaggcattgatctgcccagatatgctgtgttgaatagagaccctgcaagacccgaagagtgcaacctaatagagggagaggaccaggtggaggtgaacggagcagtctttccaaagccatttgttgaaaaacctgtttctgctgaggaccataacgtgtacatttattacccatcgtccgctggcggcggttctcagcgcctgttccggaaaattgggagtcggagctctgtgtacagtcctgagtcctctgtgaggaagaccggcagctatatatatgaagagttcatgcccacggatgggactgatgtgaaggtgtatacagtcggaccggattatgcccacgccgaggctcgtaagagtccagcactcgatggtaaggtcgagagagatagtgagggtaaggagatcagatatcctgtaatgctgacagcaatggagaagctcgtggcaaggaaggtgtgtgttgcatttaagcagaccgtttgcggatttgacctcctcagagccaatggccacagtttcgtgtgtgatgtgaatggctttagcttcgtcaagaattcaatgaaatactacgacgactgtgctaagatcctcgggaatactatcatgagagagctggctcctcagttccagatcccttggagcatcccaactgaagctgaagatattcccattgtccctaccactagtgggacaatgatggagttacgctgcgtaatcgccattataagacatggagacagaacgcctaagcagaaaatgaagatggaagtgaagcaccctaggttctttgccttattcgagaaacacggcggctataagacaggcaaattaaaacttaaaaggcctgaacaactgcaggaggtattggacattacgagactgttattagccgaactggagaaggagcccggcggcgaaattgaggagaaaacaggaaaactggagcagctgaagagcgtcttggaaatgtacggacatttctcaggcatcaaccggaaggtacagctgacctactatcctcacggagttaaagcgtccaacgaggggcaggacccgcagagggaaactctggcaccatctcttctgctggtgttaaagtggggcggagagctaacgcctgcgggaagggtccaagcggaggaactaggccgggcgtttcgctgtatgtatcctggggggcaaggcgattacgcggggtttcctggttgtggtctgttgcgactccacagtacattcagacacgatctaaagatttatgcttccgacgaggggcgggtccaaatgactgcagctgcttttgctaaggggctcctagccttggaaggggagctcactccaattcttgtgcaaatggttaaatcggctaacatgaatggtctcttggatagcgatggcgattcactatcctcctgtcagcatagagttaaagcacgactgcatcatattctccagcaagatgcaccttttggccccgaggactatgatcagctggcgccaacccggtccacatctcttttaaactccatgactattattcagaatcccgtgaaagtgtgcgatcaggttttcgcactcattgaaaatttgacacatcaaatccgtgaaaggatgcaggatcccaggtccgtggacctgcagttgtaccactcggagacactggaactcatgctacaaagatggtcaaaacttgaaagagatttcagacaaaaaagtggacggtacgatatctctaaaatacccgacatatatgactgcgtaaaatacgacgtacaacataatgggagtctgggcctgcagggcaccgcagaactgctgcgcctgagcaaggcgcttgcagatgtcgtcatcccacaggagtacggcatttcccgggaagaaaaactggagatcgcagtgggattttgcctccccctgcttcgcaagatcctcctggacctgcagagaacacacgaagatgaatcggttaacaagcttcacccactgtacagccggggagttctgtctccaggcagacacgtacgaactcgcttatatttcacgtcagagtcacacgtgcatagcttattatcggtcttcagatacgggggcctgctcgacgagacgcaagacgcacagtggcaacgtgctcttgattacttgtcagcgatttccgagcttaactacatgacacagatcgtgatcatgctgtacgaggataatacacaggatccactgagtgaggagagatttcatgtcgagctccatttctcaccgggggtgaaaggcgtcgaggaggagggcagcgctcctgcagggtgcggattcaggccagcatctagcgagaacgaggagatgaaaactaaccaggggagcatggaaaacctatgccctggtaaggcctccgatgagcccgacagagcacttcagactagcccccagcccccagagggacctggccttcctcgcaggagcccactgattcgcaatcgcaaagcaggatccatggaagtgctgtcagaaaccagttcctcgagaccaggaggatatcggctgttttcatcgtctagaccacccacagagatgaaacagtcaggcctaggatcccagtgcacgggcctgttctccaccacagtacttggagggagtagctccgcccctaacttacaggattatgcacggtcccacggaaaaaagcttccaccggcaagccttaaacaccgggacggcttcgagggatgctctatggtgcctactatttatccactcgagacccttcataatgcactgagtctgagacaagtttcagagtttctgtccagagtatgccagcgccacacagacgcccaagctcaggccagcgcggcgcttttcgactctatgcattcttcccaggccagcgataatccgttttctccacctcggaccctccattcccctcccctgcaacttcagcaacgcagtgagaaacctccttggtacagtagtggtcccagctccactgtctctagtgccggtccatccagtcctaccacagtggacggaaattctcaatttggttttagtgaccagcctagcctgaacagccacgtggccgaggaacaccagggcttgggcctgctgcaagagactccgggctctggtgctcaagagttaagtatcgagggcgagcaggagctttttgagccaaatcagtccccccaagtgcctcccatggaaacttctcagccatacgaagaggtgtcacagccatgtcaggaggtcccagatatttcccaaccttgccaggacattagtgaagccctgagtcaaccctgtcagaaggttccagatatttcccagcagtgccaggagaatcatgataatggaaatcacacgtgtcaggaagttccccatatctcacagccttgccagaagtcctcccagctgtgccagaaggtctccgaagaggtctgccaactctgtttggaaaactcagaagaagtgagccagccatgtcagggtgttagcgtggaggtggggaaactggtacacaaatttcacgttggagtgggctccctggtacaggagactctcgtggaggtggggtctccagccgaggagatacccgaggaagttatccagccctatcaagagttctcagtcgaagtcggtcgcttagcgcaggagacaagtgccatcaatctgttaagccagggtatcccagaaattgacaaaccaagccaggaatttcccgaggagatcgacctgcaggcacaggaggtgcctgaagagatcaattag

SEQ ID NO: 15697 - DNA, 528 bp, synthetic construct
  source 1..528: mol_type = other DNA; note = Synthetic coding sequence
atgattcttaacgtgttagaatacggcagtcaacaggtcgccgacttgaccctcaacttggacgattatatcgatgcagaacacctgggagattttcacaggacatataagaatagcgaagaactccggagccggatcgtcagtggcatcattaccccaatccacgaacaatgggagaaggcgaatgtcagctcaccccaccgcgagtttcccccagccactgcgcgggaagtggaccctttgcggatccccccccatcacccccacacatccaggcaaccaccatggtgcgatcctctcggaccttttgtcgtgggaggtgaggatttagacccgttcggtccgcgccgcggtggcatgatcgtggacccgcttcgtagtggatttcccagagctctgatcgacccttcctccggcttgcccaaccgactgccacctggcgccgttcccccaggcgctcgcttcgacccattcgggcctataggcacgagccccccgggcccacgccccgaccgaaggggacagtag

SEQ ID NO: 15698 - DNA, 552 bp, synthetic construct
  source 1..552: mol_type = other DNA; note = Synthetic coding sequence
atggcagggctggaagtcctcttcgcttcagcagctcctgctatcacctgccgccaagacgctctggtgtgttttctccactgggaggtggtgacacacgggtacttcggcctcggagtcggggaccagcccgggcccaacgataaaaagtccgaacttctgcctgccggatggaacaataataaagacttgtatgtgctaaggtatgaatataaggatggctcgcgaaagcttctcgttaaggccatcaccgtcgagtccagcatgatcctcaatgtgctcgaatacggcagtcagcaagtagccgatcttaccctgaatttggacgattacattgacgctgagcaccttggagacttccacagaacctataagaactccgaagaactccgctccagaatcgtcagcggaatcattacccctatccatgaacaatgggagaaagccaacgtcagctctccccaccgggagttcccacctgcaaccgcgagagaagttgaccccctccggatacctccccaccatccgcacacctctagacagccgccatag

SEQ ID NO: 15699 - DNA, 888 bp, synthetic construct
  source 1..888: mol_type = other DNA; note = Synthetic coding sequence
atgcctgtgcatactctgtctcccggggcgccgagcgctccagctctcccatgccgactgcgaacacgcgttccagggtatttgcttcgcgggcctgccgacggcggtgcaagaaagcccagcgctgtggaacgacttgaggccgacaaggcaaagtacgtgaagagtctgcatgtggccaataccaggcaagagcctgtgcaacctttgctctccaagcaacccctcttctcgccagagacccggagaactgttctcacacccagcagaagggcactccctgggccatgccgaagaccacagctggatctagatattctgagctctttgattgatctgtgcgattcccccgtcagcccggccgaagcctccagaacccccggtcgcgccgagggggcaggacgcccccctccagccaccccccctcggccgccaccgtcaacgtctgcggtccggagagtagacgtgcgacctctgcctgcttcacctgcaaggccttgtccatcccccggacctgcagcagcttcctccccggccagaccaccaggactacaacggtccaagtccgacctgtccgaacggtttagccgtgcggccgcagatctggagcgtttcttcaacttttgtgggctagacccagaggaggcccgcgggctgggagtggcacatctcgccagggcaagctccgacatcgtcagcctcgctggcccgagtgcaggtccaggctcttccgaaggaggctgctcgcgtaggtcaagcgtaacagtggaggaaagggctcgggaaagagtcccctacggggtttccgtggttgaacggaatgcgcgtgtgatcaagtggctttacggactgaggcaggcccgagagtctcccgccgcagagggttag

SEQ ID NO: 15700 - DNA, 888 bp, synthetic construct
  source 1..888: mol_type = other DNA; note = Synthetic coding sequence
atgcctgttcacaccctttcccctggggccccaagtgccccagcgctcccctgtcgattacggacacgcgtcccggggtatctcctgcgggggcctgctgacggaggggccagaaaaccctccgcagtggaacgtctcgaagctgacaaggccaagtatgtcaagtcacttcacgtggcaaacactcgacaggaacctgtgcaacccctattgtctaaacagcctctcttttccccggagacacggcggacagttcttactccttcccgcagggctttgcccgggccttgtaggcggccacagcttgatctggatatactcagctctttgattgatctttgcgattctcctgtgtcccccgccgaagccagccgtacacccgggagggcagagggagctggccgccccccccctgctactccacctcgcccaccgccttcaacttccgcagtcaggcgagttgacgtgcgtcccctacctgcaagtcccgctagaccctgcccatcccccgggcctgctgccgcatctagccctgcccggccgcctggcctacaacgcagcaagtcagatctgtctgagaggtttagcagggccgctgcagacctagagaggttttttaacttctgtgggctagatcctgaagaagctcgcgggttgggcgttgcccatctggcgagggcctctagcgacatcgtaagcttggcgggaccttctgccggcccaggcagcagtgaagggggctgcagccggagatcttctgtgacagtggaggagagagcccgggagcgtgtgccctatggagtttcagtcgtcgagcgcaacgctcgagtgatcaagtggctctacggtctgcgccaggccagggagtcccctgccgcggaagggtag

SEQ ID NO: 15701 - DNA, 414 bp, synthetic construct
  source 1..414: mol_type = other DNA; note = Synthetic coding sequence
atgggtctccgggctggaggtacccttggtagagctggtgccggccgcggcgctcccgagggtccaggcccctctggcggagcccagggtggatcaattcattctggtagaatcgccgcggtgcacaatgtcccactgtctgtgctcatccggcccctaccttccgtactggaccctgctaaggttcagtccttggtagacacgattagagaagaccctgacagtgtgccaccaatcgatgtgttgtggataaagggtgcccaaggtggagattacttctactcattcggtgggtgtcacaggtacgccgcctaccagcagctgcagagggagaccatcccagctaagcttgtccagtcgacgctcagcgatctgagagtgtaccttggagcctcaactcctgatttacaatag

SEQ ID NO: 15702 - DNA, 1731 bp, synthetic construct
  source 1..1731: mol_type = other DNA; note = Synthetic coding sequence
atgaagtgtcactatgaagccctgggggttcgtagggacgcttccgaagaggagctgaaaaaagcctaccggaagctcgccttgaagtggcacccagataagaacttggataatgccgcagaggccgcggagcagttcaagctcatccaggccgcatacgacgtgttgtccgacccacaggagcgcgcctggtacgataaccatcgcgaagccctgctgaagggcgggttcgatggcgagtatcaggatgactctttggacttactcaggtattttaccgtcacctgctattctggttacggagacgatgagaaagggttctacacagtttaccggaacgtgtttgagatgatcgcaaaggaggagttggagtcagtgctcgaagaagaggtggatgattttccaacgttcggggactctcaatcggattatgacactgtggtgcatccattctacgcctactggcagtcattttgtacgcagaagaacttcgcgtggaaggaggaatacgacacgcggcaagcctccaatagatgggagaagcgcgccatggagaaggaaaataagaaaatacgcgacaaagctagaaaagagaaaaatgaacttgtgaggcagttggtggcctttattaggaagcgcgataagcgcgttcaagcccaccggaagctcgtcgaagagcagaatgccgaaaaagccaggaaagcagaggaaatgcgccggcagcagaaactgaaacaggccaagctggtggagcaatacagggaacaaagttggatgactatggccaacttggagaaagagctgcaggaaatggaggcccgatatgagaaagaattcggagatggttcggatgaaaatgaaatggaggagcacgagctgaaagatgaggaggatggtaaggatagcgacgaggcggaggacgcagagttatatgatgatctgtactgtccagcctgtgataagtccttcaagacggaaaaagcaatgaaaaaccacgaaaaatctaagaagcacagggaaatggtcgccctgcttaaacaacagttggaggaggaagaagaaaactttagccgcccacaaattgatgagaatcccctagacgataactctgaagaggaaatggaggatgcaccaaagcagaagctctctaagaagcagaagaagaagaaacagaagccggctcaggatgtcccggggaaggactcctatctgccggccgcgcacttccagatggcctggggtaagaaatgcgtgttaggggaaaggcgggatggtgagagcgagcataagtgcgcaaaaatgcttttagaaaatcgacagaactacgatgacaactttaatgttaacggacccggagagggcgtgaaagtcgacccagaagacaccaacctgaaccaagattccgccaaggagctcgaagactcacctcaagagaacgtgagtgttactgagattattaaaccttgcgacgaccctaagtctgaggccaaaagtgtgccaaaacccaaagggaagaagactaaggacatgaagaagccagtgcgagtgcccgcggagcctcagaccatgtctgtgcttatttcatgcacaacctgccactctgaatttccctctaggaataaacttttcgatcacttgaaagcgacgggacacgcacgcgccccttcctcaagcagcctgaatagcgctacatcctctcagagtaaaaaggaaaaacgcaagaatagatag

SEQ ID NO: 15703 - DNA, 798 bp, synthetic construct
  source 1..798: mol_type = other DNA; note = Synthetic coding sequence
atgcttgctttaacggttctggagacctgcgtgaaaaactgcggccatcggttccatgtattagttgcatctcaggatttcgtcgagagcgtgttagtgcgtacaatcctgcccaagaataatcctcccacgattgtccacgacaaagtgttgaatctaatccaatcttgggcagacgcctttcggagctctcctgacttgaccggagtagtgactatctatgaggatctcagacggaagggactggaattccctatgacagatttggatatgttgtcccccatccatactccacagcgaaccgtgttcaacagtgaaacccagtcaggccaggacagcgtaggaactgattcctcccagcaggaagacagcggccagcacgcagcaccgctgccagccccacccatcctctcaggagacactccaattgctccaaccccagagcagatcggaaaactgcggagtgaactcgagatggtctcgggcaacgtgcgtgtcatgagtgaaatgctcacggaactggtaccaacacaggcagagccagctgacttagagcttctgcaggaactcaacaggacttgtagagcgatgcagcagagggtccttgaacttattccccagattgccaacgaacagcttaccgaagagctgcttatcgtaaacgacaacctgaataacgtgtttttacgccatgagagggaccggggcctgacggtcttgccgcgcctggtgtccaattcctggcctcaggccgttctgcccccctggcctccaaaggcactggtcttgcaggcctag

SEQ ID NO: 15704 - DNA, 6273 bp, synthetic construct
  source 1..6273: mol_type = other DNA; note = Synthetic coding sequence
atggacgaggtggagcaggaccagcatgaggcccgcctaaaggaactctttgattccttcgacactacaggcaccggatccctggggcaggaagagctaaccgatttgtgtcatatgctatctctggaggaagtggctccggtgctgcagcagaccctgttacaggataacctcctgggcagggtccatttcgaccagttcaaggaggctctgattttaattttgtctaggaccctgtccaatgaggagcactttcaggagcctgactgctcactcgaggcccaacctaaatatgtccggggagggaagcgatacggcaggagatcacttcccgagttccaagaaagtgtcgaagagtttcccgaggtaacggtcatcgagcctctggacgaagaggccaggccatcccatattcccgccggtgactgctctgaacattggaaaacccagcgctccgaggagtatgaagcagagggacagctgaggttttggaatcccgatgatctgaatgcaagccagagcgggtcttcacctccacaagactggatcgaggaaaagctgcaggaagtctgtgaggacctgggcattacccgggacggtcacctcaaccggaagaagctggtctccatttgtgagcagtatggattacaaaatgttgacggcgagatgctggaggaggtgttccacaacctcgatccggatggtacgatgtcagtggaggatttcttctacgggctgttcaagaatggcaaaagcctcactcctagcgcatcaaccccataccgccagctgaagcggcacctgtctatgcagagcttcgacgagtccggacgcaggacaactacttcttccgccatgaccagcactatcggattccgcgtgtttagctgcctcgacgatggaatggggcacgctagcgtggagaggattctggatacttggcaggaagagggcattgagaattcccaggagattctgaaggcactcgatttcagtctggatggcaatattaacctgacggagttgacgctcgccttagagaacgagctgctagttaccaagaattccatccaccaggctgcgcttgcctccttcaaggctgaaattcgtcatctgctcgagcgggtggaccaggtcgtgcgggagaaagagaaactgagaagcgacctggataaagctgaaaagctcaaaagcctgatggcatcagaggttgacgaccaccatgctgccattgagcgtcgaaacgagtacaatcttcgcaaactcgatgaggagtacaaggagcgaatcgctgctttaaaaaatgaactgaggaaggaacgcgaacagatcctccagcaagctgggaagcagaggctagagttggagcaggagatcgaaaaagcaaaaactgaagaaaactacattcgtgatcggctggctctttctcttaaagagaactctcgattagagaacgaactgctggagaatgctgagaagttggctgaatacgaaaatctcaccaataaattgcagagaaatctggagaacgtgctggctgaaaagttcggggatctggatccttcaagtgccgaatttttcctgcaggaggagagactaactcagatgagaaacgagtatgaaagacagtgtcgggtcctgcaggatcaggtggatgagttgcagtctgagctggaagaatacagagcccaggggcgcgtgctgcgccttcctctgaagaactcccccagtgaggaggtcgaggcaaattccgggggaattgagccagaacatggattaggctccgaagagtgtaatcctttaaacatgagtatcgaggccgaattggttatcgagcagatgaaggaacaacaccaccgggacatctgttgcttaaggctagaactggaggacaaagtgcggcactacgaaaagcagctggatgagaccgtggtctcttgcaaaaaggcgcaggagaatatgaaacagagacacgagaacgagacccacacattagaaaagcaaatcagcgacctcaagaacgaaattgctgagttgcagggccaagccgcagtattgaaagaagcccaccacgaggcgacttgccgacacgaggaggagaaaaaacagctgcaggtcaagctggaggaggagaaaacgcatctccaggaaaaacttaggctgcaacatgaaatggagctcaaggctagactgacacaagcccaagcctcattcgaaagggaacgtgagggcttacagtccagcgcttggacagaagaaaaggttcgcggcttaacccaggagctcgaacaatttcaccaagagcagctgacatctctggtggagaagcacaccctggaaaaagaggagctgcggaaagagctgttagaaaaacaccagagagaactgcaggaggggcgagagaagatggagacagagtgtaatcgccgcacatcacaaattgaagcccagttccagtccgattgccaaaaggttactgaaaggtgtgaaagcgccttacagagccttgaagggcgatacagacaggagctgaaggacctgcaagagcagcaaagggaggagaagagccagtgggagttcgagaaggacgagctgacacaggagtgcgccgaagcgcaagagcttttaaaggagacactcaagagggagaaaaccaccagcctggtcttgacccaggagagggaaatgttagaaaaaacctacaaggaacatctgaattccatggtcgtcgaaaggcaacaattgcttcaggacctcgaggacctccggaacgtatcagagacccagcagtccctgctttctgaccagattctagaattgaaaagctcccacaaacgggaactcagggaacgcgaagaagtcctctgccaggcaggggcctctgaacagttagcctcccagcggctggaacggctggagatggaacacgaccaagaaagacaggagatgatgtccaagctgctggctatggagaacatacataaagccacatgcgaaacagcagatcgcgaacgggccgagatgtcaacagagatctcaagactgcagagtaagattaaagagatgcagcaggcgacgtcgcccctgtcaatgctgcaatctggctgccaggtcataggcgaagaggaagtggagggtgacggcgcactgtctttgctccaacagggcgagcagttattggaggagaatggggacgtgttactgagtcttcagcgcgcgcacgagcaagccgtgaaggaaaatgtgaagatggccactgagatatccagacttcaacagcggttacagaaactggaacctggcctcgtgatgtcctcatgcctggacgagccagccactgagttctttgggaatacagctgagcaaacagagcaatttttgcagcagaaccgtactaaacaggtggaaggtgttacgagacggcatgtactctcagacttggaagacgacgaagtcagagatctgggcagcactggtacctcatcagtgcagcgtcaggaggttaaaattgaagagtcagaagctagtgtagaggggttctccgagctggaaaactctgaggaaacacgaacagaaagctgggagcttaaaaaccaaatttcacagctgcaagagcaactgatgatgctgtgcgcagactgcgatcgggcaagtgaaaaaaagcaggacctgctgtttgatgtctccgtgttaaaaaaaaagctgaaaatgctcgagcggatccccgaagctagcccaaaatacaagctgctgtacgaggatgtatcaagagagaacgattgtctccaggaggaacttaggatgatggagacaaggtatgatgaagcacttgagaataacaaggaattgactgccgaggtgttccggctccaggacgagctcaaaaaaatggaagaggtgacggagaccttcctctccctggagaaatcttacgacgaggtgaagatagagaatgaagggcttaacgtccttgtgcttagactccagggaaagattgaaaaactgcaggaatccgttgtccagaggtgtgactgctgcctttgggaggcctctcttgagaacctagaaatcgagcctgacggtaacattcttcagcttaatcagacacttgaagagtgtgttcctagagttcggtcagtacatcacgtgattgaagaatgtaagcaggagaatcagtatctcgaggggaatactcaactgctcgaaaaagttaaggcacatgagattgcatggctgcatggcactatccagacccaccaggaacgtcctcgtgtgcagaaccaggtcatcctggaggagaacacgaccctattggggtttcaagataaacactttcaacatcaggcgaccatcgctgagctggaactagagaaaactaagctccaggaactaactagaaaactgaaagaaagggtgactatactggttaaacagaaggatgttcttagccacggggaaaaagaggaagagctaaaagcaatgatgcacgacctgcagatcacctgttccgaaatgcagcaaaaggtggagttgctgcgatacgagagcgagaagctgcaacaggagaattctattttaagaaacgagatcacgacactgaacgaagaggattcaatctccaacctcaaattgggtactctcaacggcagccaagaagaaatgtggcagaaaaccgagaccgttaaacaggaaaatgctgccgtccagaagatggtggagaacctgaaaaagcagatcagtgaactgaaaattaaaaatcaacaactggatcttgagaatactgaactcagtcaaaagaatagtcaaaatcaggagaagttgcaggagctcaaccagcggctgactgagatgctttgccagaaagagaaggagcctggcaacagtgctctggaggagagggaacaggagaagtttaatctcaaagaagagcttgagagatgcaaggtacaaagctcaaccctggtttcctcactcgaggctgagctgtccgaggttaagatacagactcacatcgttcagcaagaaaaccatctcctcaaagatgagctggaaaaaatgaaacagctgcacagatgccctgatctatccgatttccagcaaaagatttcttctgttctgtcatataatgagaagcttctgaaggaaaaagaagcactctctgaagaactgaactcctgcgtggataaactggctaaaagcagccttttagaacacaggatagctacaatgaagcaggagcaaaaaagctgggagcaccagtcggcctccttgaaatctcagctcgtggcttctcaagagaaggttcagaacttggaggataccgtgcaaaacgtgaatcttcaaatgtcacgcatgaaatccgacttgcgggtcacccagcaggagaaggaagccttgaagcaggaagttatgtcacttcacaagcaactgcagaatgcaggcggcaagtcatgggctccggaaatcgccacacacccttctggactgcataaccagcagaagaggctttcatgggataagttggaccacctgatgaacgaagagcaacagcttctgtggcaagagaatgaaaggctacagacaatggtacagaacaccaaggccgagttgacgcattctagggaaaaggtcagacaattagaatccaatctgctgcctaaacaccaaaagcacctcaacccatcaggcacaatgaatcctacagagcaggagaaactctctctaaagagagaatgcgaccagttccagaaggaacagtcaccggcgaatcgcaaagtcagccagatgaatagcctcgagcaagagctcgaaaccatacatctggagaatgagggcctgaagaagaagcaggtgaaactcgacgagcagttgatggagatgcaacatctgagaagcacagctactccttctccaagcccccatgcatgggaccttcagctgcttcagcagcaagcttgcccaatggtgccccgggagcagttcctgcagctgcagcgacagctgctccaggcggaaagaatcaaccagcacttgcaggaggaattagagaatcgcaccagcgagactaacacccctcagggcaatcaagagcagcttgtcaccgtgatggaggaacgcatgattgaggtggagcaaaagctgaagttggtcaaacgtctactacaagagaaagtgaaccagctaaaggagcaggtgtcactgcctggacacctctgtagtcccacgtcccactcctcattcaactccagctttacctcactatactgccattag

SEQ ID NO: 15705 - DNA, 4134 bp, synthetic construct
  source 1..4134: mol_type = other DNA; note = Synthetic coding sequence
atggatgaggtcgaacaggaccagcacgaggcacggcttaaagaactttttgatagctttgatacgaccggcacgggcagtctgggccaagaagagttgacggatctgtgccatatgctctccctggaagaggtggcacctgttctgcagcagacactgctacaggataatcttctgggacgagtgcactttgaccagttcaaggaagcccttattttgattctcagtcgaactttgtccaatgaggagcactttcaggaacccgactgcagcttggaagcccagcccaagtacgtacgaggcggaaagcgttacggccggcgcagcctcccggagtttcaggagtctgtagaggagttccccgaagtcaccgtgatagaacctctggacgaggaggcccggcctagtcatattcctgccggcgactgtagtgaacactggaaaacacagcgcagcgaggaatacgaggcagagggacaactgcggttttggaaccctgacgatttaaacgccagccaatccggctccagccctccccaggattggatcgaagagaagctgcaagaggtgtgtgaggacctcgggattacccgcgacgggcacctcaatcgtaagaagcttgtttctatatgtgaacagtatggactccagaatgtcgatggggaaatgttagaagaggtgtttcataacctggatccggatgggaccatgtcagtagaagattttttctacgggctgttcaaaaatggcaagagcctcacaccaagtgctagcacaccctataggcagctgaagagacatctgtctatgcaaagcttcgatgaatcaggcagaagaaccactaccagctctgccatgacgagtacgatcggcttccgtgtcttttcctgtctcgatgacggtatggggcacgcctcagtagaacgcattttggacacctggcaggaggaaggcatcgagaattcccaggagattctcaaagctctggacttctcgcttgatggaaatataaacttgacggagcttaccttggccctggagaatgagcttctggtgacgaagaacagcatccaccaagccgcattagcctcctttaaagctgaaattcgccatctgctagaacgcgtcgaccaggttgtgcgggagaaggagaagctccgctcagatcttgacaaggccgagaaactcaaaagcctcatggctagcgaggtggacgatcaccacgcagctatagaaaggagaaacgagtataacttgcgcaaactggatgaggaatataaagagcgcatcgccgccttgaaaaatgaactgcggaaagagagggagcaaatccttcagcaggcgggcaaacagcgcctggaattagaacaagagatcgaaaaagccaagacagaggaaaactacatccgcgacagattagcactgagcctgaaggagaacagtcggctggagaatgaattgctggagaatgctgagaagcttgctgaatacgagaacctgacaaacaaactgcaaaggaacctggaaaatgtgctggcagagaagtttggcgacttggacccctcaagtgccgagttcttcctacaggaggagagactaacgcagatgcgaaacgaatacgagcgccagtgtagagtgctgcaagaccaggttgacgagctgcagagtgagctcgaggaatacagggcacagggccgcgttttgcggcttcccttgaagaattccccaagcgaggaggtcgaggcaaacagcggagggatcgagcccgaacatggcctaggctcggaggagtgcaacccgctcaacatgagcattgaggccgaactggttatcgagcagatgaaggagcagcatcaccgtgatatttgttgcctgagacttgagctcgaagacaaggtgagacattacgaaaaacagttggatgaaaccgtggttagctgcaaaaaagctcaggagaacatgaagcagagacatgagaatgaaacacatactctcgagaagcagatatctgacctgaagaacgaaattgcggagctgcagggacaggccgcggtgttgaaggaggctcaccatgaggccacctgtagacatgaggaagagaaaaagcaactgcaggttaaattggaggaggaaaagacccatctccaagaaaaactacgactgcaacacgaaatggagctgaaggcacggctgacgcaggctcaagccagtttcgaacgcgaaagagaaggcttgcagtcctcagcctggacagaggaaaaggttcgagggcttacacaggaattagaacagttccatcaggagcaactgacttctttggtggaaaaacacactttggagaaagaagaactgaggaaagaactgttggaaaaacatcaacgggaactgcaggagggcaggtatgagtcagagaagctccagcaggagaacagcattctcagaaatgaaatcaccacactgaatgaagaggacagtatcagtaacttaaaactggggacgttaaatgggtcccaggaggaaatgtggcagaaaacagaaaccgtgaaacaagagaacgccgccgtgcaaaagatggtcgaaaatctcaagaagcagatctcagaactcaagataaagaaccagcaactggatctggagaatacagaactgtctcagaagaatagtcagaatcaggagaaacttcaagagctgaaccaaaggctcacagaaatgctgtgccagaaggaaaaggagccgggcaactctgcgcttgaagaacgcgaacaggagaaattcaatctaaaagaagaactggaaagatgcaaggtgcagtcaagcacccttgtgtcgagtctggaagctgaactgagcgaggtgaagattcagacccacatcgtacagcaggaaaatcacttgttgaaagatgagctcgaaaagatgaaacagctgcacaggtgccctgacctcagtgattttcagcagaagatcagcagcgtcctatcctacaatgagaaactccttaaggagaaggaggccctgtctgaggagttgaatagctgtgtggataaacttgccaagtccagcttgctcgaacaccgcattgctacaatgaagcaggagcagaaatcatgggagcaccagagtgcctctctgaagtcgcagctggtggccagccaggagaaggttcagaacctcgaggacacagtgcagaatgtcaatctgcaaatgtccagaatgaaaagtgatctgagagttacacaacaggagaaggaggccctaaaacaggaagtcatgagcttgcataagcaactacagaacgccggcgggaaaagctgggctcccgagattgctactcaccctagcggcttgcataaccagcagaagcgactctcctgggataagctggaccatctcatgaacgaggagcagcagctgctgtggcaggagaatgaacgactacagacgatggtgcagaataccaaagccgaactgactcacagcagggaaaaggtgcggcagctggaaagcaatctgctgccgaagcatcagaaacacttgaatccttcaggcacaatgaatcccacagagcaggagaaactatcactgaaaagagaatgtgaccagtttcaaaaagagcagtcccctgccaacaggaaggtatcacagatgaattccctcgaacaagagctggaaaccatacacctggagaacgagggtcttaagaagaagcaagtcaagctggatgagcagctgatggagatgcagcacctgcgatccaccgctacgccctctcccagcccccacgcatgggacttgcagttacttcaacagcaggcttgtccgatggttccaagggaacagtttttgcaactacagagacagctcctgcaggctgagaggataaatcaacatcttcaggaagaattagagaataggacctccgagaccaataccccccaaggcaaccaggaacaactggtgacagtgatggaggagagaatgattgaggttgaacagaaactgaagcttgtcaaaaggctgttacaggagaaggtgaaccaactgaaagagcaggtgagcttgccaggtcacctctgctccccaacatctcatagttcgttcaacagctccttcactagtttgtactgccattag

SEQ ID NO: 15706 - DNA, 3171 bp, synthetic construct
  source 1..3171: mol_type = other DNA; note = Synthetic coding sequence
atggcaactgggaattacttcggatttacgcatagcggtgctgccgccgctgcagccgcagcccaatatagccagcaacccgcaagcggtgtggcctactcccacccaactactgttgccagctataccgttcaccaggccccagtggccgcccacacagtgacggccgcctacgcccccgctgcagcaacggttgctgtggcacgaccagcgcccgtggccgtggccgctgcagccacagctgctgcctacgggggataccccactgctcacacagcaaccgactacgggtacacccagcggcagcaggaggcaccaccacccccccctcctgccacaacccagaattatcaggattcttacagttacgtacggtccaccgcccctgccgtggcctacgactcaaaacagtattatcaacagcctacagccacggccgcggccgttgctgccgccgcccaacctcagccatcagtggctgaaacttattaccagactgcacccaaagcgggatactcccagggggctacccagtatacccaggcccagcagacgcgtcaggttacagcgattaagccagctacacccagcccagccacgacaactttctcaatctatccggtcagctctactgtgcaaccagtcgcagctgccgcgaccgtcgttccgagctacacacagagcgccacctacagcactacagcggtgacctatagtggaacgtcgtactcagggtacgaagcagcagtgtacagcgctgcatctagttattaccagcagcaacaacagcaacagaagcaggccgcagcagcagccgcagccgccgcagccacagcagcatggaccggcacgacgttcactaaaaaagccccgtttcagaacaaacagttaaaacccaagcaaccacccaagcctccccagattcactactgcgacgtgtgcaaaattagctgcgcgggaccacaaacgtataaagaacacttagaaggtcagaagcataaaaagaaggaagctgccctgaaagcatcccagaacacctcttctagcaactccagtaccaggggcacacagaaccagctccgctgcgaattgtgcgacgtgtcatgcaccggtgcagacgcttatgcagcccacataagaggggctaagcaccagaaggttgtcaagcttcacaccaagctcggaaagccgatacccagcacagagcccaacgtagtttctcaggccacatcctctacagctgtgagcgcctccaagccaactgcatcgccgtccagcattgcagcaaacaattgtactgtgaacacgtcttcagtcgccacatcctcaatgaagggactgacaacaactggcaattcctccctgaatagcacttccaacacgaaggtcagcgccgtgcccactaacatggcggccaaaaagacctccaccccaaagattaactttgtggggggaaataagctgcagagcacagggaacaaagctgaggatatcaaagggaccgagtgtgtgaagtcaacgcccgtaacctccgctgtccagataccagaagtcaagcaggacactgtgagcgagcccgtgacccctgcctctctggccgcccttcaatcagatgtgcagccagtaggacatgactatgttgaggaggtccggaacgatgaaggaaaggtcatcagattccattgtaagctgtgtgaatgctcctttaatgaccccaacgccaaggaaatgcacttgaaaggcaggaggcacagactgcagtacaaaaagaaagtgaatcctgacctgcaggtcgaagtaaaacccagtatacgagccagaaaaatccaagaagaaaaaatgcggaagcagatgcagaaggaagaatactggcggaggcgagaagaggaagagagatggcgtatggagatgcgccgctatgaggaggacatgtactggagacgtatggaggaggaacagcatcattgggacgacagacggcgtatgccagatggcggatacccccacggtcccccaggaccgctgggattgcttggtgtgagaccaggtatgcctccgcagccacagggacctgctcctctgagacgacccgattcatcggacgataggtacgtgatgacgaagcacgccacaatatacccaactgaggaggagttgcaagccgtccagaaaatcgtcagcattaccgagcgggcacttaaattagtatcagacagcctgtcagaacacgagaagaataagaataaagagggcgatgataagaaagagggaggaaaagatagggcgctcaaaggcgtcctgcgcgttggtgtgttagccaaggggctgctcctgagaggcgacagaaacgttaacctggtactgttatgttcagaaaaaccatccaagaccctcctctcgcgcatcgccgaaaacctcccgaagcagctggcggtgatctctccggagaagtacgacatcaaatgtgccgttagtgaggccgccattatcctcaactcatgtgtcgagcccaagatgcaggtgacaataacgctcaccagcccaataatccgagaagaaaatatgcgcgagggcgacgtgacgtccggaatggtgaaagatccccctgatgtcctggataggcagaaatgtttggacgctctggcggctctcagacacgcaaaatggttccaacaagctagagccaacggcttgcaatcctgcgtcattatcatccgaatcctcagagatctgtgtcagcgggtcccgacctggtctgattttccctcctgggccatggaactgctagtggaaaaagcaatttctagtgctagctctcctcaaagtccgggagatgccttgcgaagggttttcgagtgtattagttccgggatcatcctcaaggggtctcccggcctgttagacccctgcgaaaaagatccctttgatacccttgcaacaatgaccgaccagcagagagaagacatcacatcctcagcacagttcgctctgcggcttctggcatttcgccaaatccacaaagttctgggcatggatccgctcccgcaaatgagtcaaaggttcaacattcacaataaccggaaaagacgccgcgatagcgatgggatggacctgaagcttagaggaaagaaaacgaagaaaatcatgattacctttaagaagtgtctgtag

SEQ ID NO: 15707 - DNA, 390 bp, synthetic construct
  source 1..390: mol_type = other DNA; note = Synthetic coding sequence
atgggttgctgtggttgctcgggtggctgtgggtccggctgtggaggatgcgggagcggctgcgggggctgcgggtcttcctgctgcgtgccgatctgttgctgcaagccagtgtgctgctgcgtccctgcgtgcagctgtacctcctgcggctcctgtggaggctcaaagggctgttgtggctcgtgcgggggaagcaaggggggttgtggcagctgcggcggatctaagggcggatgtggttcttgcggctgttctcagtgttcttgttgtaaaccctgctattgctcctctggttgcgggagctcctgctgccagtccagttgttgtaagccatgttgttctcaagcctcatgttgcgtgcccatatgttgccagtgtaaaatctag

SEQ ID NO: 15708 - DNA, 1344 bp, synthetic construct
  source 1..1344: mol_type = other DNA; note = Synthetic coding sequence
atgccaatgcccaccgaagggaccccccccccgctgtcaggtacacccatccccgttccggcttatttccggcacgctgagcccggcttttccctgaagcgcccaagggggctttctcgttcgcttcctcctcctcctcccgctaaaggtagtatacctatttctaggctcttcccaccacgtacacccgggtggcaccagctgcaaccaaggagggtgagctttcgaggggaggcctccgagaccctgcaatctccagggtacgacccttccagacccgagtctttcttccagcaatcgttccagcgcttgagcaggctgggtcatggaagttatggcgaggtgttcaaggtccggagcaaagaggatgggaggctctacgcagtgaagcgatctatgtctccttttcggggacctaaggaccgagcacggaaactggcagaggttgggtcacacgaaaaggtcggacagcatccatgctgtgtgcggctggaacaagcctgggaagagggggggatcttgtaccttcagacggaactgtgcggtccatcccttcagcaacattgtgaggcctggggtgcttctctgccagaggcccaggtttggggatacttaagggacactctgctggccctcgcgcacctccatagccagggcctggttcaccttgacgtgaaaccagccaacatcttcctgggccctcggggcagatgtaagctgggtgattttggtctcctggtggagctcggaactgcaggagctggagaagttcaggaaggagatccacggtatatggcacccgagctgttgcagggctcctatgggacagccgctgatgtgttctcactcggtcttactattctggaagttgcatgtaatatggagttgccacatgggggcgaaggttggcagcagctgcggcaaggttacttgcctccggagttcacagccggcctttcatcagagcttcgatctgtgctggtcatgatgctcgagcctgaccccaaactgcgagcaaccgccgaagcactattagcccttcccgtcctgcggcagccccgagcctggggggtgctttggtgcatggccgccgaagccctttctcgagggtgggctctgtggcaagccctcttagcattgctctgttggctttggcatgggctggctcatccagcctcttggcttcaaccactgggaccacctgcaaccccccccgggagccctccctgctcattactgcttgattcctctctgtcatctaactgggacgacgatagtctgggcccttgcgttcttaaacggaccgagggggccctcgagtgcagccagatggagggcctctag

SEQ ID NO: 15709 - DNA, 1005 bp, synthetic construct
  source 1..1005: mol_type = other DNA; note = Synthetic coding sequence
atgtccgctgccaatcctgagacaccaaactctaccatttctagggaagcctccacacagtcctcgagcgccgccgcctctcaaggatgggtcctgccggaaggaaaaattgtgcctaatacggtattcgtaggtggaattgacgccagaatggatgaaaccgagattggcagctgcttcgggagatatgggtctgtcaaagaagtgaagattataactaatcgcactggggtctcaaagggttatggctttgtctccttcgtcaatgacgtggatgtgcaaaaaattgtgggaagccagatccactttcatggaaaaaagctgaagttaggaccagcaatccggaagcaaaagctgtgtgccaggcacgtgcagcccagacccctggtcgtgaaccccccccccccgccccagttccagaatgtgtggagaaaccctaacactgagacttacctgcagccccaaattacacccaaccccgtcactcagcatgttcaggcttattccgcctacccacattctcctggccaggtgatcacaggatgtcagctactggtttacaattaccaggagtaccctacataccctgattctgcattccaggtgactacggggtaccagctgccggtttataattatcagccatttccagcttacccacgatcccctttccaggttacagccgggtatcaactgcctgtctataattaccaggccttccctgcttacccgaattcaccctttcaggtagctacaggctaccagttccccgtctacaattatcaaccattcccagcttatcccagtagcccatttcaggtaaccgctgggtaccaactgccggtatacaactatcaagcattccccgcttaccccaatagccccttccaggtagccaccggctatcaattccctgtgtacaattaccaagcttttcccgcctacccgaactcacccgtgcaagtgactaccggctatcaactgcctgtatataactatcagtag

SEQ ID NO: 15710 - DNA, 1173 bp, synthetic construct
  source 1..1173: mol_type = other DNA; note = Synthetic coding sequence
atgtcggccgctaaccctgagactccaaacagcaccatttcaagggaggcgtcaacacagtcctcctccgccgctgcaagccagggttgggtcctgccggaaggtaaaatagtgccgaacaccgtgtttgtaggcggtattgatgcccgtatggacgaaacggaaatcggatcctgcttcgggagatacgggagtgttaaggaagtcaaaattatcacaaaccgcaccggggtcagcaaaggctacgggttcgtgtcattcgtcaacgacgtggacgttcagaagatcgtgggctcacagatccatttccatggaaaaaagctaaaactcggtccagctattcgcaagcaaaaactgtgcgcacgacacgtccaacctcggccactggtggtaaacccccctccaccaccacagtttcagaatgtgtggagaaacccaaacactgaaacttatttacagccccagatcaccccaaaccctgtgacgcagcacgtgcaggcatactcagcgtatccccactctcctggccaagtgattactggctgccagctgttagtgtataattatcaggaatatccaacgtacccagattctgcctttcaagtgactacggggtatcagctccctgtgtataactatcagccattcccagcgtaccctagatccccttttcaggttactgcaggctatcagctgccggtctacaattaccaagcttttccggcttaccccaactcaccctttcaggtcgccactggatatcagtttccggtttacaattaccagccattccccgcctacccatcatcaccatttcaggtcacagcaggataccagcttccagtgtacaactatcaggcgttccccgcgtatcccaactcccctgtgcaggtgaccaccgggtatcagttacctgtctacaactaccaggcattccctgcttacccttccagtccgttccaggttacgaccgggtatcaacttcctgtgtataactaccaggcctttcctgcctaccctaacagtgccgtgcaagtcacgactgggtatcaattccatgtgtacaattaccaaatgcctcctcagtgccctgtgggcgaacagcgcagaaacctgtggaccgaggcctataaatggtggtatctggtatgcctaatccagaggagagactag

SEQ ID NO: 15711 - DNA, 1173 bp, synthetic construct
  source 1..1173: mol_type = other DNA; note = Synthetic coding sequence
atgagtgccgccaaccctgagacccccaactctactatctctcgcgaagcttccacccagtctagctcagctgctgcaagccaggggtgggtgttgccagaagggaagatcgtgcccaatactgtatttgtaggaggcatcgacgcacgtatggacgaaacagaaattggatcgtgttttgggcggtacggcagcgtgaaagaagttaagatcataactaatcggacaggtgtgtctaaagggtacggttttgtctcattcgtgaacgacgtggacgtacagaaaatcgtcgggtctcagatccattttcatggcaaaaagttgaagctggggcccgccattagaaagcagaagctgtgcgcgaggcacgtgcagcctaggcccctggtcgtgaacccccccccccccccacagtttcagaatgtatggaggaaccccaacacggagacctacctgcaaccacagatcactcctaaccccgtaacccagcacgtccaggcttacagcgcctacccccatagccctggacaggtgataacaggatgccagctgctcgtttataactatcaggagtacccgacgtatccggatagcgcttttcaggtgacgacaggctatcagctcccggtgtacaattatcaacctttccctgcttacccaaggtctcccttccaagtcaccgccggataccagctgcctgtatacaactatcaggcgttcccagcgtacccaaacagcccctttcaagtcgccacaggttaccagttccctgtgtataactaccagccattccccgcatatccatccagtccattccaagttaccgccggctatcagcttcctgtttacaattaccaggcctttccggcttatcccaactcacccgtgcaagttaccaccggatatcagctcccagtatacaattaccaagcattccccgcatatccctcttcacccttccaggtcactacaggctaccaactacctgtttataactaccaggcattcccggcctacccaaacagcgccgttcaagtcaccaccgggtatcaattccatgtctataactaccagatgcctcctcaatgccccgtgggcgaacagcgccgcaatttgtggaccgaggcctacaaatggtggtatctggtttgcctcatacagaggcgggattag

SEQ ID NO: 15712 - DNA, 1101 bp, synthetic construct
  source 1..1101: mol_type = other DNA; note = Synthetic coding sequence
atgagcgccgcaaacccagagactccgaattctactatatccagggaagcttccacacagtcaagttctgcagcagcctcgcagggctgggtcctccctgagggaaagattgtccctaacacggtgttcgtaggtggcattgacgctagaatggacgagaccgaaattggaagctgcttcggacgctacgggagcgtgaaagaggtgaagataatcactaaccgtacaggagtgagcaaggggtatggatttgtgagctttgtgaacgacgtcgatgtgcagaagattgtcggctcacagatccacttccatggaaagaaactcaagttgggcccggctatacgcaaacagaaactctgtgcacgtcacgttcaaccgagacccttggttgtgaaccccccgccacctccacaattccaaaatgtttggcggaatccgaatactgagacctatttacaaccacaaatcacaccaaatccagtgacccaacacgtccaggcttactctgcgtatccacactctccaggccaggtcataacaggttgtcaacttttggtgtataattatcaggaatatccaacctaccccgacagtgcctttcaggtgactacaggataccagttgcctgtttacaattatcaacctttccctgcatatcctcggagcccctttcaagtcaccgctggctaccagctgcctgtgtacaactaccaggcgttccctgcttatcctaacagccctttccaggtggcaaccggctatcaatttccggtgtacaactaccagccttttcctgcatatcctagtagtcctttccaggtgactgccgggtatcaactacctgtgtataactaccaagcattccctgcttatccaaatagccctgtgcaagtgaccaccggttaccagctgcctgtgtacaattaccaggcctttccagcataccccaactctgccgtgcaggtgacaacgggttaccagtttcatgtgtacaattaccagatgccccctcagtgtcccgtcggggagcaacgaagaaacctctggactgaggcgtacaaatggtggtatctggtatgtctcatccagaggagggactag

SEQ ID NO: 15713 - DNA, 1149 bp, synthetic construct
  source 1..1149: mol_type = other DNA; note = Synthetic coding sequence
atgagcgcagcaaatcccgaaactccaaacagtactatatcaagggaggccagcactcagtccagcagtgccgctgcgtcccaagggtgggtactgcctgagggcaagatagtccccaataccgttttcgttgggggcatcgacgcacgaatggacgaaaccgagatagggagctgttttggacgctacggttcggtcaaagaagtcaaaataataactaaccgcaccggtgtgtctaagggttatggttttgtttcattcgtcaatgatgtggacgtccagaagatagtgggctctcagatccacttccacgggaagaaactaaagctgggccccgccatccgaaagcagaaattgtgcgcccggcatgtgcaaccacggccactcgtagtgaacccacccccgccgccccagtttcaaaatgtatggcgtaaccctaataccgagacctatttacaaccccagattacccctaaccccgtgacacagcacgtccaagcctattccgcctatccgcacagtcctggtcaagtgattacagggtgccagttgttggtgtacaactatcaagaatacccaacatacccagatagcgcgtttcaggtgacaaccgggtatcagctgccggtttacaattaccagccttttccagcttatcctaggtccccctttcaagtgactgccggttaccaactccccgtgtataactatcaggccttcccggcctacccaaattcccctttccaagtcgccaccggatatcagttcccggtgtacaattaccagccatttcccgcttacccctcgagcccttttcaggtaaccgcaggatatcaacttccggtgtataattaccaggctttccctgcataccctaactcgccattccaagtggctacgggatatcagttccccgtctataattaccaggccttccccgcttaccctaactctccagtgcaggtgactaccgggtaccagttgccggtgtacaactaccaggcctttcccgcctatcctaactccccattccaagtcgccactgggtaccagtttccggtgtataattatcaggcatttcccgcctatcccaacagccccgttcaggttactactgggtatcagttgccagtctacaactatcagtag

SEQ ID NO: 15714 - DNA, 1842 bp, synthetic construct
  source 1..1842: mol_type = other DNA; note = Synthetic coding sequence
atgagtgccgcaaatcccgaaactcccaactcaacgatcagcagagaggctagcactcagagcagttctgccgccgcttcccaaggctgggtgctgcctgaaggcaaaatcgtgcccaataccgtgtttgtcggcggcatagatgcaagaatggacgaaacggagataggcagctgcttcggtcgttatggtagcgtgaaggaggtcaagatcatcaccaaccgaacaggcgtgtccaaaggatatgggtttgtgtcttttgttaacgatgtggatgtgcagaagatcgtgggcagccagattcatttccacggcaagaaactgaaactcggcccggcaattcgaaaacaaaagttgtgcgccaggcatgtgcagcctcgccccctagtggtcaacccacctccccctcctcagtttcagaacgtgtggaggaatcccaacactgagacctatttgcagccacaaatcacccctaaccctgtcactcagcacgtgcagtccgctgccaaccccgagactcctaactctactattagtagggaggcatcgactcaatcatcatccgcggctgccagccaaggctgggtgcttccagagggcaagatcgttccaaacacagtctttgttggtggtattgacgctaggatggacgaaaccgaaataggcagctgtttcggtagatacggctccgtgaaggaggtgaaaatcattaccaatcgcaccggcgtatcgaaggggtatggatttgtatcttttgtcaatgatgtggatgtccagaagattgtggggagccagatccattttcacggcaagaagctcaaactcggacccgcgatccgaaaacagaagttatgcgctaggcacgttcaaccaagaccacttgttgtcaacccgccccccccccctcagtttcagaacgtgtggagaaatccaaacactgagacatacctccagcctcagatcacccccaatcctgtgactcaacatgtacagtctgctgcgaaccctgagacgcctaactccacgatctctagagaggcaagcactcagtcttccagtgccgccgctagccaaggctgggtgctcccagaaggcaaaattgttccgaataccgtgtttgtcggggggatagacgcccgcatggatgagaccgaaatcggcagctgttttgggcgttacggaagtgtgaaggaggtcaagattattaccaataggaccggtgtgagcaaggggtatggatttgtatcttttgttaatgatgttgatgtccagaagattgtaggatcccagattcacttccacggcaagaaactcaagctgggacccgccataagaaagcagaagctctgcgcgcggcacgtccagccccgcccgctagtcgtaaaccctcctccgcctccgcagtttcagaacgtgtggcgcaacccgaataccgagacctatctacaaccacagatcactcccaacccggtgacccaacacgtccaggcatattccgcttacccccactcccccggccaggtcataaccggctgccagctgctcgtgtacaattatcaagagtacccgacgtaccccgattccgctttccaagtcacgacgggataccagctacccgtatataattaccagccatttcccgcatatccccgctccccctttcaagtaacagccggttatcagttgccagtttacaattaccaagcgtttccagcctatcctaattcacccttccaggtggccacagggtaccaatttcctgtctgtgagatttgtaagatcctggtactcaaaaacgctgctgctttcttatgtcactctaaggtcaacagatctatctag

SEQ ID NO: 15715 - DNA, 384 bp, synthetic construct
  source 1..384: mol_type = other DNA; note = Synthetic coding sequence
atgagacccctggacatcgtggagttggctgagcccgaggaggtcgaggtgctggagcccgaggaggattttgagcagttcctcctgcccgtcatcaatgagatgcgtgaggacatcgcaagcctcacgagagaacatggaagagcatatctgagaaaccggagcaagttgtgggagatggacaacatgctgattcaaatcaaaacacaggtggaggcgtcagaggagtcagccttgaatcacctgcaaaacccaggagatgctgccgaggggagggcagccaaacgatgtgaaaaggcagaggaaaaggctaaagagatcgcaaagatggcagagatgctggtcgagctcgtgcggcggattgaaaagtcggagtcgtcttag

SEQ ID NO: 15716 - DNA, 537 bp, synthetic construct
  source 1..537: mol_type = other DNA; note = Synthetic coding sequence
atgatgcgagctatgaagccccctggaggggagagtagtaatctgtttgggtcgcctgaggaagccacgccgtctagcaggcctaatcggatggcgtccaatatcttcggtcccaccgaggagcctcagaacatccccaaaaggacgaacccccccgggggcaaagggtctgggatctttgatgaatctacacctgtccagactagacagcatctaaaccctcctggggggaaaacctcagatattttcggcagcccagtgacagccacaagccgactggcacaccccaataagcccaaagaccacgtatttctctgcgagggggaggaacctaaatctgacctgaaagcagcccggagcatccccgcgggcgcagagcccggcgagaaaggtagcgcgcgcaaggcagggccagcgaaggaacaggaacccatgcctaccgtggactcccatgagcctcgcctgggccctaggccacgttcacataacaaggtactcaaccctcccggcggcaaatcgtctatttcgttctactag

SEQ ID NO: 15717 - DNA, 657 bp, synthetic construct
  source 1..657: mol_type = other DNA; note = Synthetic coding sequence
atgttccaggttccagatagcgaggggggaagggcggggagccgcaagtggcagctactcacaggaagcctggcatcaacttcgccaagcctgcttagcgggcaggggccctgggccccactgcagagagccatgaagcctccaggaggagaatctagtaatctattcggctcccctgaagaagccacacccagctcacggccaaaccggatggcttccaatatctttggtccaacagaggagccccagaacatccctaaacggacaaaccctcctgggggcaagggctccgggatcttcgatgagagtaccccggtccagaccaggcagcacttaaatccccccggcggtaaaaccagcgatattttcggatcaccagtgactgctacaagtagactcgcccaccccaataagcccaaagatcacgtgttcctgtgtgagggcgaggaacctaagtcagacctgaaagccgctcgctctatccctgcgggggcagaacccggtgaaaagggaagcgccaggaaggcgggccccgcaaaggaacaggagccaatgcccactgtggatagtcatgagcctcggctggggccacgaccaaggtcgcacaacaaggtgttgaatccccccgggggtaaaagtagcatctcattctattag

SEQ ID NO: 15718 - DNA, 4866 bp, synthetic construct
  source 1..4866: mol_type = other DNA; note = Synthetic coding sequence
atggcaggcgggagaggagccccaggtagagggcgcgatgaacctccggagtcatacccgcagcgccaggatcatgaactgcaggcactggaagccatttatggggccgattttcaggacctgagacctgacgcttgcgggccagtgaaagagccgcccgagataaaccttgtcctataccctcagggcctcaccggcgaagaggtgtatgtcaaagtagatctgagagtaaagtgccctccaacctaccctgacgtcgttcctgaaatcgaactgaaaaatgctaaaggcctgtcaaacgaaagcgtgaacctcctgaaatccaggctcgaggaactggccaaaaagcactgtggcgaagtgatgatcttcgagctcgcctaccacgtgcaatctttccttagtgaacataacaagcctcctcctaagagtttccatgaagagatgttggaaagaagggctcaggaggagcagcagcgtctcctagaggcaaaacggaaggaggagcaggagcagcgagaaattctccatgaaatccagcgccgtaaggaggaaataaaagaggaaaaaaaacgaaaggagatggccaaacaggagaggttggagatcgcctctctgtccaaccaggatcacacttccaaaaaggacccaggcggtcacagaactgctgcaatcctgcacggcggcagtcctgatttcgttggcaatggtaaacatagggccaactccagtggaagaagtcggagagagcgacagtatagtgtgtgtaactctgaggacagccccggcagctgtgagatactatatttcaacatggggagccctgaccagctgatggtgcataaagggaagtgcattggcagtgatgagcagttggggaagctcgtctataacgccctggaaaccgctaccgggggctttgtgctgctatacgagtgggtcctgcagtggcagaaaaaaatgggcccatttttgaccagtcaggagaaggaaaaaattgacaaatgcaagaaacagatacagggaaccgaaacagagttcaactctctcgtgaagctgagtcaccctaatgtcgtccgctacttggccatgaatctgaaagagcaggacgacagcattgtggttgacattctggtggagcacatcagtggagtctcactggctgcgcacttgtcccactccggtccaatacctgtgcaccaattaaggcgctataccgcccagcttctgagtgggcttgattacctccacagcaatagcgtcgtccacaaagtcctgagcgcttccaatgtgctggtggatgcggaaggaaccgtgaagattactgattactctatcagcaagagattagccgatatctgcaaagaggacgtttttgaacagaccagagtccggttcagtgacaatgcactgccatacaaaactggcaagaaaggagacgtgtggcgacttgggctcttgctcctgagcctctcccagggacaagagtgcggcgaataccctgttaccattccgtcagatcttccagctgattttcaggactttctcaaaaagtgtgtttgcctagacgataaggagagatggagcccacaacagctgctgaaacatagcttcattaaccctcaaccaaaaatgccactcgtggagcagagtccggaggacagtgaaggtcaggactacgtggagactgtgatcccgtcaaacagactccccagcgccgctttcttctctgagacacagcgtcaattcagtcggtatttcattgaattcgaggaactccagctgttaggcaagggtgctttcggggccgttattaaggtccagaataagcttgatgggtgctgttacgctgtcaagagaattccgataaatcctgctagcaggcagttccgtcgcataaagggggaggttaccctgttgagtcgcttgcatcatgaaaacattgtacgctactacaatgcttggattgagcgccacgagaggccagccgggcccggaacgcctcccccagactcaggccctctagcgaaggatgacagggccgcccggggccagcctgccagcgatactgacggcttggacagcgtggaagcagctgctccgccaccaatcctctccagctccgtggagtggtccacctccggggagaggagcgcttccgctagattccctgctaccggaccagggtcgtctgatgatgaggatgatgatgaggatgagcatggcggggtgttcagtcagtcatttcttccagcctccgactccgagagcgatattatttttgacaacgaagacgaaaattccaagtcacagaaccagatggaatattgtgagaaaagtacactcagggataccatcgatcagggtctgtatagagataccgtcaggctatggcgcctctttagagagattcttgacggactcgcctatatacacgaaaagggcatgatacacagggaccttaagcccgtaaacatctttctggattctgacgatcacgtaaagatcggtgactttggcctcgcaaccgatcacttggccttctctgcagacagtaaacaagatgatcagaccggcgacctcattaaatctgacccatcaggacacctcacaggaatggtggggacagctctgtacgtatccccggaagtgcaggggagcacgaagtcggcctacaatcagaaggtcgaccttttttccctgggtattatctttttcgaaatgagctatcaccctatggtcacagcgagtgaaaggatttttgttctgaaccaactgcgagatcccacatcgcccaaattcccggaggattttgacgatggtgagcacgccaaacagaaatctgtcatctcgtggcttctgaaccacgacccagccaagcggccgacagctaccgagttgctcaaatcagaactactgccccctccacagatggaagagtccgagcttcatgaggttctgcaccataccctgaccaatgtagacggcaaagcctaccggactatgatggctcagatcttcagccagcgcatatcccctgccattgattacacatatgattctgatatcttaaaggggaacttcagtatacggacagccaaaatgcagcaacatgtgtgtgagaccattattaggatctttaaacgacacggcgccgttcaactatgtacccctcttctcctgccccgaaaccggcaaatatacgagcataatgaggcggcgctgtttatggaccattcgggcatgctggtgatgctcccttttgacctgcgtatcccttttgcaaggtatgtagcacggaataatattctgaaccttaaacgttactgtatcgagcgggtttttcgaccacggaaactagacaggttccatcccaaggaattgttggaatgcgctttcgatatcgtgacttcaactacgaacagtttcctgccaacggctgagatcatctacacaatctatgagattatccaggagtttccggcgctgcaggagcgcaattactctatctatttgaaccacaccatgttgctgaaggcgattctgcttcattgtggtattcctgaggacaagctatcacaagtatacattatactttacgatgccgtgaccgagaagctcacaaggcgggaggtggaagccaaattttgcaacctgagtctcagctctaattctctatgtcggctttacaagtttatcgagcagaagggtgatctgcaggacctgatgccgacaattaattccttaatcaaacaaaagaccggcatcgcacagctcgtgaagtacggtctgaaggacctggaggaagtcgttggtcttttgaagaaactcggaatcaaactgcaggtcctgatcaacctgggcctcgtctataaggtacagcagcacaatggaattatcttccagtttgtggcctttatcaaacgtcgccaaagggctgtcccggagatattggctgcgggcgggcgctacgatctgctaatccctcagttcaggggaccccaggcactgggtccagtgcccactgccattggtgtatctatcgctattgataaaatctctgccgccgtactgaatatggaagagagcgtaacaatctcctcatgtgacctgcttgtggtgagcgtgggacagatgtctatgtccagagctataaacctgactcagaaactctggacagccgggattacagcggagataatgtacgactggtcgcaatcacaggaggagctccaggagtactgtagacaccacgaaataacttacgtggcattagtgtctgacaaagaaggatcacatgtgaaggtcaagtctttcgagaaggaacgacagactgagaaaagggtgctggagaccgagctcgtagatcacgtattacaaaagctacgtaccaaagtgactgatgagcgtaatggacgggaggcctcagacaacctcgcagtacagaatctgaagggaagcttttccaacgcctccggcttgttcgaaatccacggagctactgtggtgccaattgtttcagtgcttgctcccgagaagctttcagccagtacacgccgtaggtatgaaacacaggtgcaaacacgtctgcagacgagcctagccaacttgcaccagaagtcatctgagattgagattttggccgtcgatctgcccaaggagactattctgcagttcttatccctcgaatgggatgctgacgagcaggcgttcaacaccactgtgaagcagctgctaagccggctaccaaagcagcgctacctgaagcttgtctgtgatgagatatataatatcaaagtggaaaagaaggtgtctgtgctctttttgtactcatatcgggacgactactaccgcatactcttttag

SEQ ID NO: 15719 - DNA, 2388 bp, synthetic construct
  source 1..2388: mol_type = other DNA; note = Synthetic coding sequence
atgaaattcaccaacactaaggtgcagatgatgcagaacgtgcatctggcccccgaaaccgacgaagatgatctgtattcgggttacaacgattataaccctatctacgacatagaagagctggagaacgacgccgcctttcagcaagccgtcagaacctcccatgggagaagaccccccattactgccaagatatccagcactgctgttactagacccattgcgacaggatacggcagcaagacctcactggcttcttccatcggtaggcctatgacgggagccattcaggacggcgtgacacgacctatgaccgccgttcgtgctgccggctttactaaagcagccctcaggggctcggctttcgatcccctgagccaatctagagggcctgcctcaccgctggaagccaagaaaaaggacagtccagaagagaagattaagcagttggaaaaagaagtcaatgagctcgtggaggaatcctgtattgccaacagctgcggtgatctcaagctggccctggaaaaggccaaggacgccgggcggaaagaacgagtcttagtacggcagcgtgagcaggttaccacgcccgagaatataaacctagacctcacttactcagtcctgtttaatctggcatctcagtatagcgtgaatgagatgtatgcagaggctttaaacacgtatcaggttatagtgaaaaacaagatgttctccaacgctggtatcctcaagatgaatatgggcaatatttatctgaagcagagaaactactcaaaggccattaagttctaccgaatggctctagaccaagtccccagcgtaaacaagcagatgcgtattaaaattatgcagaacattggagttacctttatacaggcgggccagtacagtgatgcaattaactcctatgagcacatcatgtcaatggctcccaacctgaaagccgggtacaacctcaccatttgttatttcgcgataggagaccgggagaagatgaagaaagccttccaaaaattgatcaccgtgcctctcgagatcgatgaagacaagtatattagtccttcagatgacccgcataccaatttagtgaccgaggccatcaaaaatgatcatcttcgccagatggagcgggagcggaaagctatggctgaaaagtatataatgacttccgccaagctgatcgctcctgttattgagacctccttcgccgccggctatgattggtgcgtggaggtggtaaaggcctctcaatatgttgaactggctaacgacttggaaattaacaaggctgtgacctatctgcgccaaaaggactacaatcaggcggtagaaatcctgaaggtgttggagaaaaaggactctcgggtcaagtcagcggcagcgaccaacctctccgcactctattacatggggaaagattttgcacaggcatcttcatacgccgacatagcagtgaatagcgaccgttacaatccagctgcattgactaataaggggaacaccgtgttcgcgaacggggactacgagaaagccgctgagttctacaaggaagcactgaggaatgattccagttgtacagaggccttgtacaatattgggctaacatatgagaaattgaataggttagatgaagccctggactgctttctcaagctgcacgcgatcttgagaaactcagccgaagtgttgtatcagattgccaacatttacgagctgatggaaaatccctcccaggctattgagtggcttatgcaagttgtgagtgttattccaacggacccacaggtgcttagcaagctaggggaattgtatgatagggagggtgacaaatctcaggcattccagtactattacgagagctacagatacttcccttgcaatatagaagtgatcgagtggctcggggcttactacatcgatacacaattctgggagaaggccattcagtatttcgaacgagctagtttaatacagcccacgcaggtgaagtggcagctgatggttgctagctgcttccgacggtccggtaactaccaaaaagcccttgatacttacaaagacacccatagaaagttcccggagaatgttgaatgtagcggaagcgtcaggacaggacacatggagagagatcccctcaatcttctgccccgcaagagcgtccttccagggcctgagatcgcaaagtgcaattacttctccggcgaaaaatactacttatctgcatttctgtcctcatctttgcaccggtcttggataaagcggtgttcgcgcatctgtcagaagaccgaggaggtaggcaaaaatgagagaaataaagggactgcacataaggtgcggcagcggtggcagtgggggcttccttggcagaagcgtcgaaaatgttag

SEQ ID NO: 15720 - DNA, 192 bp, synthetic construct
  source 1..192: mol_type = other DNA; note = Synthetic coding sequence
atgagctattatcgttcatattacggcggactaggttatgggtacggggggtttgggggctgggggtatgggtatgggtgcggatacggctcttttcgccggctgggctatggttgcggatatggaggttacggcttcagctgctgtcgcccgctgtactacggtggctatgggtttagcgcgttctactag

SEQ ID NO: 15721 - DNA, 135 bp, synthetic construct
  source 1..135: mol_type = other DNA; note = Synthetic coding sequence
atgtcctactacgggaactactacggagggttggggtacgggtacgactgtaaatattcatacacttctgggtttggggcctttaggatcctggattgcggttatcggtgcgggtgtggaggcgtctggatttag

SEQ ID NO: 15722 - DNA, 135 bp, synthetic construct
  source 1..135: mol_type = other DNA; note = Synthetic coding sequence
atgtcatattatagccatctgtcagggggactgggctgtggcctggccgtggccgtgaccatgggtcgaactgtcgctgttgcggagtatggtagatgtcgacatggttgccatagctcgtactctgctcgctag

SEQ ID NO: 15723 - DNA, 138 bp, synthetic construct
  source 1..138: mol_type = other DNA; note = Synthetic coding sequence
atgtgttactatcacaactactatggctcactggactatggctgcagctatgggtccgaatatggtaatagcggatacgcatgcaatttcccttgctcgtacgggcgcttcctgctggccccccggaaaaagttttag

SEQ ID NO: 15724 - DNA, 624 bp, synthetic construct
  source 1..624: mol_type = other DNA; note = Synthetic coding sequence
atgccccactcacactgccactcactgcgatcttttcacaatgctccacctctgagcgctataacccatggcactaaccccataacattcgaggataggctatgcctgccgtcctcattccattcccggacctgtttccttgacaattttcaggaaacttgtaacgaaacaacctcctgccagatgaccaattgtgagcaggacttattcaccgatgactcttgcgttcaaagtaattgcttccccggcgttgtccaaaccacctatagcaatagccggccgtgtgagaggacggcctgccaatctgagagcagctcagccgggttagcctgtgtgtcccagccttgtcaatcagagagtacacaacagatgggtttcgtggctcagtcatgtcagcctgctagcctgaaaggcaattcctgtccacctaagacgtcaaaatcgaagaatttcgagacacttgagagggcctccagccagtgtcaatgtcaaagccagaacccggaatcttccagttgccgcccactggtcaatgtggctccggaacctcagctgctggagtccagcccaggagtggagcctacgtgttgcgtcactggtgggtctcagctgccgagtaagtag

SEQ ID NO: 15725 - DNA, 645 bp, synthetic construct
  source 1..645: mol_type = other DNA; note = Synthetic coding sequence
atggcccatgtgtcttcggaaacgcaagacgtgtctccaaaggacgaactgacagcttcagaagcaagcacccgatcccctctgtgtgagcatactttccctggagatagtgaccttcgctcaatgattgaagagcatgcgtttcaggtgttgtctcagggctccctgctcgagtcaccttcctacacagtgtgtgtatctgaacctgataaggatgatgactttctgagtctgaacttccccaggaagctttggaaaattgtggaatccgaccaatttaagtccatttcctgggatgagaatggcacgtgcatcgtgattaacgaagaactgttcaagaaggagatcctcgaaaccaaagctccttaccgcatcttccagaccgacgccataaagagcttcgtgagacagctgaacttgtacggtttttcaaagatacagcagaactttcagaggtcagccttcttagctacctttctgtctgaggaaaaggaatctagcgtgctaagtaaattgcatgtgttcgtcttccaccacagcttgttcggcgccacattcggcgagcaccactttcaaccatgtcccctaccatcaggcaacaaagcccctatctctacttggtccggcgatagctggctcttgtag

SEQ ID NO: 15726 - DNA, 645 bp, synthetic construct
  source 1..645: mol_type = other DNA; note = Synthetic coding sequence
atggcccatgtaagctccgagacccaggacgtaagcccaaaggacgagctcactgctagcgaggcaagcacacggtcaccactgtgtgaacataccttccctggtgacagcgatctgagatcaatgatagaggaacatgcctttcaggtgctgagccagggtagtctcctggagtcacccagctacactgtctgcgttagtgaacctgacaaagacgacgacttccttagtctgaattttcctcggaagctttggaaaatcgttgagagtgaccagtttaaatctatttcctgggacgagaatgggacatgtatcgtaatcaacgaggagctctttaagaaagagatactggaaactaaggctccctacagaatattccagacagacgcgataaaaagtttcgtccggcagctgaacctgtatgggttttcaaaaatccagcagaactttcagagatccgcatttctggccaccttcttaagcgaagaaaaagaatctagtgtgttgtctaagctgcatgtgttcgtgtttcatcattcgttgttcggcgctactttcggcgagcaccactttcagccatgccccctgcctagcggaaacaaggcccctataagtacctggtccggggacagttggctcctgtag

SEQ ID NO: 15727 - DNA, 1437 bp, synthetic construct
  source 1..1437: mol_type = other DNA; note = Synthetic coding sequence
atggccgctgccctgaagtgtcttctgacactcgggagatggtgccccggattaggcgtagcccctcaagcccgagctttagccgccttagtgccaggtgtgactcaggttgataacaaatctggctttctgcagaagagaccacatcgtcagcaccctggcatcttgaaactcccacatgtgagactgccacaggccctcgccaatggagcccagctcttgttgctgggttcagctgggccgactatggaaaaccaagttcagacattgacgagctacttgtggtcacgccatctgcccgtggagccggaggaattacagcgccgagctaggcacctggagaaaaaatttctggagaatccagatctgtcacagactgaggaaaaattgcgcggagccgtgctgcacgctctacgaaaaaccacctatcactggcaggagctgtcttacactgaagggctgagcttggtctatatggctgcccgcctggatgggggattcgccgccgtctccagggcattccatgaaataagggcaagaaaccctgcctttcagcctcagaccctcatggatttcggcagtggaacaggatctgtgacctgggctgcacactctatttgggggcagagcctcagagagtacatgtgtgtagaccgctccgccgctatgttagttctggcggagaagttgctgaagggagggagcgagagcggggaaccttacattcctggggtgttctttaggcagttcttacctgtgtcaccaaaggtgcagttcgacgtcgtggtttcagctttcagcctgagtgagctgccctccaaggctgatcgcacagaggtagttcagactctctggcggaaaaccgggcactttctcgtgttggtggaaaatggcaccaaggccggacactccctgttgatggacgctcgtgacctcgtcctgaagggcaaggagaaatctcccctcgatccgaggcctggttttgtgtttgctccgtgcccacacgaactgccatgcccccaattaactaacctcgcttgctctttctcccaggcttaccatccaatccctttctcatggaacaagaagcccaaagaagagaagttcagtatggtcattctggcacgggggtcccccgaagaggcccacagatggccaaggataacccaacccgtcctaaagcgcccgcgccacgtccactgccatctgtgttgccccgacggccacatgcagcatgccgtgctgaccgctaggcgccacggaaggtatgggggctgcgatcagaatcagtgggacgtcgccggctcgtgctcaccaaggcagcacctcttcccccaggggtttgtgtccctttgtccgtgtcagttattgggtaggtcctttacttgcgcatactccgtgtgcgtatcctccatttacggttccggatctctctag

SEQ ID NO: 15728 - DNA, 774 bp, synthetic construct
  source 1..774: mol_type = other DNA; note = Synthetic coding sequence
atggaagaggaagcctctagccccggactgggttgcagtaaacctcacttagaaaagctcaccctgggaattaccaggatcctggagtcctcccccggagtgaccgaggtcacaatcattgagaaacccccagccgagcggcatatgatcagcagctgggagcagaaaaataactgtgtaatgcccgaggacgtgaaaaatttttacttgatgaccaacggctttcatatgacctggtccgtgaaactggacgctagcgacgatcagcccgaaaagccacacttcgattccagaagcgtgatcttcgagctcgactcatgcaatggatccggcaaagtatgcttggtttataagtccggaaagcctgcccttgcagaggatacagagatctggttcctagatagagccctctactggcactttctgaccgatacttttacagcttactacagactgttgataactcatctcggtctccctcagtggcagtacgcatttaccagctacggaattagtccgcaggctaagcagtggtttagtatgtataaaccaataacctacaacactaaccttctaactgaggagacagattcctttgtcaacaagctggatccttctaaagttttcaagagcaaaaacaaaatcgtcatccctaagaaaaaaggacctgttcagcccgctgggggacagaagggcccctctggcccctccgggcctagtacctcaagcacaagtaagagttcctccggcagcggaaacccaaccagaaaatag

SEQ ID NO: 15729 - DNA, 792 bp, synthetic construct
  source 1..792: mol_type = other DNA; note = Synthetic coding sequence
atgctctcctctaaaggcctcaccgtcgttgatgtctaccaaggatggtgtgggccttgtaagccagtggtgagtttatttcaaaagatgagaattgaggtgggtttggatcttttgcatttcgcactggccgaggctgatagactggatgtcctcgagaaatatcggggaaagtgtgaacccactttccttttctatgccattaaggacgaggccctgagtgatgaagatgaatgcgtctctcacggcaagaataacggggaggatgaagatatggtgagcagtgagaggacatgcacgctggcaattattaaacctgatgcggttgcacacggaaaaactgacgagattatcatgaaaattcaggaagccgggttcgaaatattaactaacgaggaaagaacgatgacagaggcagaggtgcgcctcttttaccagcacaaagctggggaggaggccttcgagaagttagtgcaccacatgtgctccggaccatcccatcttctgattttgacccggacggagggattcgaagatgtggtaactacctggcgtaccgtgatgggtccaagagatcctaacgtagccagacgggagcagccagagtctttgcgcgcccagtatggcactgaaatgcccttcaatgctgtgcacggctcacgagatcgagaggatgctgaccgcgagttagctctgttgttccctagtctgaaattttcagataaggacacagaagcaccacaaggcgagagttctactcagccaagactcaaaatcacggatctggattag

SEQ ID NO: 15730 - DNA, 390 bp, synthetic construct
  source 1..390: mol_type = other DNA; note = Synthetic coding sequence
atggccgaactgatccaaaagaagctccagggggaggtggagaagtatcagcagctgcagaaggacctgtccaagagcatgtctggcaggcagaaactggaagcgcaacttaccgaaaataatatagtaaaagaggagctagctctcctggacgggtccaatgtggtattcaagctgcttggaccagtactcgtgaaacaggagcttggtgaggccagggcaaccgtcggtaagaggctagactatattaccgccgagattaagagatacgaatcccaactgcgggacttagagcggcagagcgaacaacagcgagagacacttgcccagcttcagcaagaattccagcgcgcccaggccgctaaggccggagcacctggaaaggcctag

SEQ ID NO: 15731 - DNA, 1626 bp, synthetic construct
  source 1..1626: mol_type = other DNA; note = Synthetic coding sequence
atggaagcactgctggaaggtatccagaatagaggtcatggtggggggttcctgacatcgtgcgaggcggaactgcaggagttgatgaagcagattgatataatggttgcacacaaaaaatctgaatgggagggtcgtacccatgccctcgaaacctgcctcaaaattagggaacaggagctgaagagtctgcggagtcagctcgatgtgacacataaggaggttggcatgctgcatcaacaggtcgaagagcacgagaagataaaacaggaaatgacaatggagtacaaacaggagctgaagaagctgcacgaagaactttgtatcctcaaacggtcctatgagaaactgcagaagaaacagatgcgcgaatttagaggcaatacgaaaaatcacagagaggaccgtagcgagattgagcggctcacagctaagattgaggagttccggcagaagtcattagactgggaaaagcagcgtctcatttaccagcagcaggtcagttcgttggaagctcagagaaaggccctcgctgaacagagcgaaatcatccaggcccagctcgtcaacagaaaacagaaactggaatcggtagaactgtcctctcagtcagagatccagcatctgagctctaagctggaaagggccaatgacaccatttgcgccaacgaactggagatagagagactgactatgagagttaacgatttagtgggcaccagcatgaccgtactacaagagcagcagcagaaagaggagaagctaagggagtcggaaaagctgctggaagccttgcaggaagagaagagggaactaaaagcagccctgcaaagtcaagaaaatctcattcacgaagcaagaattcaaaaggaaaagctccaggagaaagtaaaggccactaacacccagcatgcagtggaggccattaggccaagggaagagtccctggccgagaagaaatacaccagtcagggacagggtgacctggactccgtgctgtctcaactgaacttcacacataccagcgaggacctcctgcaggctgaggttacttgtttggagggatcattggagtctgtaagtgccacctgcaagcagctttcccaggaactgatggagaagtacgaagaattgaagaggatggaagctcataacaacgagtataaggccgaaattaaaaagttgaaggagcaaattctgcagggagaacagtcctattcatctgctttagagggcatgaagatggagattagtcatttgacccaggagctccaccagcgggatattactatcgctagtaccaaaggcagctcctctgatatggagaagcggctgcgtgccgaaatgcagaaggcagaggataaggctgttgagcataaagagattcttgaccagttggagagcctcaagttagagaatagacatttatctgaaatggtgatgaagctcgaactggggttgcatgagtgttcccttccagtgagtcccttagggtccatagctacccgcttcctggaggaggaggaactacgaagccaccacattttagaacgtctggacgcccacatcgaagagctcaagagggagagcgagaagacagtccgacagttcacggctcttaaatag

SEQ ID NO: 15732 - DNA, 483 bp, synthetic construct
  source 1..483: mol_type = other DNA; note = Synthetic coding sequence
atggaagccgaacgccctcaggaggaggaagacggcgaacagggacctccccaagatgaggagggctggccaccccctaacagcaccactagaccttggcgaagtgcaccaccgtctcctcccccaccgggcacacgacatactgcgttgggcccgcgatccgcttccctgttgtcattgcagacagagcttcttctggacctcgttgccgaagctcagtcccgaaggctggaagaacagcgtgctacgttttacacaccgcaaaacccttcatccttagcgccagctccactccgccccctggaagatagagaacaactgtatagcactatcctgtcgcaccagtgccaaaggatggaggcccagcggtcagagccccctttgcccccaggggggcaggagcttctagaactgttgctgcgagttcaggggggcgggaggatggaggagcagagatctcgtccccctacccatacttgttag

SEQ ID NO: 15733 - DNA, 483 bp, synthetic construct
  source 1..483: mol_type = other DNA; note = Synthetic coding sequence
atggaagctgagcggccacaggaagaggaggacggcgaacaaggcccaccccaggatgaagagggttggcctccaccaaattccacaacacgtccttggcgaagcgctcccccatccccccctcctccaggaaccaggcacacagccctgggaccccgatctgcttctcttctctccctgcaaacggagttgctgctagatttggttgccgaagctcaatcacggaggctggaagagcagcgagcaactttttacacgcctcagaacccaagcagcctggcccccgcccccctgcgaccactcgaggaccgggagcagttgtacagcaccatcctcagccatcagtgccagcgcatggaggctcagcgtagtgagcctccactaccgccaggtggccaggagctcctagagttgctgcttagagtgcaggggggcggtcgaatggaggagcaaaggagccggccgccgacgcacacttgctag

SEQ ID NO: 15734 - DNA, 3192 bp, synthetic construct
  source 1..3192: mol_type = other DNA; note = Synthetic coding sequence
atgccgcacctgccactcgcctcctttcggcctcccttttggggtttgcggcattccagaggtttgccccgatttcattccgtgtccacgcaatctgagccccacggatctcctattagtcggagaaaccgcgaggcaaaacaaaagcggttgagagaaaagcaggcaaccttggaagctgaaatagccggagagagcaagtctccagccgagtccattaaggcctggcggccaaaagaattggttctgtatgagatccccacaaagcctggcgagaaaaaggacgttagcggtcccctgcccccggcatattcaccaagatatgtggaggcggcttggtatccttggtgggtcagagagggcttcttcaagccagaatatcaggctcggttgccccaggctaccggtgagacctttagtatgtgtattcccccccccaatgtgacaggttccctgcatatcgggcacgctctgaccgttgccatccaggacgccctagtgaggtggcacagaatgaggggcgaccaggtgctttgggtgcctggttcagatcatgccggtatagccacacaggctgtagtggaaaagcagttgtggaaagagcggggcgtccggcgccatgaactgtctcgagaggcctttctgcgcgaagtgtggcagtggaaggaagctaaggggggcgaaatatgcgagcagctccgagcactgggggcctctttggactgggatcgcgagtgttttactatggatgtaggatcctccgtcgccgtgacagaagcattcgttagactgtacaaggcgggactcctgtatcggaaccatcagttggtcaattggtcttgtgcattgcgttctgcaatctccgacatcgaagttgagaatcgcccgctccctggtcacacccagctcaggctgcctggctgccctacgcctgtaagtttcggtttgctgttctctgtcgctttccctgtcgacggcgaaccagatgctgaagtggtggtggggactacacgaccagagaccctcccaggggacgttgccgttgcggtccaccctgacgacagccggtacacccacttgcatggccggcagctccgtcaccctttgatgggccagcctctgccactgataacggattatgccgttcaaccccacgtcgggaccggagccgtgaaggtgacaccagcgcactctcctgccgatgccgagatgggtgcccggcacgggctgagccccctgaacgtaattgccgaggatggtacgatgactagcctttgcggggactggcttcagggactgcacaggttcgtggctcgagaaaaaattatgtctgtgctgtcggagagagggctcttccgtggactccaaaatcatccaatggtgctgcccatatgtagccgttctggcgacgtgatcgagtatctcctgaagaaccagtggttcgtgaggtgtcaggaaatgggagcccgggcagccaaagcagtggaaagcggggccttggagttgagccccagcttccaccaaaagaactggcagcactggttctctcacataggtgactggtgtgtgtcccggcagctatggtgggggcatcagatccccgcttatctggtggttgaagaccacgcgcagggcgaggaggactgttgggtcgtgggtcggtctgaggctgaggccagggaagtcgccgcagagctcactggtagacccggagccgaactcacactcgagagggatcccgacgtactggacacttggtttagttctgccctgttccctttttcggcgcttgggtggccccaagaaacaccagatctggctcggttctaccctctttcgctgctcgaaacgggtagcgacctgcttctattctgggtaggtaggatggtcatgttgggcacccagctgaccggacagctgcctttttctaaggtgctgctgcatcccatggtgagagataggcaggggcggaagatgagtaagtccctcggaaatgttctcgacccccgggacatcatctctggggttgagatgcagctcctccaggaaaagctccggtccgggaatctggaccccgcagaactggccatcgttgccgcagcacagaaaaaagattttccccatggcatcccggagtgcggtacagatgccctgcgtttcaccttgtgctctcacggtgtccaagccggcgacctgcatctgagcgtcagcgaagtgcagtcctgcaggcacttctgcaacaaaatctggaatgcattgagatttatcctcaacgccctgggagaaaagttcgtaccgcagcccgctgaggagctgtctccctctagcccgatggacgcatggatcttgtccagattggccctggccgcacaagaatgcgaaagaggatttctgaccagagaactgagcctcgttacccacgctttgcaccacttttggctccacaatctctgtgatgtgtacctggaggcagttaagcctgtcctctggcacagccctaggcctctgggtcctcctcaagttctcttctcttgtgcagacctgggactccgtctcctggcgccattgatgccattcctggcagaggagctatggcaacgcctgcccccacgccccggctgcccaccagcaccctcaatctctgtggcgccttacccatcagcttgtagccttgagcactggcgccagccagagttagaacgccgattttctcgggtgcaggaggtggtgcaggttcttagagccctccgggccacctatcagttgaccaaggcccgcccaagagtgttacttcagagttctgagcctggggaccaggggctgttcgaggcgttcctggaaccccttggcacgttggggtattgcggggctgtgggtctgctgcctcccggcacagccgctcccagcgggtgggcccaggcgcccctgtctgataccgcgcaagtgtatatggaactgcaggggttggtcgaccctcagatacagctccctctcctggctgctcgccgctataaactccagaagcagctagattcattaaccgcccgaactccatctgaaggcgaagccgggacccagaggcagcaaaaactgtcaagcctgcaattggaattatcaaaacttgataaggcggcaagtcacttaagacagttgatggatgaacctcccgcaccggggagtcctgaactttag

SEQ ID NO: 15735 - DNA, 1620 bp, synthetic construct
  source 1..1620: mol_type = other DNA; note = Synthetic coding sequence
atggccactagcgctccgttgagatccctggaagaagaggtgacgtgttcaatttgtctggactatctacgtgatccagtcacgattgactgtgggcacgttttctgcaggtcctgtacgactgacgtccgtcccatcagtggcagccgtccggtttgtcctctgtgtaagaagcccttcaagaaggagaatatcaggcctgtgtggcagcttgccagcttggtcgaaaacattgagcgcttgaaggtcgataaaggaagacaacctggggaggtgacacgggaacaacaagacgccaaactgtgtgaaagacatcgggagaagcttcactactattgcgaggacgacgggaagctgctgtgtgttatgtgtagggagtctcgcgaacatcgcccgcatacagctgtgctgatggagaaggcagctcagccgcaccgggagaaaatcctgaaccacctgagtactctccgtagagatagagataagatccagggattccaagctaagggtgaagccgatatcttggccgctcttaaaaaacttcaggaccaacggcagtacattgtagccgaattcgaacagggtcatcaattcctgcgagaacgggaagaacacttactagagcaacttgcaaaacttgagcaggagcttacggaaggaagagagaagttcaaatctagaggagtcggagagttggccaggctggcgctggtcatcagcgagctcgaaggcaaggcccagcaaccagctgctgaactcatgcaggatacccgggacttcctgaacaggtaccctaggaagaagttctgggttggtaaacccattgcccgcgttgtcaaaaagaaaaccggtgagttttctgacaagctcctgagcttgcagagaggtctgagagagtttcagggaaagctgctccgggacttagagtataagacagtctccgtgactctggatccccaatctgcttctggatacctccagctgtccgaggattggaagtgcgtaacctatacctccctgtacaagtccgcatatctgcacccacagcaatttgactgtgaacccggagtactgggatcgaagggcttcacttgggggaaggtttactgggaggttgaggtcgagcgagagggctggtcggaggacgaagaggaaggggatgaagaagaggaaggcgaggaagaagaggaggaggaggaggccggttatggcgacgggtatgacgattgggaaactgatgaggacgaagagtccctgggcgatgaagaggaggaggaagaggaagaagaagaagaagtgctggagtcttgtatggttggcgtggcccgagattcggtgaagcgcaagggtgatctttccctgagacctgaagatggcgtatgggccctgagactcagttcttctgggatctgggccaatacatcccccgaggcagagctctttcccgccctgaggccgaggagagttggcattgctttagactatgaaggcggtaccgtgacatttacaaacgctgagtcccaggagctgatttacactttcacagccacgtttaccagaagactggttcccttcttatggttgaaatggccagggacgagattactacttcgtccttag

SEQ ID NO: 15736 - DNA, 678 bp, synthetic construct
  source 1..678: mol_type = other DNA; note = Synthetic coding sequence
atggctgcaggttctgaggcaacaacacccgtgattgtcgctgccggcgccgggggtgaggaaggtgaacacgtcaaaccgttcaagccagagaaagccaaagagattattatgtcgctccagcagccagccatattttgtaacatggtgttcgactggcctgccagacattggaacgcaaagtatctatcacaggtgctgcacggaaaacagatccggtttagaatgggtatgaagagcatgtctacggtaccccaattcgaaaccacatgtaattatgtcgaagctacattggaagagttcctcacctggaactgtgatcagtcaagcatctccggtccttttagagactatgaccattccaagttctgggcctacgcagattacaagtatttcgtgtccctgttcgaggacaagactgacttgtttcaggatgtgaaatggtctgactttggctttcccgggagaaatgggcaggaaagtaccctctggattggatccctgggggcgcacacgccatgtcacctggattcctacggttgcaatctggtcttccaggtgcagggacgcctggagtgtaacggaatgattattgcacctggtccccaggcaatcctcctgccacagcccctaaaatacctggggctccaagagacgatggcttccctgagttcctag

SEQ ID NO: 15737 - DNA, 2571 bp, synthetic construct
  source 1..2571: mol_type = other DNA; note = Synthetic coding sequence
atggatatatctaagggtctcccgggtatgcagggtgggctgcacatctggatttctgagaataggaagatggtgcctgtccccgagggtgcatatggcaatttttttgaggaacactgttatgtcatcctccatgtgcctcagtctcccaaagcaacccagggcgcctcttccgatctccactattgggtcggcaagcaagctggagccgaagcccaaggcgctgctgaagcattccagcagcgcttgcaagatgaactcggtggacagacagtgctgcaccgcgaggcccagggccacgagagtgactgtttttgcagctacttcagaccaggtattatctaccgcaagggcgggcttgcttccgatctgaaacacgtggaaaccaatttgttcaacattcagaggctgctgcacatcaagggaagaaagcacgtgtccgcaacagaagtggaattgtcctggaacagtttcaacaagggcgatatattcctgctggacttgggaaagatgatgatccagtggaacggcccgaagacctccatatcagagaaagccaggggcttagcactgacgtattctttaagggaccgggagaggggcggcggtcgagcccagattggcgtggtcgacgatgaagccaaggcacccgacttaatgcagataatggaggcagttctgggccggagagtcggatcacttcgtgcagctacaccatctaaagacatcaaccagctccagaaagccaatgtccgcctgtaccatgtttacgagaaagggaaggatcttgtcgtgcttgagctggccaccccacccctgacacaggacctgcttcaggaggaagacttctacattctcgatcagggcgggttcaaaatttacgtgtggcagggccggatgtcttccttacaggagaggaaagcagcattcagccgagcagtgggcttcattcaagcaaaggggtatccaacctacaccaatgtggaagtcgtcaacgatggagcagaatctgcggcttttaaacagctgttcagaacatggtccgagaaacgtcggagaaatcagaaattggggggtcgggacaagtccatccatgtgaagctggatgtgggtaaactccatacccaacccaaactagcagcccagctgcgcatggtcgatgacggttcaggcaaggttgaagtctggtgcatccaggacctccacagacagcccgtggacccaaagagacatgggcaactctgcgccggaaactgttacttagtgttgtacacctaccagagattgggccgggtacaatacatcctgtacctgtggcaaggacatcaggccacagccgacgagatcgaagcattaaactccaacgcagaagaactggacgtaatgtacggcggtgtgctagtgcaagagcatgtaactatgggatccgagcccccacattttctcgccatatttcagggacagctggtgatttttcaggagagggcagggcatcatggaaaggggcagtccgccagcactaccaggctgtttcaggtgcagggaactgactcacacaatacgaggaccatggaggttccagctcgagcctccagcctgaatagcagtgatatcttcctcttagtgactgccagcgtttgttacctgtggtttggtaagggttgcaacggcgaccagcgtgagatggcaagggtggtggtaaccgtgatcagtcgcaaaaacgaggagactgtactggaggggcaggagccgccccatttctgggaggccctgggcggccgcgccccgtacccaagcaacaagcgccttccagaggaggtaccatcctttcagccacggctgtttgaatgctctagccacatgggctgtctggtcctcgcagaggtgggttttttctctcaagaagacctggacaagtatgatatcatgctgctcgatacttggcaggaaattttcctgtggctaggcgaggccgcgtccgaatggaaggaggctgttgcttggggtcaggaatacctgaaaacccaccctgcgggcaggtcgcccgctaccccgatcgttctggtcaagcagggtcacgaacccccaacctttatcggatggttctttacttgggacccgtacaagtggacaagccaccctagccacaaggaagtggtggatggatcccccgctgcggccagcacaatatccgagatcacggccgaagtcaacaacctgcggctcagccgatggcctggcaacggacgcgctggcgctgtggcactccaggctttaaagggcagtcaagactcctccgaaaacgatttagttcgaagcccaaagagcgccgggagcaggacatccagttctgtatcaagtacgtcggcaacgatcaatggtggtctgcggcgggagcagctgatgcaccaagcagtcgaagacctgcctgagggagtggaccccgctaggcgtgagttctacctgtcagacagcgattttcaggacatctttggaaaatccaaagaagaattctacagcatggctacttggagacagcggcaggaaaaaaagcagctcggcttcttctag

SEQ ID NO: 15738 - DNA, 2607 bp, synthetic construct
  source 1..2607: mol_type = other DNA; note = Synthetic coding sequence
atggccagctttcccgagaccgacttccagatttgtctgctgtgcaaagaaatgtgtggctccccagctccactgtcttccaattcatctgcctctagttccagctcccagaccagcacctccagtggaggtggcggggggggccctggcgccgccgcaaggcgactccacgtcttgccatgtctgcatgcattctgtagaccttgcctggaggcccatcgcctaccggccgccggcgggggcgccgctggcgaaccgctaaagctgaggtgtcccgtgtgtgaccagaaggttgtcctggctgaagccgcaggcatggacgctcttcctagctccgcattcctgctaagcaatctgttggatgcggtggtagctaccgctgatgagccgcccccaaaaaatggtagagccggggcccctgccggcgcaggaggacacagcaaccaccgccatcatgcccaccatgctcatccacgagctagtgcctctgctcctccccttccccaggcacctcagccacccgcgccttcacggtcagcacctggggggccagctgcttctccgagcgcccttctactgcgcagacctcatggatgttctagttgtgacgagggtaacgcggcgtcttctcggtgtcttgattgtcaggaacatctctgcgacaattgcgtccgagcccatcagcgagtccggctgacgaaggaccactacattgagcgcgggcctcctggacccggtgctgccgctgctgcccaacagctcggtctcggacctccttttccaggacctccatttagcattctcagcgtttttccggagagactaggattctgccaacaccatgacgacgaggtactccacctatactgtgacacatgctctgtgcccatctgtagagagtgcaccatgggaaggcacggcggccattcattcatctacttgcaagaggccttgcaggacagtcgggctctgacgatccagctactcgccgatgcccagcagggacgccaggcaattcagctgagcattgagcaagctcagacagtcgcagagcaagtcgagatgaaggccaaggtcgtccagagcgaggtgaaggccgtgaccgcccgtcacaaaaaggcgcttgaggagcgcgagtgtgagctcctatggaaggtggagaaaatcagacaagtgaaagcaaagagcctatacctgcaggtagagaagctgcgccagaacctgaataagctggaaagcacaattagtgctgtgcaacaagtgttggaggaggggcgggccctcgacatacttcttgcacgagatcggatgctcgcccaggtgcaggaattaaagaccgtccggtccctcttacaaccccaggaagacgacagagtgatgttcacccctcccgaccaggctctgtacctcgccattaaaagcttcgggtttgtgtcgtccggcgctttcgccccgcttaccaaggctacaggcgatggcctgaaaagagccttgcaggggaaggtcgcttcctttacagtcattgggtacgatcacgacggcgagcctaggctgtcgggcggcgacctgatgtcagcagtagttctaggacccgatgggaatttgttcggcgctgaggtgagcgatcagcagaatggtacttatgtggtctcttaccggcctcagctggagggcgagcacctggtgtcggtcacactgtgtaaccaacatatagaaaactctccctttaaggtggtggtaaaaagcggccgcagttatgttggcatcggccttccagggctgagcttcggctcagagggtgactccgacggcaagctgtgtagaccctggggtgtaagcgtcgacaaggagggctatatcatagttgccgatagatctaacaaccgaatacaggtcttcaagccatgtggggctttccaccataagtttggcacattgggctcacgacctggccagtttgatcgacccgctggggtcgcttgtgacgctagccgtagaattgtggtggctgataaggataaccacaggatccaaattttcacctttgagggtcagttcttgttaaagttcggggagaaaggtactaaaaacggacagttcaattacccatgggatgtggcggttaactctgagggaaagatattggtgtccgatactaggaaccaccggattcagctgtttggccctgacggtgtctttctcaacaaatacgggtttgagggagcgctgtggaaacacttcgactctcctcgaggtgtggcgtttaatcacgaaggccacttagtggtgacggatttcaataatcatcgcctgctcgtaattcatccagactgtcaaagtgcacgattcctggggagtgaaggaactggcaatgggcagttcctgagaccgcagggcgtagccgttgaccaggaggggaggataattgtagcagactcacggaatcacagggtccaaatgttcgaatctaacggttcttttttatgtaagttcggagcacaggggagcggattcgggcaaatggaccgaccgagtggtattgcaatcacacctgacggcatgattgtggtcgtcgacttcgggaacaaccgaatccttgtgttttag

SEQ ID NO: 15739 - DNA, 1107 bp, synthetic construct
  source 1..1107: mol_type = other DNA; note = Synthetic coding sequence
atgcgcgaaccagtcctgacatggtgcgtaccacttgagctgttgtgcagccatcccctgccattgagcgctttcctcaaatcacaggtgaagctctatacttatcgagcatgtgctggtaaagacgagatggggaagatggtatctgtgattaacacagtggacactagccacgaggacatgatccacgacgcgcagatggattattacggcaccagactggctacttgctctagcgacaggtctgtcaaaatctttgatgttagaaacggcggccaaatccttatcgctgatttacgtggtcatgaaggtcccgtgtggcaggtggcttgggcacatcccatgtacggcaacatcctcgcttcatgctcatacgatagaaaagtaataatctggcgggaagagaatgggacttgggagaaaagccatgaacatgcaggccacgacagctctgtgaacagcgtctgttgggctcctcatgactacggactcatactcgcctgcggctcatcagacggagctatctcacttctaacatatacaggggaagggcagtgggaggtgaagaagataaacaacgcacacactattggttgtaacgcggtctcttgggcccctgccgtagtgccaggtagtctcatagaccacccatcgggtcagaaacctaactatatcaagcgcttcgccagtggcggctgcgacaacctgatcaaactgtggaaagaagaagaggacggtcagtggaaagaggagcagaaactggaggcccatagtgactgggttagggatgttgcgtgggctccgagcataggtctcccaacaagtactatcgctagctgctcccaagacggccgagtttttatttggacatgtgatgatgcttctagtaacacctggtcacccaaactgctccataaatttaatgacgtggtgtggcatgttagctggagcattacagcaaatattctcgcagtatctggaggcgacaataaggtcacactgtggaaggaatctgtggatggccagtgggtgtgtatcagtgatgtgaataagggccaggggtcggtctccgcctctgtgacagagggtcagcagaatgagcagtag

SEQ ID NO: 15740 - DNA, 1059 bp, synthetic construct
  source 1..1059: mol_type = other DNA; note = Synthetic coding sequence
atggatattgacaaggacttagaggccccgctgtacttgaccccagaaggctggagcctatttctgcagagatactatcaagtagtacacgagggggcagaattgaggcaccttgatacccaggtgcaaagatgtgaagacatattacagcagctgcaagccgtcgtgcctcaaatcgatatggagggagacaggaacatctggatcgttaagcccggagccaagagtagaggccgaggcatcatgtgtatggaccacttagaagagatgcttaaactggttaatggaaatcccgtggtaatgaaggatggcaagtgggtcgttcaaaaatatatagaacgcccgctcctaatatttgggacgaaattcgatctgcggcagtggttcctggtcaccgattggaatccgctgactgtttggttctacagagattcttatatccggttttccacacagcctttttccctgaagaacctggataacagcgtccacctgtgtaataacagtatccaaaaacatttggagaacagctgtcataggcaccccttactgccacctgacaatatgtggtcctcccaacgctttcaggcccatctgcaggaaatgggggcgcccaatgcctggtctactatcatcgtcccaggaatgaaagatgctgtcatccatgcccttcaaacttcccaggacaccgtccagtgcagaaaagcatcattcgagctgtacggagctgacttcgtattcggtgaggacttccagccatggcttattgagataaatgccagcccaaccatggcgccaagcaccgccgtcacagcccgactgtgcgcaggcgtacaggctgataccctccgcgttgttattgaccgtatgttagatcgtaactgcgacacaggggcctttgagctgatctacaaacagccagtgacaacctcacctgccagcacccccaggccatcttgcctgctacctatgtattcagatacaagggctcggagcagtgatgactcgactgcgtcatggtgggccctccggccttgtcggccccaagccaggccctag

SEQ ID NO: 15741 - DNA, 579 bp, synthetic construct
  source 1..579: mol_type = other DNA; note = Synthetic coding sequence
atgggcaaggggtgcaaggttgtggtctgtggactgctctccgtaggtaagactgccattttggagcagctgctctacggaaatcatacaatcgggatggaagactgtgagacaatggaggatgtctatatggcgagcgttgaaaccgacaggggcgttaaagaacagctgcacctatatgatactaggggcctgcaggagggcgtggagcttcctaagcactatttcagctttgctgacggcttcgtgctcgtgtactccgtcaacaacttggaatccttccaacgtgtggagttgctgaagaaagaaattgataagtttaaggataagaaggaagttgccattgtggttctgggcaacaagatcgacctgtctgagcaacgccaggtggatgctgaagtcgcacagcagtgggccaaaagcgagaaggtccgcctttgggaagtgaccgtcacggacaggaagacactgatcgagccatttaccctgcttgcttcaaaactctcacaaccccaatctaaaagctcctttccactccccggtcgcaagaataagggcaacagcaattctgagaactag

SEQ ID NO: 15742 - DNA, 1419 bp, synthetic construct
  source 1..1419: mol_type = other DNA; note = Synthetic coding sequence
atgtcccggcgcgtggtgagacagtccaagttcagacatgtcttcggacaagcagctaaagctgaccaggcctacgaggacattcgggtatcaaaagttacctgggatagcagcttctgcgcagtcaatccgaagttccttgccataatagttgaggccgggggtggaggcgcctttattgtcttgccactggcaaagaccggccgcgtggacaagaattatcccttggtgactgggcatactgctcccgtgcttgacattgactggtgtcctcataatgacaatgtcatcgcctctgcctcagatgacacaacaatcatggtctggcaaattcctgactacactcctatgcggaatattactgaaccgataatcaccctagaggggcacagcaaaagggtggggatcctgtcctggcaccctaccgcccggaacgtgctgctctccgccggcggagataatgtgatcatcatttggaacgtcggcaccggagaagtgttgctgtcactcgatgatatgcaccccgatgtaatccacagtgtatgctggaacagtaatggctcacttctggcgactacgtgtaaggataaaactctgagaattattgaccctcgtaaggggcaagtggttgcagaacgctttgcagcacatgagggcatgaggcctatgagagccgtgttcactcgccaggggcatatttttacgactgggtttacccgtatgagccagcgggagctgggtctgtgggaccccaacaattttgaagaacctgtggctctacaagagatggatacatcgaacggggtgctactgcccttctacgatccagattcttccatagtgtacctgtgtggcaagggtgactcttctatcaggtatttcgaaatcactgacgagcccccttttgtccattacttgaatacttttagttctaaggaaccccaaagaggcatgggctttatgcctaagaggggtctggacgtctcaaaatgcgaaatcgcccgcttctacaagctgcacgaacgcaaatgcgaaccgattatcatgacggttccaaggaaaagtgatctgttccaggacgacctgtatccagatacccccgggcctgaaccagctctggaggcagatgaatggctgagcggacaagacgccgaacccgttctcatttcgctccgcgatggctatgtccctccaaagcatagagagctccgtgtaacaaaacggaacatcctggacgtgcggccaccgagcggtccacggaggagccagtccgcatcagatgcccccctgtcccagcagcacaccctggagacactcttggaagaaatcaaagctctgagggaaagagttcaggcacaggagcagcggataacagcattagaaaatatgctgtgcgagttggtggacggaacagactag

SEQ ID NO: 15743 - DNA, 2628 bp, synthetic construct
  source 1..2628: mol_type = other DNA; note = Synthetic coding sequence
atgggtgacagcgacgatgagtatgatcgacggcgccgcgataaattcaggagagagaggtccgactacgatcgcagcagggaacgcgatgaacgccgccggggagacgactggaatgacagagagtgggacagaggacgtgaacggcgcagtaggggcgagtatcgggattacgaccgtaatcgcagggagcgatttagtccccctagacacgagctgtcacccccccagaagcgcatgcggcgggactgggacgaacactccagtgatccttaccacagtgggtacgagatgccatacgctggtggtggcggaggccccacgtacggtccaccccagccatggggccatcccgatgttcacattatgcagcaccacgtgttacctatccaagctcggttgggcagcatcgccgagatagacctgggggtcccgcctcccgtgatgaaaactttcaaagagttccttctaagcctggacgattccgtggacgagaccgaggccgtcaaacggtacaacgactacaaactcgattttagacggcagcagatgcaggacttttttcttgctcacaaagacgaggaatggtttcgcagtaaatatcaccctgatgaggtcggcaagagaaggcaggaggcacggggagcccttcagaatcgcctgcgggtgttcttgagtctgatggagactggctggtttgataatctgttactggacatcgataaggctgacgccatcgtaaagatgttagacgcagctgtaataaaaatggaaggaggtactgagaacgacctaagaattctggagcaggaagaggaggaagaacaggcgggcaagcccggtgaaccaagtaaaaaagaagagggtcgagccggcgcaggcctgggggacggtgagaggaaaaccaatgataaggacgaaaagaaggaagatggaaagcaagccgaaaacgactctagcaacgacgacaagacaaagaaatctgagggtgacggcgataaggaagagaagaaggaggatagtgagaaagaggccaagaagtcttcgaaaaagaggaatagaaaacactccggggacgacagcttcgacgagggaagcgtgtccgaatcagaatctgagagcgagagtggccaggcagaagaggagaaagaggaagctgaggccctcaaagagaaagagaaacccaaagaggaagaatgggagaaaccaaaagatgccgcgggcctcgaatgcaagccgaggcctcttcacaagacttgcagtctgtttatgcggaatatcgctcccaatatttcacgcgcggaaattatctccctgtgtaagcgctaccctggattcatgagggtggccctcagcgaacctcagcctgaacgccgtttctttcggcgcggttgggttacctttgacagatccgtgaacatcaaggaaatctgttggaatctgcagaatattcgcctgagggaatgcgagctctccccaggagtcaaccgggaccttactcggcgagtgcgcaatataaacggcatcacccagcacaagcagattgtacggaatgacattaagttagccgctaagctgattcacactctggacgatcgtacccagctgtgggcctcagaacccggcacaccccctctccctacatcattgccttcacagaaccctatcttgaagaatattactgattacctgatcgaagaggtgagcgctgaggaggaggagttactcgggagctcagggggcgcgccaccggaggaaccaccgaaggaaggcaacccagctgagatcaatgtcgagagagacgaaaagctcattaaagttctggataagctgttgttgtacctccggattgtgcacagtctggactactataatacatgcgaatatcccaacgaggatgagatgcctaacagatgtggaattattcatgtcagagggcccatgccccctaataggattagccatggtgaggtgctggaatggcagaaaacctttgaggaaaagctgacgccactgttgtcagttagggagagtctatctgaggaggaagcacagaagatgggccggaaagacccagaacaggaagtggaaaaatttgtgacctcaaatactcaggaactgggaaaggataagtggctgtgtcccttgagtggtaaaaagtttaagggcccagagttcgtccggaagcacatttttaacaaacacgcagaaaaaatcgaagaagtgaagaaggaggtggcctttttcaataatttcctgacagacgctaagagacctgccctcccagagatcaaacccgcgcagcctccaggcccggcccaaattctcccgcctggcttgactcctgggctcccatatccccaccagacaccccagggtttgatgccttacggccagcccagacctcctatcctggggtacggcgccggagcagtgcgccctgccgttccgaccgggggccctccgtacccccacgcaccctacggagctggccggggaaattatgacgcattccgaggtcagggaggataccctggcaagccccggaaccgtatggtgcggggtgacccacgtgccatcgtcgagtatcgcgacctagacgcaccagacgacgttgatttcttctag

SEQ ID NO: 15744 - DNA, 816 bp, synthetic construct
  source 1..816: mol_type = other DNA; note = Synthetic coding sequence
atggccgcagtggagaagaggcgccaggccgtcccacctcccgccggcttcaccgactctgggcggcagagcgtgtccagagccgcaggcgctgcagaaagcgaggaggactttcttcgccaagtaggcgtcaccgagatgcttcgcgctgcacttctgaaagtcctggaagcccgacccgaggaacccatagccttcttggctcattactttgaaaacatggggttgagatctcccgttaatggtggcgccggggaaccccctggccagttgctgcttcagcagcaacgcctgggacgggcgctctggcatctgcgcctggcccaccacagtcagcgcgccgccttcaacaacaatgtttccgtggcatacgagtgcttgagtgccggcggaaggcggaagcgaccaggactagacggtcgaacctactccgagctccttcgaagaatctgccgggacggtcaagcaccagaagaagtggtggcccccctgctccgtaaagtgcaatgtagagatcacgaagccgttccacttagcgtgtttagggccggaacactcacatgcttcgtactgctggagttcgtggcacgagctggagcccttttccagttgctcgaagatagcgcagccgccgtggcagatcgccgagttggtcaggccgtgttggacacactggagggtgcactacaggcctccgatgctgctgcccctgctaggttcctggaggcaggcagtcgcttggctcctatgaccagagaggaattcttggagcgcgccgccgcactctttatagcaaaggtgaagccggtcggatag

SEQ ID NO: 15745 - DNA, 1977 bp, synthetic construct
  source 1..1977: mol_type = other DNA; note = Synthetic coding sequence
atgggagggcatttgagtccatggcctacctacacgagtggacagacaatcctgcagaaccgcaagccctgttctgacgactatcggaagagagtcggaagctgccaacaacatccctttcgcactgccaagccacagtacctagaagagcttgagaactatctacggaaagaactcctcctcctcgatcttggaacagactccacccaggagctgagattgcagccatacagagaaatttttgagttttttatcgaggacttcaaaacctataaacctctcctttcatcgatcaaaaatgcatatgagggcatgcttgcccaccagcgggaaaagatccgggcgctggaaccgttgaaagctaaactcgtgacagtcaatgaagattgtaatgaaaggatcttggctatgagagctgaagagaagtatgagatctctctgctgaagaaagagaaaatgaaccttctaaagttgatcgacaagaagaatgaagagaagataagtctccagtcagaagtaacaaagcttaggaagaacctcgccgaggaatacctgcattacctgagtgaaagagacgcctgtaagatccttatagctgacctaaacgagctgcggtaccagcgagaagatatgtccctggctcagagtcccggaatctggggcgaggatccagtgaagttaacattggcgctaaagatgacccggcaggatttaactcgcactcagatggaattaaataatatgaaagcgaatttcggcgacgtggtgcccaggagggactttgagatgcaggaaaagacaaataaagatctccaagagcaactggatacattacgcgccagctacgaggaggtacgcaaggagcatgagatcctcatgcagcttcatatgtccacgctgaaagaacgggaccagttcttcagcgaactgcaagaaatccagcggacttccacccctcgacccgattggacaaagtgcaaagacgttgtcgctggcgggccggagcgctggcagatgctcgcagaaggtaagaatagcgatcaactagtggacgtactgcttgaggaaatcggctcaggcctactcagggaaaaagattttttccccggcttaggatacggggaggccatacccgctttcttacggttcgatggactcgtcgagaacaaaaagccttccaaaaaagacgtggtcaacctgctcaaggatgcgtggaaggaacggctggctgaggagcagaaggagacatttcctgatttcttctttaattttctcgagcaccgattcggaccctccgatgcaatggcttgggcgtacaccatcttcgagaacattaaaatcttccactccaacgaagtcatgagtcagttctacgcggtgctaatgggtaaaagaagcgagaacgtatacgtcactcaaaaggagacggtagcccaactgttaaaggagatgactaacgctgattcacagaacgaagggctcttgactatggagcaattcaacaccgttttaaaatccacttttccattaaagacggaggaacagatccaggagttgatggaggccggaggttggcatccctcgtcctccaatgccgatctgttgaactatcggtcactctttatggaggacgaggagggccagagcgagccctttgtgcagaagctctgggaacagtacatggatgaaaaagacgagtatctgcagcagctgaaacaggagctggggatagaattacacgaggaggtcacattgcccaagctgcgcgggggattgatgacaatcgacccaagtttagacaagcagacagtcaatacttatatgtcccaagcgttccagctgcctgaatccgaaatgccagaggaaggcgatgagaaggaggaagcagtggttgagatactgcaaacggcattggaaagactccaggttatcgacattagaagggtcggacccagggaacccgagcccgcctcttag

SEQ ID NO: 15746 - DNA, 1287 bp, synthetic construct
  source 1..1287: mol_type = other DNA; note = Synthetic coding sequence
atggagccactgaaggtcgagaagtttgctacagccaaaaggggaaacggactacgggcagtcactccattgcgacccggtgagctcttgttccggtctgatcccctcgcctataccgtctgtaagggatcccggggggtcgtgtgcgacaggtgccttctggggaaggaaaagttgatgcggtgcagtcagtgccgcgttgccaagtattgttctgccaaatgtcagaaaaaggcctggcctgaccacaagcgagaatgtaaatgtttgaagtcctgcaaaccccgctatccaccggactccgttcgactgctcggacgggtagtgttcaagctcatggatggcgccccttcagagagcgagaagctatattctttctacgaccttgagagcaacattaataaacttacagaggacaaaaaagagggccttcggcagctggtgatgacttttcagcactttatgcgcgaggagatccaagacgcctcccagttgccgcccgcgttcgatctattcgaagcgttcgcgaaagtaatctgtaacagcttcaccatttgcaatgcggagatgcaggaagtcggcgtgggactttatcccagtatttccctgttgaatcatagctgtgatcctaactgctctatcgtgtttaacggaccccatttactgctcagagcagttcgcgacatagaggtgggtgaggagctgactatctgttacctggatatgctaatgacctccgaggagaggcgcaaacagcttcgggatcaatattgcttcgaatgtgactgcttcagatgccaaactcaagacaaagatgccgacatgctcacaggggacgagcaggtctggaaggaagttcaggagagcctgaagaaaatcgaggaattgaaagcccactggaagtgggagcaggtgctcgcaatgtgccaggccatcatcagcagtaactctgaacgcttacctgacattaatatctaccaactcaaagttctggactgcgcgatggacgcatgcatcaaccttgggctgctcgaagaggcccttttctatgggaccagaaccatggagccctaccgcatattttttcctggttctcacccggtgagaggagtacaagtgatgaaggtgggaaaacttcaactccaccaaggtatgttcccgcaggcaatgaaaaatttgcgtctggctttcgacattatgcgtgtgacccatggcagagaacacagcctgatagaggatttgattttgctcttggaagaatgcgatgccaacatcagagcgagctag

SEQ ID NO: 15747 - DNA, 1122 bp, synthetic construct
  source 1..1122: mol_type = other DNA; note = Synthetic coding sequence
atgtcaagcgggaactatcaacagtcggaggcactttcgaagcccactttctctgaggaacaggcatctgctttggtggaatccgtgtttggcctaaaagtgtcaaaggtgcgtccactgccttcctacgatgaccagaattttcacgtgtatgtgtcgaagacgaaggacggaccaactgaatatgtgctgaagatttcaaacaccaaggcctcaaaaaaccccgatctcattgaagtacagaaccacatcattatgttcctgaaagctgctgggttccccactgcaagcgtatgtcacaccaaaggagacaacacagctagcctggtcagcgtagattctggatccgaaataaagagttatcttgttcgactgctgacatacctgccaggtcgcccaatcgcagagcttcctgtttcaccgcagctactgtacgaaatcgggaagctggctgccaagttggataaaacgctccagcggttccatcaccctaagctgtccagcttgcaccgcgagaactttatttggaatctgaagaacgtcccccttcttgaaaagtatctgtacgcccttggccagaacaggaacagggaaatcgtagaacatgtcattcatctgtttaaggaagaagtgatgacaaaactttcccacttcagggagtgcatcaatcacggcgatctgaatgaccacaatattttgatcgaatcctcgaaaagtgcatcaggaaacgccgaatatcaagtttccggaatcttagatttcggggatatgtcctacggatactatgttttcgaagttgctatcacgatcatgtacatgatgattgaaagcaaaagtccaatccaggtcggtgggcatgtccttgctggctttgagtcgatcacaccccttactgccgtagaaaagggtgcccttttcctgctcgtctgtagcagattttgtcaaagcttggtgatggccgcctatagctgccagctgtacccggaaaacaaggattacctgatggtcactgcaaagacagggtggaagcacctccaacagatgtttgatatggggcagaaagccgtcgaggaaatttggttcgagactgcaaaatcctatgagagcggcataagcatgtag

SEQ ID NO: 15748 - DNA, 2766 bp, synthetic construct
  source 1..2766: mol_type = other DNA; note = Synthetic coding sequence
atggcactgctgtgcggactggggcaggtgactctcaggatctgggtaagcttgccctctcagagcgagaacgggatcgggtccggtggaatggaggcattgaccacccagctcggccctggccgcgaagggtctagcagcccgaatagcaagcaggagcttcagccatatagcggctcttccgcgctgaagcctaaccaggtgggagagacctctttatatggagttcctattgtcagcttggtcatcgacggacaggaaaggctatgcctggctcaaattagcaacacgctgttgaaaaattatagctataatgagatccacaatagaagagtagcgctgggcattacatgcgtccaatgcaccccagtgcaactggaaatcctgaggagggctggagccatgccaatctcttctagacggtgcggcatgattacaaagagagaagccgagcggctctgcaagagctttctgggggaacacaaaccccccaagctgccggagaactttgcattcgacgtcgttcatgagtgtgcttggggaagtagagggtcattcattcccgctagatacaacagctcacgggcaaagtgtataaaatgcggttactgcagtatgtacttttctcctaataagtttatcttccacagtcatcggacgccagacgcaaaatacactcagccagatgctgctaatttcaacagctggcgcagacatttgaagttgtccgacaaaagcgctaccgacgagctgtcccatgcgtgggaggacgtcaaagctatgttcaatggaggaacgagatgcggagccgaaatggcccctggacctcccccccataaatcccttaggtgcggcgaggacgaagccgcaggaccccctggcccacctcctccccacccccagcggggtctgggcctggccactggcgcctctggaccggccggcccaggtggtcctggaggcggggccggggtacggagctaccccgtgatacctgtaccaagcaaggggtttggactgctccagaaactgccaccacccctctttcctcacccgtacggtttcccaaccgccttcgggctatgccctaagaaagacgatcctgtccttggagccggcgagccaaaggggggcccaggaaccggcagcggtggaggaggggctggtacaggagggggtgcaggagggcccggggccagtcatctccctccaggcgccggggccggacctgggggaggtgcaatgttctggggacatcagcccagcggggccgccaaggacgccgcggccgtggcagccgccgcagctgctgccacagtgtaccctacttttccaatgttctggccagcagctgggtccctgccagtgccatcctaccccgcggctcagtctcaggcaaaagccgtggccgctgcagtggccgctgccgcggcggccgcggccgcagctgccggtagtggagcccccgaacccctggatggagctgagcctgcgaaggaatccggcctcggagctgaggaaagatgcccgagcgccctgagtcgtgggcctctggatgaggatggcactgatgaagctctgccccctcccctggcgcctctaccccccccgcctccccccccggcccgcaaaggcagttatgtcagcgcttttcggcccgtcgtgaaggacactgagtctatcgccaagctgtacggtagcgcacgcgaggcatacggggcgggccctgcaagagggcccgggcctggagctggctctgggggttacgtcagccccgatttcttaagtgaaggatcctcatcttacaactccgcttcgcccgatgtggacaccgctgacgaacctgaagtggatgttgagtcaaaccggttccccgatgatgaagacgcacaagaagagactgaaccctccgctccctcagccggggggggccccgacggcgagcaaccgactgggccaccctcagcaacctcatcgggagctgatggtccggccaacagtcctgacggcggtagtccccgccctagaaggaggttggggcccccacctgccggccgaccagcttttggggacctcgcagccgaggacctagtcaggcgccccgaaagatcccctccttcaggaggcggtgggtatgaacttagagaaccttgcggaccccttgggggaccagcccccgcgaaggtctttgcgcctgagcgcgacgaacacgtgaagagcgccgctgtggcgttgggaccagctgcaagctacgtctgtactcccgaggcccatgagcccgacaaggaagataatcactccccagccgatgatctggagactcgcaagtcatacccagatcaacgatcgatctctcagccttccccagccaatacagataggggtgaggatgggcttaccctcgatgtgaccggtacccacctggtagagaaggacatcgagaacctagcccgagaggaactacagaagctcctactggaacaaatggagttgcgcaaaaagctggaaagagaatttcagtcactgaaggataattttcaggatcaaatgaagcgcgagctggcctatagagaagagatggtgcagcagttgcagattgtaagagacaccttgtgtaatgaattagatcaagagcggaaagcaagatatgcgattcagcaaaagttaaaggaggcgcatgatgctctgcatcacttctcttgcaaaatgttgactcctaggcactgtacaggcaactgctctttcaagccaccgctgctgccgtag

SEQ ID NO: 15749 - DNA, 1395 bp, synthetic construct
  source 1..1395: mol_type = other DNA; note = Synthetic coding sequence
atggcgatgacggcaggcacaacaacaacgtttccaatgagcaatcacacccgagagcgcgtgaccgttgctaaacttacactggaaaacttctactctaacctgatcttgcagcatgaggaaagggagacacggcagaagaagctggaggtagccatggaagaggaagggctcgctgacgaggagaagaaactgcgccgatcacagcacgctaggaaggagaccgagtttctcaggctgaagaggacccggttgggcctcgatgattttgaaagcctgaaagtaataggacgaggagcctttggtgaagttcgactggtccaaaaaaaagacaccggccatatttacgccatgaagattctgcgtaagtcagatatgttggagaaagagcaggtcgcacacatccgcgcagagcgtgatatcctggttgaggccgatggggcatgggtagtgaagatgttttattcctttcaggataagagaaacctctacctgatcatggaattcctcccgggaggcgacatgatgacattgcttatgaagaaggacactctcaccgaggaggaaacgcagttctatatcagcgagacagtgctggccatcgacgcgatccaccagctcggctttattcaccgagacataaaacctgataacttacttctcgacgctaagggtcacgttaagctgagcgatttcggactttgcaccgggctgaagaaggcccataggacggaattctatcggaatctgacacacaaccccccctccgatttctccttccagaacatgaactcaaagaggaaggccgagacctggaagaaaaaccgcaggcagcttgcttactcaacagtgggaactcccgactatatagcccccgaggttttcatgcagaccgggtacaataaattatgcgattggtggtcacttggagtgataatgtacgagatgttgattggctaccctccattctgcagtgaaacaccccaggagacatatagaaaggttatgaattggaaagaaactctggtgttccccccagaagtgcccatctctgaaaaggcgaaggacctgatcctcaggttttgcatagattctgaaaatcggatcgggaattccggtgtagaggaaatcaaaggacatccctttttcgaaggggtggattgggagcacattagggagaggccagcagctattcctattgagataaagtcaatagacgacacttccaacttcgacgatttccccgagtccgacatactgcaaccggtgcctaatacaaccgagcccgattataagagtaaggactgggtgttcctcaactatacgtataagcgctttgagggcttaacccagagagggtccattcccacatacatgaaagccggtaagctctag

SEQ ID NO: 15750 - DNA, 3951 bp, synthetic construct
  source 1..3951: mol_type = other DNA; note = Synthetic coding sequence
atggcaagcaagggagccggcatgtctttctctagaaagtcctatcgacttacgtctgacgcagaaaaaagcagagtgacaggaattgttcaggaaaagttgctcaatgactatcttaacaggatcttctctagttctgaacatgcccctcctgcagccacttcgcgcaaacccctgaatttccaaaatttgccagaacatcttgatcaactgctccaggtcgataacgaagaagaagagagccagggacaggtggagggccgattaggtccttctactgtcgtacttgatcataccgggggatttgaggggcttctccttgtggatgacgatctgctgggtgtgatcggccatagtaacttcggcacaattaggagtactacttgcgtgtataaaggtaagtggctgtacgaggtgctcatctccagtcaagggctgatgcagattggctggtgcaccatctcctgtcggtttaatcaggaagagggagttggtgatactcacaattcttacgcatatgacggcaaccgcgtgcgcaagtggaacgtcacaacgaccaactatggtaaagcttgggctgcaggcgatatagtttcctgcctgatagacctagacgacggaactctttcgttctgcctcaacggggtgagcttggggactgcttttgagaacctaagcagagggctgggaatggcctacttccccgcaatctccctgtcatttaaagaatccgtggccttcaattttggctcacggccactccgatacccagtggcaggttaccggccgctgcaagaccccccaagtgccgacttagttagagcccagcgcttgctgggatgctttcgggctgttctgagcgtcgaactcgatccggttgagggccgcctgcttgacaaggagtcttctaaatggcgcttgaggggacaaccgacagtgctcctaaccctggcgcacatctttcaccattttgctcccttgctccgaaaggtatatctggtagaggccgttctgatgagcttcctactgggcatcgtagagaaggggacccccacacaggcccagagtgtcgttcaccaggtcctcgatctgctgtggctgtttatggaggactatgaagtgcaagactgtctcaaacagcttatgatgtcgctcctgagactttacagattttctcctatcgtgccagacctcggtctacagattcactaccttagacttacaatagctattttgcgacatgaaaagtctcggaagttcttgctatccaacgttctgttcgacgtgcttcggtctgtagtttttttctacatcaagagcccgttgcgagtagaagaagctggcttgcaggagttgattcccacaacctggtggccccattgtagcagcagggagggtaaggagtctacagagatgaaagaggagaccgccgaagagcgcttacgacggagggcatacgagcgcgggtgccagcgcctgcgcaagagaattgaagttgtcgaagaacttcaggtccagatcctgaagctgttgctggacaacaaggacgataatggcggcgaggcatcgagatacatctttttgactaagttccgcaagtttctgcaggagaacgcttccggacggggcaatatgcctatgttgtgcccccctgagtatatggtgtgttttctacatcggctaataagcgccttacggtattactgggatgagtataaagcaagcaatccgcatgcctccttttcagaggaggcgtatatccctccccaggttttttacaatggcaaggtggactactttgatctccagcgactcggggggctgctctcacatcttcgaaaaacactgaaagatgaccttgcatctaaagccaacatcgttattgacccactcgagctgcagtcaacggcaatggacgatctggatgaagacgaggaacccgcccctgccatggcacagcgcccgatgcaggccttggccgtgggcggcccactgcccttgcccagaccaggctggctgtcttctcccaccctgggacgggccaatcgctttttgtcgacggccgccgtgtctctgatgacacctaggaggcctctgtcaacttccgaaaaggttaaagtgcgaaccctgagcgtggaacagcgtaccagggaggacatagaagggagtcactggaacgaggggctgttgctcgggaggccacctgaggagccagagcagccgctgaccgaaaactccttacttgaagtgttggatggcgctgtgatgatgtacaatttatcggttcatcagcagctggggaagatggtgggggtgtccgatgatgtgaacgaatacgctatggcccttagagatactgaagataaattaagacgctgccctaagagacggaaggacattctagctgagctgactaagagtcagaaggtcttctctgagaaattggaccacctgtcgagaaggcttgcttgggttcatgccactgtctactcgcaagagaagatgttagacatttattggcttctgcgggtctgcctgcgcacgatagagcatggggacaggaccggcagtttgttcgctttcatgccggagttctacctgagcgtagccatcaactcttacagcgccctgaaaaattactttggccccgtgcactcaatggaggaactcccaggatacgaagagaccctgacacgcctggctgctatcctggctaagcattttgccgacgcgagaattgtggggacagacatccgcgacagtcttatgcaggcacttgctagctatgtctgctatccccactccctacgtgccgtcgaacggatcccagaggagcagcgcattgctatggtacgcaaccttctcgctccttatgaacagagaccgtgggcacaaacgaactggatactcgtgcgcctatggcggggctgtggtttcgggtacagatatacccggttaccccaccttttaaagaccaagcttgaggatgccaatttgccctccctgcagaagccctgtcccagtaccctgttacaacagcatatggctgaccttctgcaacaggggcccgatgtcgccccttccttcctgaactcggtcctcaatcaactgaattgggcgttttcagaatttattggcatgattcaggagattcagcaggcagccgaaagactcgaacgcaactttgtcgattcaaggcagttgaaggtctgtgccacctgtttcgatctatccgtgagcttgctccgggtgctcgaaatgaccatcactctagtgccagagattttcctggactggacacgccctacatcggagatgctgttacggcgtctggcccaactcctcaaccaggtgctgaatcgagtgacagcagagcgaaatctgtttgacagggtcgttactttgagacttcctggattggagagtgtggatcactaccccattctagtagctgtgacgggcatcctggtccaactgctggtgaggggacctgcctccgaaagggaacaggctacctccgtattgctggctgacccttgcttccagttaaggtccatttgctacctcctagggcagcctgagcctcccgcgccaggtaccgcgctgcccgctccagatcggaaacgatttagcctgcagtcttacgccgattacataagcgctgatgagctcgctcaggtggaacaaatgctagctcatttaacctcggcttcagcacaggctgccgcggcatcactgccaacctccgaagaagacctttgccccatctgctacgctcatcccatcagtgccgtctttcagccatgcgggcacaaaagttgtaaggcctgtatcaaccaacacctgatgaataataaggattgctttttttgcaaaaccaccacaagtaacctcctggcctgtttgtacccgcattggtgggaaccttctcacggccccaactgcgcttag

SEQ ID NO: 15751 - DNA, 2043 bp, synthetic construct
  source 1..2043: mol_type = other DNA; note = Synthetic coding sequence
atgcccagtgtcagcaaggccgccgccgcagccctgagcggcagtcccccgcaaacagagaaacccactcattatcgctatctcaaggaatttagaactgaacagtgcccgttattctcccaacacaaatgtgcccaacaccggccctttacttgttttcattggcatttcctgaaccaaagaagaagaaggcccctgcgccggcgtgatggcaccttcaactactcacccgatgtgtactgctccaaatacaatgaagccaccggggtgtgtccggacggggatgaatgcccctacctacaccggaccaccggggatactgagcgcaagtaccacttgcgatactacaaaaccggtacctgcattcacgaaactgacgcacggggccattgcgtgaagaacggcctgcactgcgccttcgcccacggaccactggatctgcgccctcccgtgtgcgacgttagggagctccaggcccaagaagcactgcagaacggacagctgggggggggtgagggagtgcccgatctccagcccggggtgctcgccagtcaggccatgattgaaaagattctcagtgaggatccaagatggcaagatgcaaacttcgtgctgggctcctacaaaacagaacagtgcccgaagcccccacgtttatgcaggcaaggatacgcttgcccacattatcataatagtagagataggcgccgcaaccctcgaaggttccagtatcggtccactccgtgccctagtgtcaaacacggcgatgagtggggagaacctagccgatgcgatgggggcgacggctgccagtactgccactccaggaccgagcaacaattccatcctgaatctactaagtgtaatgatatgcgacagacaggatactgcccaaggggccccttttgcgcctttgcccacgtggagaaatcgctcgggatggtcaatgaatggggctgccatgacctgcatctgacatcaccttcatctactggatcaggacagccgggcaatgccaaacgtcgcgattctcccgcggaggggggccctcggggaagcgagcaggatagtaagcagaatcatctcgccgtattcgccgccgttcacccgccagccccctctgtctccagcagcgtggcatcttcacttgcatcgtctgcaggatctggatcctctagcccaaccgccctcccagccccgcccgctagggcactccctctggggcctgcgtcctccaccgtcgaggccgtcctcggttccgccttagatcttcacctctccaatgtgaacattgcctcattggagaaggatctggaggaacaggatgggcatgacctaggcgctgccggcccacgtagcctggctggcagtgctccagttgccataccaggctccctgccccgggccccctccctgcacagtccaagtagcgcctcaacctcgcccctaggcagtctgtctcagccccttcctggaccggttgggtccagcgcaatgacacccccacagcaaccccctccactccgcagcgagcctggcacactcggctccgccgcctcgtcctactctcctctggggttgaatggagtgccaggctcaatttgggactttgtgtccggctccttttctcccagtccttctcccatcctgagcgccggtccaccctcatctagctccgcttctccaaacggggcagagctagctcgggtgaggcgtcagctcgacgaggctaagagaaaaattaggcagtgggaggagtcctggcaacaagtaaaacaggtgtgcgatgcatggcagcgtgaagcccaggaggcaaaagaacgagctagggtcgctgacagcgaccgacagctggctctgcaaaagaaagaggaagtcgaagctcaggtgattttccagttgagagccaagcagtgcgtcgcctgccgagaaagggcccacggtgctgtcctgcggccgtgtcaacatcatatactttgtgagccttgtgccgcaaccgcccctgagtgtccttattgtaaaggacagccactgcagtggtag

SEQ ID NO: 15752 - DNA, 462 bp, synthetic construct
  source 1..462: mol_type = other DNA; note = Synthetic coding sequence
atgagctcgccccttgccagcctctccaagacccgcaaggtacccttgccaagcgagccaatgaacccaggaaggagaggtatacggatctacggggatgttccagcctcacacgattcagagctgatggcttttatgacaaggaagctgtgggacctcgagcagcaggtcaaggctcagaccgacgagatcctttccaaagaccagaaaatcgccgccctggaggatctcgtgcagaccctgagacctcaccctgctgaggcaactctgcaacgacaggaggaactggaaaccatgtgcgttcagctgcaaaggcaagtcagagaaatggaacgctttctgtctgactatggccttcagtgggtgggggaaccgatggatcaagaagacagtgaatctaagacagttagtgaacacggggaacgggactggatgaccgctaagaaattttggaaaccatag

SEQ ID NO: 15753 - DNA, 2382 bp, synthetic construct
  source 1..2382: mol_type = other DNA; note = Synthetic coding sequence
atgggtcaatgctataacctggaggacgacgacttggagactgatgtcaacaaacttagctcaaagcccggcctcgacaggccagaagaggagctgatgcagtacgaagtcatgtgtttggagctgtcttactcgtttgaagaattgcagagtaagttaggcgacgacctaaacagcgagaagacacagtacgcaaatcatcaccatattcccgcggctgccagcagcaagcagcactgctatagcaaggaccaatcatcatgcggccaggagagggaatatgctgtccaaacaagtctgttatgcagggtgaagacgggaaggtccaccgtgcatctcggaagtaagaaaaatccaggagtgaatctttaccagaacgtgcagagcaactctctgcgaagagactcttcagaaagcgagattcccgacatccaggcaagcccaaaggcagatgcctgggatgtagatgcgatcttttgtccccgaatgagtgcaagttttagcaatagcactagaactagggaggtagttaaagtcatagacaaactgctgcagactcacctgaagcgagttcctttccatgacccctatctctacatggctaaggctcggaggacctcttcggttgtagacttcaagatgatggcattccccgatgtttggggacactgtcctccgccaaccacccagccaatgctggagaggaagtgcggagttcagaggatcaggatatttgaggatatcagaaggctcatccagcctagcgacgtaatcaacaaagtagtgttttcactcgacgagccctggcctctgcaggacaacgcctctaactgtttacggtttttctcaaagtttgaatcgggtaatctgcggaaagctatccaggtgcgcgaattcgaatatgacctactggtgaacgctgatgttaattcgacgcagcatcagcaatggttttactttaaggtttctgggatgcaagccgccattccctatcattttaatatcatcaactgcgaaaaacctaactcgcagttcaattatggaatgcagcctactctgtacagtgtgaaggaggccctgcttggcaaacctacctggatccggaccggccatgagatttgctactataagaaccactatcggcagagcacggcagtggcaggtggagcttccggcaagtgttactacacacttacattcgccgtgacatttcctcatagtgaagacgtctgctacctggcttaccactacccgtacacctatactgcattaatgacgcacttagacatactggagaaaagcgtgaacttgaaagaagtttacttccggcaagacgttctttgccagaccctcggggggaacccctgtccacttgtgacaataaccgcaatgcctgagagcaattccgatgaacatctggaacagttccgtcatcggccgtaccaagtcattacagcccgtgtgcatccaggagaatccaatgcgtcatgggttatgaagggaactttggagttcctggtttcaagcgatcctgttgcacgattgctccgcgaaaacttcatttttaagattatacccatgctgaacccagatggggtcatcaacggcaaccaccgatgctctttatcaggggaagacctgaacagacagtggttaagcccttctgctcaccttcagcccacaatttaccacgccaagggacttctgtaccacctctccagcatcggacgcagccctgtggtcttctgtgacttccacggccattcacagaagaaaaatgttttcttatacggctgcagtattaaggaaaccctgtggcaggctgcctgcacagtgggaacctccacaatattggaagaagtaaactacagaactctgcctaaaattctggataaactagccccggcattcaccatgtccagttgtagctttctggtcgagaagtctcgcgcctcgaccgcgcgggtggtggtctggcgcgaaatgggcgtgtcgcggtcatacacaatggaaagtagctattgtggctgcaaccagggcccttaccagtgcacacaaaggctattggagaggacaaaaaatgagcgggcccacccagtcgatgggctgcagggactgcagtttggcacgagggagttagaagagatgggagctatgttctgccttggactgctcatccttgagctgaaatctgcaagctgttctcaccagctcctggctcaagctgcaacactgctgagcgcggaggaagatgccctggatcagcaccttcaaagactgaagtcttccaatttcctgcctaagcatatttggtttgcttatcacttttttgcaatcactaactttttcaagatgaatctgctcttgcacgtgagtccatag

SEQ ID NO: 15754 - DNA, 153 bp, synthetic construct
  source 1..153: mol_type = other DNA; note = Synthetic coding sequence
atgatgcagaacgtccacctggcaccggagaccgacgaagacgatctttacagcggttacaatgattataatccaatttacgatattgaggaactggagaatgacgccgccttccagcaggccgtccgaacttcacacgggaggcgcccgtag

SEQ ID NO: 15755 - DNA, 1299 bp, synthetic construct
  source 1..1299: mol_type = other DNA; note = Synthetic coding sequence
atgaccgcagtccgggcagcaggttttactaaggccgcactccgtggctctgcattcgatcctctttctcagtcacgaggcccggcttctcccctggaggcaaagaaaaaagatagtccagaggagaagataaaacagttggaaaaggaagttaacgagctcgtagaggaatcttgtatcgccaacagctgcggagaccttaagctggctcttgagaaagcaaaagacgctggcaggaaagaaagggttctcgtgaggcagcgagaacaggtcaccactccggagaatataaatctcgacctcacgtactctgtgcttttcaatttggcctcacagtattccgtgaacgagatgtacgccgaagcgcttaatacataccaagtgattgtgaagaataaaatgttttcaaatgctggcattctcaaaatgaacatggggaacatttaccttaaacagagaaattatagcaaggccattaagttttaccgaatggcgctagatcaggtgcccagcgtgaacaagcagatgcgcatcaagattatgcaaaacatcggtgttacattcattcaggccgatagggagaaaatgaagaaagctttccagaagctgattactgtccctttagagatagacgaggataagtacatatcccccagtgacgatccccatacaaatttagtaaccgaagctataaagaacgaccatctgagacagatggaaagagagagaaaagccatggcagagaagtacatcatgacctcagcgaaacttatagcccccgtgattgagacttcatttgccgcgggatatgactggtgcgtggaagtagtgaaggcctcccagtatgtggaactggccaatgacctggaaattaacaaagcagttacctacctccgtcagaaagattataatcaagcagtagagattttgaaggtgctggaaaaaaaggatagtcgcgtgaagagcgccgccgctactaatctcagcgctctctattacatggggaaggattttgcccaggctagttcatacgcagacatcgcagtgaattctgatcggtacaatccagccgccttgaccaataagggcaatacagtattcgcaaatggcgattacgagaaggctgcggagttttataaggaagccttgagaaatgattcatcctgcacagaggccctgtacaatatcgggctgacatacgagaaactgaatagacttgatgaagcgctagattgctttctgaaactgcatgccatcctgagaaacagtgcggaggtattatatcaaatagctaactag

SEQ ID NO: 15756 - DNA, 387 bp, synthetic construct
  source 1..387: mol_type = other DNA; note = Synthetic coding sequence
atggccgccgcagcagctgagcagcagcagttctatctgctcttgggaaatctcctaagtccggacaatgtagtgagaaaacaggctgaggcacgccaaatggccgctgttcttctacgcaggcttctgagttcggcatttgacgaggtgtaccccgccctgccatcggacgtgcagacggctattaagtccgagttgctgatgatcatccaaatggagactcagagcagcatgaggaagaaagtatgcgacattgcggccgagctcgcgcggaacctcatcgacgaggatgggaacaaccagtggccagagggtctgaaattcctttttgactcagtttcctctcaaaatgttgggttacgggaggccgcgctccacatcttctag

SEQ ID NO: 15757 - DNA, 2766 bp, synthetic construct
  source 1..2766: mol_type = other DNA; note = Synthetic coding sequence
atgagacctgagggtgctggaatggaacttggcgggggggaggagaggctcccagaggagagtagacgggaacattggcaactgcttggaaacctaaagacaacagtagagggacttgtgtcgacaaactctcctaacgtttggtctaaatacggaggactggagcgcttgtgtcgtgatatgcaatctatcctatatcatgggttaattagggatcaagcatgcaggcgccagaccgattattggcagttcgtcaaggacattagatggctcagtccccacagtgcactccacgtggaaaagttcatttccgttcatgaaaatgaccagagctcagctgacggcgctagcgagcgggctgtggccgaactctggttacagcattcattgcagtaccactgtctcagcgcacagctgaggccccttctgggcgaccggcagtacatccgcaagttttataccgatgcggcatttctgttaagtgatgcccacgttactgctatgttacagtgcctggaagccgtggaacagaacaatcccagactccttgcccaaattgacgctagcatgttcgccaggaagcatgaaagccctctattagtgaccaaatcccagtccctgaccgctctcccaagttccacatatacgcctccaaatagctatgcccagcactcttattttggatcattcagctccctgcaccagtcagtacctaacaatggcagcgaacgcagatcaacctctttcccgttaagcggcccaccaaggaaaccccaggagtcacggggtcatgtctcacctgctgaagatcagacaatccaggcccctcctgtcagtgtgtctgctcttgcgagggactcaccactaacaccgaacgaaatgtcctcttcaacattgacctcacccatagaggcttcctgggtgtcgtcgcagaatgattcgcccggagatgcctcagaggggccagaatatctggctatcggtaatttggatcctcgcggtcgcacggcctcttgccaatctcattcatccaatgcggaatcttcctcttccaacctgttttccagttcttcatctcaaaagccggatagcgctgccagctctctgggggatcaggaaggtggaggggaaagccagttgtcctcagtgttaaggagatcttctttttctgaaggccagaccctcacagttacaagtggggccaagaagtcccacattagatctcattcagacacctcaatagcctctcgcggggcccctgagtcatgcaatgacaaggcaaaactgcgcggccccctgccatacagtggacaatccagcgaagttagcaccccctcgagtctttatatggagtacgagggaggacgctacttgtgctcaggcgagggcatgttccgaagaccttccgaaggacagtctctgattagctacctgagcgagcaggatttcggtagctgcgctgatctcgaaaaagagaatgctcatttctccatatccgaaagcctaattgctgctatcgaactcatgaagtgcaatatgatgtcacagtgcttggaggaggaagaagttgaggaggaggatagcgatcgggagattcaagagctcaaacagaaaattaggctgcgtagacaacagatcaggaccaagaaccttctcccaatgtatcaggaggctgagcacggttccttccgtgtaacgtcctcgtcctcacagtttagttcaagagacagcgctcagctgtcggacagcggatcagccgacgaggtagacgagtttgagatccaggacggaagcgagggctcaaatttgacacacatctcaaaaaatggcttatcagtaagccttgccagcatgttttcagacgccgacatccgcaggaacactgcttcctcctccaaatctttcgtgtcgtcccagagcttttcacactgttttctgcatagcacttccgcagaggccgttgctatgggccttttgaaacagttcgaaggaatgcaactgcctgccgcttcagagctggaatggcttgttcctgagcacgacgcgccacagaaattgctgcctatccctgacagcctcccaatttcaccagacgacggtcaacacgcagatatctataagctgcgcatcagggtaagagggaacctggagtgggcaccgccaaggccgcaaatcatcttcaatgtgcatccagcgcccacacggaagattgccgtcgctaagcagaactatcggtgcgccgggtgcgggatccgaaccgatccggactacattaagagactgcgatattgtgagtacctgggtaagtacttttgccagtgttgtcacgagaatgctcagatggccataccctctagggtcttaagaaagtgggactttagcaaatattatgtgtcaaatttcagtaaggaccttctgatcaaaatatggaatgacccgttatttaacgtccaggacattaacagtgctctgtacagaaaagtgaagcttttaaaccaggtgcgcttgctgcgggtgcaactatgtcatatgaagaatatgtttaaaacatgtcgtcttgcaaaggaattgttggattctttcgatacagttcccggccacctcaccgaggacttgcacctctactctctgaacgaccttactgcaactcggaaaggagaacttgggccccgactcgccgagcttaccagggccggcgctacccacgtagagcggtgtatggtgcgcaaaagccactgctcgatgcaactttcgccgtgcttttag

SEQ ID NO: 15758 - DNA, 1644 bp, synthetic construct
  source 1..1644: mol_type = other DNA; note = Synthetic coding sequence
atgagagccctgacagtgcagcgggtgaaatttgccatggacttaccactgctcaagcgcgccggacaggatctggctgagaaaaccaagaattttgttagccggtcactcgttatcggcgaggtactgtcaatggccgacatggctaccggcgtgaagtgcggcatcatctactggctattcggcggtgccatccgcaatcttggctcccccgaacacgtgaccaagtggttccaaccccttcaggaacagaaatatacggggatgtttgctatgaccgagcggggtcatggatccaacgcgcgcggtattcaaacagaggccacctttgatttgagcgcccaagagtttgtcatagatacaccctgtgagaacgccgagaaaatgtacatcggcaacgcgatgtacggaaactacgcggccgtctttgcccagctcataatcgatgggaggtctcagggaccccattgttttatcgtcccagtccgggatgaaaacgggtcactctaccccggtgtcacggccatcgacatgatgtataaggaaggtctgcatggagttgataacgggattctgatatttgacaaagttcgaattccacgcgaaaacctgctggataagtttgggagcgtggcccctgatggacagtaccactccccaatcaggaataagtctgcaaggtttaatgcaatgttggccgcactaacaccgagtaggcttgccgtggccttccaggctatgggggcaatgaagctcggcctgactattgctatcaggtacagccacagtcgcaggcaatttggcccaaagaccaaagaagaggtgaaaattattgaacatcaaacccaaaccctgcgtctgatgcctcatttagccaccgccctggcccttacctttgtgtcacgttacgcaggcgccttgctggacgaggatgtgttccagggaaaagaactggttaacagccggtctcttcaggcgcttgtggccggccttaaagcgtacagcacatgggagaacattcgctgtctacaggattgcagagagtgcaccggagggatgggctatatgatggagaacaggatcagtggccttaagtgtgataccgatgtctttgcaactttcgagggggatgatgtcgtgatgcttcaggttgttggaagggagctgctcgcacagtacaccaaacagtatgaggagaaaccattgttcgggctgctgcaaaattgggcggagagcgttggcgacaaactccgaacatcttttctggccttcaatatggataccgtagatgacctggccttcctcctgaaagccgttaagtttagggagagggtattacagagggggcttgtagccagaatctattataaagtgaaaaccaaaaaagaagatttcttccacgcttggaacagctgccttcaccatgtggccagtctgagtttggctcacacccacagggtaactctcgaacagtttagtttagcggtgaaatcttgcccagatcaagaagatcagacactcctgatgaagttttgtcttctctatggaactaaactggtgttccaggaacgcgcttggtatctcgaacacaagtacttaacccctatggcatcaacaaggatccgtaaccaggagagatgttag

SEQ ID NO: 15759 - DNA, 6087 bp, synthetic construct
  source 1..6087: mol_type = other DNA; note = Synthetic coding sequence
atggatgtaaccgtgtccgaactcctggaactgttcctgcaatcccccttggttacatgggttaaaacctttggaccctttggcagtggtagccaggacaacctgacaatgtacatggacctggtggatggcatttttctgaatcagatcatgctgcagattgatcccaggcccacaaatcagcgaattaacaagcatgtgaataatgacgtcaacctgcgaattcaaaacttgaccatactggtaagaaacatcaaaacttactatcaggaagtgttgcagcagctcattgtgatgaacttgccaaacgtgctaatgatcgggcgagacccgttaagtggcaagtcaatggaagaaatcaaaaaggttttactgcttgtgttaggatgtgccgttcagtgtgaaaggaaagaggagttcattgaaagaattaaacaactggatatcgagacacaggcaggtatagttgctcacattcaggaagtcacccacaatcaggaaaatgttttcgatcttcagtggctggagctccctgatgtggccccagaggagctggaggccttgtcccggtccatggtgttgcacttaaggaggctaatagaccaaagagacgaatgtaccgagcttattgttgatttaacgcaggaaagggattatctgcaggctcaacatcctcctagcccaatcaaaagttcctccgccgactcaacaccgagccccacctctagcctgtcttcagaagataaacaacatcttgccgtagaactggcggacactaaagcccgcctgaggcgagttcggcaggagttagaggataagactgagcagctggtggacaccaggcatgaagtggaccagctggttctggagcttcagaaagtcaagcaggagaatatacagctcgccgctgacgctcgctctgccagagcttaccgggatgaactcgatagtctgagagagaaggctaaccgtgtggagcgactcgagctcgagctgacccgttgcaaggaaaagctccatgacgtggacttttataaagccaggatggaagagctgagagaggacaacatcattctgatcgagacaaaagcaatgctggaggaacaattgaccgccgccagggctcggggagataaggtccacgaattagagaaggagaacttgcaactcaaaagcaaactgcacgatctcgagctggaccgggatacggataagaagaggatcgaggaactcctggaagaaaacatggtcttagagatcgcccaaaaacagagtatgaatgagtctgcccatctggggtgggagctcgaacagctgtcaaagaatgctgatttgtctgacgcctcacgcaaaagtttcgtgttcgagttgaacgaatgtgccagttccagaattttaaaacttgaaaaagagaatcagagtctccaatccacaatacaaggactaagagacgcctctctggtgctggaagagtccggacttaaatgtggagaactcgaaaaagagaaccatcagttatccaaaaagatcgagaaattgcagacccaacttgaacgggagaaacagagtaatcaagacttggagaccttatccgaagagctgattagagagaaggaacagctccagtcagatatggagactctgaaggcagacaaggccaggcaaataaaggatctggagcaggagaaggatcacttgaatagagccatgtggagcctgcgcgagcgttcccaggtctcctcagaggctcggatgaaggatgtcgaaaaggaaaataaggctctgcaccaaaccgtaactgaggccaatgggaagttgagtcaactggaattcgagaagaggcagttacacagagaccttgaacaagcaaaggagaagggtgagagagccgagaaactcgagagggaattacaacgcctccaggaggagaatggtcgcctggctaggaaagtgacatccttggaaacagcaacagagaaagtggaggcccttgagcatgagtctcagggcctgcagttggagaataggacgctgaggaagagcctggacaccctccagaatgttagtctgcagctcgagggcctcgagagggataataagcagttagatgcagaaaacctcgaactgagaagactggttgagaccatgcgattcacgtccaccaaactggcccaaatggagcgggagaatcaacaactggagagggaaaaggaggagctaaggaaaaatgtagacctgctgaaagcccttggcaaaaagtccgagagattagaactctcctaccagtccgtgtcagcagagaacttgcgcctgcagcagtccctcgaatcttcaagtcacaagacacagacccttgagtccgagcttggagagctcgaggccgagcgacaggcgctccggcgggacctagaagcgctgcggctcgccaatgcacagctagaaggcgctgagaaggacaggaaggcccttgaacaggaagtggcccagttagaaaaggacaagaagctgctcgaaaaagaggcgaaaaggctgtggcagcaggttgagctgaaagatgcagtcctagatgattcaaccgccaaactgtccgctgtcgaaaaggagtccagggcattggataaggaacttgccaggtgcagagacgcagctgggaagctaaaagagctggagaaggataaccgagatttgaccaagcaggtcaccgttcacgcacgcacgctcaccaccctgcgcgaagatctcgtgcttgagaagctcaaatcccagcaactgagttccgaactagacaaacttagccaggagctcgaaaaggtaggcctcaatcgtgagctcttacttcaggaagatgactccggttccgatacaaaatacaaaatattggagggcagaaatgaatccgccctgaaaaccaccctggcgatgaaggaagagaagattgtgttgctggaggctcagatggaggaaaaggccagcttgaacagacagctggaatccgaactccagatgctgaaaaaggaatgcgaaaccctcaggcagaaccagggggagggccagcacttgcagaattcttttaagcatcctgcagggaagacagccgcaagtcaccaaggtaaagaggcatggggacccggacataaggaagctactatggagcttctgagggtaaaagacagagccatcgaattggaaagaaataacgccgccctccaggcagagaaacagctgctcaaagaacagttgcaacacctggagacccagaatgtcaccttctcatcgcaaatcctcacgctgcaaaaacagtccgccttcttacaggagcacaatacaaccctgcaaacacagacagccaagcttcaagtcgagaactcaactctgtccagccagagcgccgctctgacagcccagtacacactcctgcagaatcatcacacagctaaggagactgagaacgagagcctccaaaggcagcaggagcagctgacggccgcttatgaagcactgctccaggatcacgagcatctgggaaccttacatgaaaggcagtcagctgagtatgaggccctcattcgccagcatagctgtcttaagaccttacacaggaatcttgagttggaacataaggagctcggagaaaggcacggggatatgctcaaacgaaaggccgagctcgaggagagagagaaggtgctcaccaccgagcgcgaagcactccaacaggaacagagaacaaacgcactggccatgggggaaaaccagcgtctccgcggtgagttagatcgcgttaatttcctgcatcaccagttgaaaggcgaatacgaggagctgcatgctcacacaaaggaacttaaaactagcttaaacaacgctcaactcgagctaaacagatggcaggccagattcgatgagttgaaagagcagcaccagaccatggacatttccctgaccaaactcgacaaccactgcgagctattatcgcggttgaagggcaacctcgaggaagaaaaccaccatttgctgtcccaaatacagctgctttcacagcagaaccagatgctacttgagcagaacatggagaacaaggagcagtaccatgaggagcagaagcagtacatcgacaaactcaacgctttgcgcagacacaaagagaagcttgaggagaaaatcatggatcagtacaagttctatgatccaccacctaagaagaagaaccattggataggcgcgaaggccctggtgaagctgatcaaaccaaagaaggagggctcacgagaaagattgaagagcacagtagatagcccaccctggcaactggaatcttcggaccctgcatctcctgccgcctcacagcctctgcgctctcaggcagagaacccggacactcccgcccttggctctaattgcgcggaagagcgggatgcccacaatggatcagtcggcaaggggcccggcgacttgaaacctaagcggggttcccctcacagaggcagtctggatagaaccgatgcttccacagatctcgcaatgcgctcttggccttccgagctcggctcaaggacgtgtagtaccagtgccaccacaactgcaccgtcaaacagtaccccaattgccaggcacccaggtcgtactaaggggtacaattccgacgacaacttgtgtgaaccatctctggagtttgaggttccgaaccatcgccagtatgtatctaggcccagttcactggagtcttcacgcaacacttcatcgaattcaagcccgttgaacctgaaaggcagctcggagcaactccacggtaggagcgagtcattttcttctgaggatttgattcctagccgggatctggccaccctccccagagaggcaagcactcctggtcggaatgcactcgggaggcacgagtacccactgcccagaaatggccctctgccccaagagggcgctcagaaaaggggaacagccccgccttacgtcggcgtgcgcccatgctcagccagcccatcttcggaaatggttacattggaggagttcctggaagaatccaacagatcctcgccaacacatgacaccccctcatgtcgcgatgatctgttaagtgattattttcggaaagctagtgaccccccagcaatcggaggccagccaggacctcccgctaagaaggagggcgccaaaatgcctacaaatttcgtggctcccaccgtgaagatggcagctcctacaagtgaaggaagaccactaaaaccggggcagtatgtcaaaccgaatttcagactgacagaggccgaggccccacctagcgtggctcctcgacaagctcagcctccacagtcattgtcgctgggaaggccccgacaagcccccgtcccgccagcatcccatgctcccgcctccagaagcgcgagtctctcacgtgccttcagcctcgcaagcgcagacttgctgcgggctagcggacctgaggcatgcaaacaggaatcgcctcagaaactaggcgcacccgaggctctggggggacgggaaacaggatctcacaccctgcagagccccgcacctcccagttcccacagcctcgcccgagaaagaacccccttagtgggaaaagctgggtctagctgccagggtccgggcccgcggagtaggccactggacacacgacgcttcagtttagcgcccccaaaagaggaaaggctggcgcccctgcaccagagcgccacagcccctgcgattgcgactgcaggcgcaggtgcggccgctgcaggaagcggcagcaacagccagctgctccactttagtcccgctgctgccccagcggcaaggaccaaaccaaaagcaccaccccgatccggtgaggtggctaccataacccccgtccgcgcggggctgtccctaagtgaaggagatggcgtaccaggccaaggctgtagcgaaggcctgcctgcaaaatcacccggtaggtcacctgatcttgccccccacctcggaagagctctggaggactgttccagaggctctgtcagtaagtcaagccccgccagccccgagcctggcggcgatcctcaaaccgtctggtatgagtacggatgtgtatag

SEQ ID NO: 15760 - DNA, 3831 bp, synthetic construct
  source 1..3831: mol_type = other DNA; note = Synthetic coding sequence
atggatgaagtcgagcaggaccagcacgaggccaggctgaaagagctgttcgactccttcgatacaaccggtacaggatctctcgggcaggaggagttgaccgatttatgccacatgctgagcctggaagaagttgctcccgtgctgcaacagactttgttgcaggataatctgctgggccgggtccacttcgatcagtttaaagaggccctcatactgattctgtctcgaactctatctaatgaagagcattttcaggagccagattgcagcctcgaagctcagcccaaatacgtgaggggaggtaagcgctacggacgccggagcctgcccgagtttcaggaatctgtcgaagaatttcctgaggtcactgtaattgagcccctggacgaggaggcccggcctagccacatcccagctggcgattgctctgaacactggaagacacagagaagcgaagagtacgaagccgaaggtcagctgaggttttggaacccagacgacctcaacgcctcccagtcgggatcctcccccccccaggactggatcgaggaaaaacttcaggaggtgtgtgaggatctcggcataaccagagatgggcacctgaatcggaaaaagctagtctctatctgcgagcagtatgggctccagaatgttgacggggaaatgctcgaggaggtcttccacaacctcgacccagatgggaccatgtccgtggaggattttttttacgggttgttcaagaacggtaagtccctgaccccgtccgcaagcacaccctaccgtcagctcaagcgccatctttcaatgcagtcctttgacgaatcagggcgacggacaacaacttccagcgctatgacaagcacaattgggtttcgggtgttctcatgcctggacgacggcatgggccatgcgagtgtagagcgcattcttgatacctggcaggaagagggaatcgaaaatagccaggagattctcaaagcattagacttctcactcgatggcaatattaacttaaccgagctgacacttgcattggagaacgaactgttagttacaaagaatagtatccaccaagcagctcttgccagctttaaggccgaaatcagacacttacttgagagggtggaccaggtggtaagggagaaggaaaagcttaggagcgatctagacaaggccgagaagctgaaatcactgatggcaagtgaagtggatgatcatcacgctgccattgagcgcaggaacgaatataatctacggaagctagatgaagaatacaaggaacggatcgccgctctgaagaacgagctccgcaaggaacgggagcagatattgcagcaggccggcaaacagaggctggagctggagcaggagattgagaaggctaagactgaggaaaattacattcgggatcgcctagcactgtctttaaaggaaaattcccgtctggagaacgaactccttgagaacgcggaaaagctcgcagagtacgagaacctgaccaacaagctgcagcgcaatctcgagaatgtgctggccgagaagtttggggacttagaccctagctcagctgagttcttcctgcaagaggagagactaactcagatgaggaatgagtatgaacggcagtgtagagtactgcaagatcaggtggacgaactgcagtcagagctggaagaataccgggctcaaggacgcgtattgagacttcccctcaaaaactccccatccgaggaagtagaggccaactctggtgggatcgagccagaacatggtcttgggtctgaggagtgtaacccgttaaacatgagcattgaagctgagctcgttatagaacagatgaaagagcagcaccaccgtgacatttgctgcctgaggctggagctagaagataaggtgaggcactatgagaaacagcttgacgagacagttgtgagctgtaagaaagctcaggaaaatatgaagcagcgccacgagaacgaaacacacaccctggagaaacagatctcagatctgaaaaatgaaatcgcagaactgcagggtcaggcagcagtcctgaaagaggcccaccatgaagctacatgccgccacgaggaggagaagaaacagctccaggtgaaactcgaagaagagaaaacccatctgcaggagaaactccggctgcagcacgaaatggagttaaaagcccgactcacgcaggcgcaagctagctttgagagggaacgagaagggcttcagtccagcgcatggaccgaggagaaggtacggggcctcacccaagaactggagcagtttcaccaggagcagctgacctctctggttgagaagcacaccttggagaaggaggaactcaggaaagaactgctggagaaacatcagagagaactgcaagagggacgatacgaaagcgagaaactgcaacaggagaattccatcttgcgaaacgagataaccactcttaatgaggaggacagtatctccaatctgaagctagggaccttgaacggttctcaggaagaaatgtggcaaaagacagagacagtgaaacaggagaacgcagcagtgcagaaaatggtggagaacctaaagaagcagatcagcgaactgaaaattaaaaatcagcaactcgacctggagaacaccgagttgtcacagaagaactcccaaaatcaggaaaagctacaggaactgaatcaacggctgacagagatgctttgccaaaaagagaaagaacccggcaatagcgcactcgaggagagggagcaggagaaattcaacttgaaggaggagcttgagcgatgcaaagtgcagagcagcacactggtttctagcctggaagcagaactgtctgaggtcaagatccaaacgcacatcgtgcaacaggagaatcatctcctgaaggacgaactggaaaagatgaaacagctgcacaggtgccctgacctgtccgattttcaacaaaaaatctccagtgtgctgagctataatgaaaagctgctcaaggagaaggaagctctctcagaagagctgaactcttgcgtggacaaactggccaagtcctcattgctcgaacatcggatcgcaaccatgaagcaggagcaaaaatcctgggaacatcagtctgcgagcctgaaatctcagctggttgcctcccaggagaaggtccaaaacctggaagataccgtacagaatgtgaacttgcagatgagcaggatgaaaagtgacttgagggtaacacagcaggaaaaggaggccctgaaacaagaggtcatgagtctgcacaagcaattacagaacgccggcggcaaaagttgggccccagagattgccacccatcccagtggacttcacaaccagcagaaaaggttaagttgggataagctggatcacctgatgaatgaagaacagcagctgctttggcaggaaaacgagagactgcagactatggtgcaaaatactaaagccgaactcacccacagccgggaaaaggtgagacagctggaatcgaatcttctgcccaaacaccagaagcacctcaacccgagcggaactatgaatcccacagagcaggagaagttaagtttgaaaagggagtgcgatcagtttcaaaaagagcagagtccagctaacaggaaagtcagccaaatgaactctctagagcaagagctcgaaaccattcacttggagaacgagggcctcaagaaaaagcaggtgaagctcgatgagcagttaatggaaaattctgttgtgggttccagcagagaaggctgcagtagtctgcccgagatcgtatgcgaggacgctgcccccgaggttcattgcgacgcctag

SEQ ID NO: 15761 - DNA, 2997 bp, synthetic construct
  source 1..2997: mol_type = other DNA; note = Synthetic coding sequence
atgaaagacagcggagactctaaagatcagcagctcatggtcgccctaagggtccgacctatcagcgttgccgaacttgaggagggagccaccctgatcgcccataaggtggacgaacagatggtcgtcttaatggaccctatggaggaccccgatgacatcttacgtgctcatagatcaagagagaaatcatatctcttcgacgtggcctttgacttcaccgccacccaggaaatggtgtatcaggccacaaccaagagcctcatcgagggtgtgatctctggatacaatgccactgtgtttgcctacggacccactggatgtggaaagacctacacaatgctgggaaccgaccaggaacctgggatttacgtccaaactctgaacgatctctttcgagctatagaggaaacttccaacgatatggagtacgaggtatctatgagttacttggaaatttacaatgagatgataagagacctgctgaaccctagcctgggctatctggaactgcgggaagacagtaaaggagtgatccaagtggcggggatcaccgaagtgagcaccataaatgccaaggaaattatgcagctgctcatgaagggcaaccgccagaggacccaggaacccacagctgctaatcaaacatcctcacgcagccatgctgtgcttcaagtaactgtgcgccagagaagtagggtgaagaatatccttcaagaggtcaggcaaggtcgtttgttcatgattgatctggccggcagcgagcgggcctcccagacacagaaccgcggtcaacgtatgaaagaaggcgcacatatcaacaggtctctgcttgcgctcgggaactgcattaacgccctctcggacaagggctctaataagtatattaactatcgggattctaaattaacaaggttgttgaaagacagccttggcggaaattcgcgaacagtaatgatagcccatattagccctgcctcttctgccttcgaagagagccgaaatacactgacctacgcaggccgtgccaagaacataaagaccagagttaagcagaacctcctaaacgtgtcctaccacatcgcccagtacacgagcataatcgcagacctgcgaggggagattcaacgcctgaaaagaaaaatcgacgagcagacggggcgcgggcaagctcgggggcggcaggaccgcggcgatatccgccacatacaggctgaggtacagctgcactcaggtcaaggagagaaggctggaatgggacagctaagggaacaattggcttccgcttttcaggagcagatggacgtgagaaggcggctgctcgaattggagaaccgtgctatggaggtgcagatcgacacatcccggcacttgctaaccatagccggttggaagcacgaaaagtcccgaagagctctgaagtggagggaggagcagagaaaagagtgttatgccaaggacgacagcgagaaggacagcgacactggggacgaccagcctgatatattagagccgcctgaggtcgccgcggccagagaaagcatagccgctctggtggatgagcagaagcagttaaggaaacagaaattggcgctggagcaaagatgccgtgagctgagggcccgcggaaggcggctagaggaaacactgcccagacgcataggaagcgaggagcagcgagaggtgttatcgctcctctgccgtgtccacgagctcgaagtcgaaaacaccgagatgcagagccacgctttactaagagacggagctcttagacatcgtcacgaagcagtcaggcgactggaacaacatcggagcttgtgcgacgaaatcatccagggacagcggcaaattatcgatgactacaatctcgctgtgccacagaggctggaggagttgtacgaggtgtatctgcgagaactggaagaaggtagcctcgagcaggcgactattatggaccaggtggcctctcgggctttgcaagattctagcctgccaaagataacacccgctgggacaagcctcacgcccgattcagacctagagtccgtgaagacccttagctcagatgcccagcacttacagaactccgctctgcctccgctgagcacagagagtgagggacaccatgtgtttaaggctggtaccggggcctggcaggctaagtcctctagtgttcctacacctcctccaatccagctgggctctttggtaacacaagaggccccagctcaggacagcttaggctcgtggattaacagttcccctgatagtagcgagaacttaagtgagattcctctgtcacataaggagagaaaggagattctgacgggaacaaagtgtatatgggtcaaggccgccagaaggcgctccagggcgctgggaaccgaaggccggcatcttctggctccagcaacggaaaggtcctccctatctctgcactccttgtccgagggcgacgatgcccggcctcctggacccctggcctgcaagcgtcccccctccccgacactccagcacgctgcctcagaagacaatctgagcagctcaaccggtgaggccccatcacgagccgtaggccatcacggggatggacctcggccatggcttcgcggccaaaagaaaagcctagggaaaaagagagaggaatcgctggaggcgaagcgccgcaaaaggaggagtaggtcattcgaggtgaccggtcagggtctttctcatccgaagacccacctgttgggaccgcatcaggccgaaaggatatcggaccacaggatgcccgtgtgtaggcacccagcaccaggcattcggcacctcggaaaggttacacttccgttggccaaagtcaagctcccgccctcccagaatacagggcccggagactcctccccactggccgtcccaccaaaccctggaggcggcagcaggcgggctaccaggggtcccagacttccacatggaacatccacccatggaaaggatggctgctccaggcacaactag

SEQ ID NO: 15762 - DNA, 1194 bp, synthetic construct
  source 1..1194: mol_type = other DNA; note = Synthetic coding sequence
atgaccgccgaagagggcgtacaactgtcccagcagaacgccaaagactttttccgtgttttgaatctgaacaagaaatgtgatacatctaagcataaggtcttagtcgtgtctgtctgcccccagagcctcccgtattttgctgccaagttcaatttatccgtcactgacgccagcagacggctgtgcggattccttaaatcccttggcgttcactacgtttttgacacaaccatcgctgctgatttcagcatccttgagagtcaaaaggaattcgtccggcggtatcgccagcattcagaggaagagcgcacactgcccatgctgacaagcgcttgtcctgggtgggtgagatatgctgagagagtcctgggcaggcccatcacagctcacctgtgcacagccaaatctccccagcaggtgatggggagtctcgtgaaggattatttcgccagacagcagaacctgtctccggaaaagatttttcacgtgatcgtggcaccctgctacgacaaaaaactggaggctctgcaggagtccctgccacccgccctgcatggttcacgtggtgccgattgtgtgctgacgtccggagagatagcccaaattatggagcaaggggatttatccgtgcgagatgccgccgtggataccctgtttggcgatcttaaggaggacaaagtgactagacacgacggcgccagcagtgatggccatctcgcgcacatattccgccacgccgcgaaagaattattcaacgaagacgtggaggaagtgacgtaccgggccctgcgcaacaaggacttccaggaagtgacgctcgagaaaaacggggaggtggtcctccggtttgccgccgcctatgggttcagaaatattcagaacatgattctgaagctcaaaaagggcaaatttccctttcattttgttgaggttttggcctgcgcaggtggatgtctgaacggacgcgggcaagctcaaacacctgacggacatgccgacaaggcactgttacgccagatggagggcatttatgccgatattccggtaaggcgcccagagtctagcgcccacgtgcaagagctgtaccaggaatggctggaaggcatcaactctcccaaggcgcgggaggtgctgcatacaacctaccaatcacaagagcgaggaactcatagtctggatataaagtggtag

SEQ ID NO: 15763 - DNA, 3603 bp, synthetic construct
  source 1..3603: mol_type = other DNA; note = Synthetic coding sequence
atgaaggtcgcaggaggactggagcttggagcagccgccctattatcagccagtccccgcgcgctcgtaacactctccactggaccaacctgtagtatacttcctaagaaccccctttttcctcagaatctgtccagccagccctgtattaaaatggaaggtgacaaatctttaaccttttcttcttatggacttcagtggtgcttgtatgaactggacaaagaagagttccagacattcaaggaactgttgaaaaagaaaagttcggagtccacaacctgctcgatcccccagtttgagatagaaaatgccaacgtggaatgtctagcccttttgttgcatgagtattacggcgctagtcttgcatgggctactagcatcagcatcttcgagaatatgaacctcaggactttgtcagaaaaggcgagagatgatatgaaaaggcactcaccagaggatccagaagccactatgacagatcaaggcccatccaaggagaaggtgcccggcatttcacaagcagtccagcaggactccgctacagctgcagaaaccaaggagcaagaaatctcacaggccatggagcaggagggcgccaccgccgcagagacagaagaacaggaaatcagtcaggccatggaacaggagggagcaacggctgctgagacagaggagcagggccatggcggagatacatgggattacaaatcacatgtgatgaccaaatttgcagaggaagaggatgtgagacggtcattcgaaaacacagctgctgattggcctgaaatgcagacacttgcaggggcttttgatagcgaccgctggggatttagaccacggactgtcgtgttacatggaaagtctggcatcggcaagtccgctttagctcgtcgcattgtgctttgttgggcccagggagggctgtaccagggtatgttcagctatgtgttcttcctcccggtaagggagatgcagcggaaaaaggaatcaagcgtgactgaattcatttcccgcgaatggccggattctcaggccccagtaactgaaatcatgagcaggcccgagcgccttttattcattatagatggatttgatgacctcggaagcgtcctgaacaatgataccaagctttgcaaggactgggctgaaaaacagcccccattcactctcatcagaagcctattaaggaaggtgctgctgcccgagtcgttcctgattgtcacagtccgggacgtcgggacggaaaagctaaaaagtgaagtcgtctctccccggtatctgctggtacgcggcataagcggtgaacaaagaatccacctgctcctcgaaagggggatcggagaacaccaaaagacccagggcttacgtgctattatgaacaaccgtgaactgctggatcaatgtcaggtacctgccgttggctccctgatctgcgtggcactacagctacaggatgtggttggtgaatcagttgccccctttaaccagacactgaccggcttgcacgccgccttcgtttttcaccaactgacccccagaggcgtggtgcgtaggtgtctgaacctggaggagcgtgttgtgctcaaaagattctgtcgcatggcggttgaaggagtctggaacaggaaatcagtctttgatggcgacgacctgatggtgcagggactcggcgagtcagagctgcgcgcactgttccacatgaatatcctcttgcccgacagtcattgcgaagaatactacacgttttttcatctttcactacaagacttctgcgccgcactatattacgtgttggagggtctcgagatcgagcctgccctctgtccattgtatgttgaaaaaaccaagcgttctatggagttaaagcaggctggctttcacatccactccctatggatgaagcgtttcctatttggcctagtcagcgaggacgttagacgtcctctggaagtcttactcggctgtccagtcccgttgggtgtgaagcagaagctgcttcactgggtgagcctgctgggccagcagccaaacgccaccacccctggtgataccctggacgcatttcactgcctgttcgagactcaggacaaggagttcgtgagactggctcttaactccttccaagaggtgtggttgccaattaaccagaacttggacctgatcgcaagctccttctgcctgcagcattgtccatatcttaggaagatcagagtagatgtaaagggcattttcccgcgagacgaaagtgctgaggcttgtccagtagtgcccctgtggatgcgcgataaaactcttattgaggaacaatgggaggacttctgcagcatgctggggacacatccccacttgcgacagctcgatctgggttcatctatactgactgagagagcgatgaagacactgtgcgccaaactacgccacccaacgtgtaagatacaaactctcatgttcaggaatgctcagatcactcctggggtgcagcatctgtggagaatcgtcatggccaaccggaacttgcgttcactgaatctgggcgggactcatttgaaagaggaggacgtacgcatggcctgcgaggcgttgaaacacccgaagtgcctactggaaagtctgagacttgattgttgtggcttgacccatgcttgttatctgaagatcagccaaatattgacgacaagcccgagccttaagagcctatccttagcagggaataaggtaacagatcaaggtgtgatgcccctgtccgatgctttgagagtttcgcagtgtgccctccagaaactgattcttgaagactgcggcattaccgcaacgggctgccagagcctcgcttctgccctggttagcaataggagcctgacccacctatgtctaagtaataattcactgggtaatgagggggtgaatctcttgtgcagatccatgcgcctgcctcattgctctctgcaaaggcttatgctgaatcagtgccacctcgacactgctggttgcggttttctggcccttgctttgatgggtaactcctggctgacacatctgagcctgagcatgaatccagttgaagataacggggtcaaattgctctgcgaagttatgcgggagccaagctgtcatctgcaggatctggagttggtcaagtgccatcttacggctgcctgctgcgaatctctgtcttgcgtaatctcacgtagtcggcacttgaaaagtttggatctaaccgacaacgcgctcggagacggaggagttgccgcgctgtgcgagggcctgaaacaaaagaacagcgtgctggccaggctgggactgaaagcctgtggtctaacttccgactgttgtgaggcactcagcttggccctgagctgcaacagacacctgacaagcctcaaccttgtgcagaacaatttttcccctaaaggcatgatgaagctgtgtagcgcattcgcttgtcctacttctaatctccagatcataggcctgtggaaatggcaatacccggtgcagattaggaaactgctcgaggaggtgcagcttcttaaaccgcgtgttgttatagacggctcctggcacagcttcgatgaggacgataggtactggtggaaaaactag

SEQ ID NO: 15764 - DNA, 2787 bp, synthetic construct
  source 1..2787: mol_type = other DNA; note = Synthetic coding sequence
atgaacgaggctatggccactgattcccccaggcgccctagcaggtgcaccgggggggtcgttgtgcgcccacaggctgtaaccgagcaatcatacatggaatctgtagtcaccttcttgcaggacgtggtgccccaggcatattctggtactcccctgacagaagagaaagaaaaaatcgtgtgggtgagatttgagaatgctgatctcaatgacaccagccggaacctagagttccacgagattcactcaaccggcaacgagccaccactactgattatgatcggctactcagatgggatgcaggtgtggagtattccaataagcggcgaggctcaagagcttttctctgtgcgccatggccctatcagagccgcccggatcctcccggcgccccagttcggagcacaaaaatgcgataattttgccgagaaacggccacttctgggcgtttgcaagagtattggcagctcgggtacctccccaccatactgctgtgttgatctctacagtctcaggaccggggagatggtcaagtctatccaatttaagacaccaatttatgatctccactgtaacaaacgtatattagtggttgtgttgcaggagaagatcgctgctttcgactcttgtacgtttacgaagaaattttttgtaacaagttgctatccatgccccggtcctaacatgaaccctattgccctggggtctaggtggctggcttatgcggagaataagttgatcaggtgccaccagtcccggggaggcgcttgtggcgacaatattcagagttatactgctacagtcatcagtgctgctaagactctcaagagcggtttaactatggttggaaaagtggtcacccagcttactggcaccctgccttcaggcgtcactgaggatgatgtagcaattcattcgaactcacgccggtcacccctcgtgcccggcattatcacggtgattgataccgagacggtaggtgaaggccaggtgctggtcagcgaggattccgacagtgatgggattgtcgcgcactttcccgcacatgaaaagccggtgtgctgcatggcttttaatacgtccgggatgctgctggtcactaccgacacattggggcacgacttccacgtgttccagatactgacacacccctggagctcctctcagtgcgcggtgcaccacctgtatacccttcatcgaggtgagacagaagccaaggttcaagacatctgcttcagccacgactgccgatgggtggtggtgtctacacttcgaggcacatcacacgtgtttcccattaatccctacggcggtcaaccttgtgtccgcacccatatgtcccctcgcgttgtcaaccgcatgtcgagatttcagaagagtgccggcctggaggagattgaacaggagctgacttctaagcaaggcggccgttgtagccccgttcccgggctttcaagctcaccaagtggttcaccgctgcacgggaaactgaactcccaggactcttataacaacttcaccaataacaatccaggaaatccccgccttagccccctaccttctctcatggtggtcatgccccttgctcagatcaaacagccaatgaccctgggcaccatcaccaagcgcacaggaccatacttatttggagcaggctgtttttccattaaagctccctgcaaagtaaaaccaccaccacagattagtccttctaaatccatgggtggcgagttttgtgtggctgctattttcgggaccagtcgaagctggtttgccaacaacgcaggactaaaacgtgaaaaggaccagtctaagcaggtggtggtcgagagtctctacatcattagttgttatggtactctggttgagcacatgatggaaccgcggcctctgagtacagctcccaagatttccgatgatacgcctttggaaatgatgacctcccctagagcgagttggaccctggtccggactccccagtggaacgagctacaaccgcccttcaacgccaatcacccgctgctcctcgccgctgacgccgtacagtactatcaattcctcttagcaggactagtccctcccggatccccaggccccatcacacgacacggctcatatgacagtctggcatctgaccacagtggacaggaggacgaagagtggctgtcacaggtcgaaatcgttactcacacaggtccgcacaggagactttggatggggccgcagttccagttcaaaaccattcacccgtccgggcagacgacagtgatctcctcgtcttcctccgttctgcagtcccatggcccttcagacacacctcagcctctcctggactttgacactgacgacctcgatttgaattcattgcggattcagcccgtccggagtgacccagtctcgatgcctgggtctagccggcccgtgagcgatcgtcggggtgtgagcactgtgattgatgcagcgtcgggcacatttgatcgctctgtgacactgcttgaggtttgcggaagctggccagaggggttcggtttgagacatatgtcttccatggaacatacagaggagggactcagagaacgcctcgcagacgctatggcagagagccccagcagagatgttgtcggttctggaacggaattacagcgggagggctctatagagactctcagcaatagcagtggttcaacctccggcagcataccacgaaacttcgacggttaccgtagccctctgccgaccaatgagtcccagcccttaagcctctttcccaccgggttcccttag

SEQ ID NO: 15765 - DNA, 501 bp, synthetic construct
  source 1..501: mol_type = other DNA; note = Synthetic coding sequence
atggtgaacagctgctgtggcagtgtgtgttctgatcagggatgtggactggaaaattgttgtagacctagctactgccagactacttgctgtcgtacgacgtgctgcagacccagctgctgcgtttcaagttgctgtaggccacagtgctgccaaactacctgttgccggacgacatgctgccacccatcatgctgcgtgtcaagctgttgtagaccgcagtgctgtcagtcggtgtgctgtcagccaacctgttgtcgtccccagtgttgccagaccacctgctgtcggactacttgttgtcggccttcttgttgtagaccccagtgctgtcaaagtgtgtgttgtcagcccacatgttgttgccctagttactgcgtgtcttcctgttgtcgacctcagtgctgtcagacaacatgctgccgaaccacatgttgccggccatcttgctgtgtgagcaggtgctacaggcctcactgcggacagtctctgtgttgctag

SEQ ID NO: 15766 - DNA, 1104 bp, synthetic construct
  source 1..1104: mol_type = other DNA; note = Synthetic coding sequence
atggacgacgctgctgtgcttaagcgccggggatacttgttgggaattaacttgggcgagggcagttacgctaaagtgaaatccgcttacagtgaaagactaaaatttaacgttgcaatcaaaatcatagatcggaaaaaagccccggctgacttcctggagaagttcctccccagagagattgagattcttgcgatgctgaatcattgctctattataaaaacttacgagatctttgagacatcgcacggaaaggtgtacattgtcatggagctggccgttcagggcgatcttctggaactcatcaagaccaggggtgcactgcatgaggacgaggcccgtaagaagtttcaccagctgtctctggccatcaaatactgccacgaccttgatgtcgtgcaccgagatctgaagtgcgataacctcctgctcgacaaggatttcaatatcaagctttccgatttctccttcagcaaaaggtgcttgagggatgattcaggacgtatggcattatcaaagactttttgcgggagcccagcttatgcagcccccgaagtgttacagggcatcccctatcagccaaaagtctatgacatttggtcattaggcgttatactgtatatcatggtgtgtggatctatgccatacgacgactccaatatcaagaagatgttgcgcatccagaaagaacatcgggtgaacttcccacggagcaagcatcttactggggaatgcaaagatttgatttaccatatgctccagcctgacgttaatcgccggctccatatagatgaaatcctgtcccactgctggatgcaacccaaagcacgtgggtccccctccgtggcgattaataaggaaggagagagctcacgcggtactgagcctctgtggacacctgagcccggctccgataagaagagtgcaactaaactggagcctgagggggaagcacagccccaggctcagccagaaacaaaacccgaaggtacagctatgcaaatgtctcgccagtccgaaatcctaggattcccttcaaagccctctaccatggaaacagaggagggtccacctcagcagccaccagaaactagagcacagtag

SEQ ID NO: 15767 - DNA, 273 bp, synthetic construct
  source 1..273: mol_type = other DNA; note = Synthetic coding sequence
atgtcccattacggcagttactatgggggcttaggctacagctgcgggggcttcggagggctgggctacggttatggctgcggctgcggctctttctgcagaaggggcagcggttgtggctacgggggttacggatatgggtcaggctttggaagttacggctacggttccggctttgggggatacggatacggatcaggatttggcggttacgggtacggttgctgtcgtccctcctataacggcggctatggtttctcaggcttttattag

SEQ ID NO: 15768 - DNA, 519 bp, synthetic construct
  source 1..519: mol_type = other DNA; note = Synthetic coding sequence
atgtcttataactgctgttctagaaatttctcatcttgttcacatggaggttatttacattatcccggcagctcctgcggatcgtcctatcccagtaacctggtgtacagcacagatctctgcagtccgtcaacttgccagcttggatcctccctctacaggggctgccaggagacctgctggcgtcctaactcttgccagacactatgcgtggagagtagtccctgtcacacttcctgctactacccgagaacccacatgctctgtaacagttgcctcaccatgcatgtgggatcaagggggtttggaagcaactcttgctgtagtttatcatgcggttccaggagctgcagtagcctaggttgtggctccaacggcttccgttatcttaactatcgaatacatacctctccctctcagagctaccggagcagattctgtcatcccatttattttcctcctagaaggtggtttcattcatcctgctaccagccattctgccgcagcgggttttactag

SEQ ID NO: 15769 - DNA, 1554 bp, synthetic construct
  source 1..1554: mol_type = other DNA; note = Synthetic coding sequence
atgagtggctcctgtagcagtcgtaagtgttttagcgtacccgctacgtccctctgcagcactgaagtgtcttgtggcgggcccatttgcctgcccagcagctgtcagagccaaacttggcaactggtgacttgtcaggactcttgcggctcctcctcatgcggaccccagtgtcgtcaacccagctgtccagtgtcgtcatgcgcccagcccctatgctgcgatcctgtaatttgcgagcctagctgcagtgtgagcagcggctgtcagcctgtctgttgtgaagccacaacctgcgaaccctcttgcagtgttagcaactgttaccagcccgtttgtttcgaggcgacgatatgtgaaccatcttgtagtgtgagcaactgttgtcagccggtgtgctttgaggccactgtgtgtgagccttcctgctcagtgagcagttgtgcccaacccgtttgttgcgaaccagccatatgtgaaccatcatgttccgtcagttcctgctgtcaacctgtcggcagcgaggccaccagttgtcagcccgtcctctgcgtaccaacttcctgtcagccagtactctgcaagtctagctgttgccagcctgttgtgtgcgaaccatcttgctgttctgccgtgtgtaccctgccatcatcatgccaaccggtggtgtgtgagcccagctgttgccagcctgtctgtcccacacccacttgtagcgtcacatcctcttgccaggcagtgtgctgtgacccatccccgtgcgaaccgagctgctccgaaagctccatctgccagccggccacttgcgttgccctggtgtgcgaacccgtgtgcttaagacccgtgtgttgcgtgcagtctagctgtgagcctccctcagtgccgtcaacttgtcaggagccgtcttgctgtgtgtcctctatttgccagccaatctgcagcgaaccaagcccctgctctcccgctgtgtgcgttagctccccttgccaacccacttgttacgttgtgaaaaggtgcccctcagtttgccccgagccggtttcctgccccagcacctcttgccgtcctttgtcttgctctcccggatcaagtgcgtctgcaatctgtcggcctacctgtcctaggactttttacattccctcctcaagcaaacgtccgtgctccgctaccatctcttatcggccagtatcaaggccaatctgtcggccaatatgctccggactattgacctatcggcagccttatatgacatccatttcataccgtcccgcctgttatcggccctgctactctatcctgaggcgacctgcttgcgttacaagttattcgtgtcgcccagtctatttccgaccctcatgtaccgaatcagactcctgcaaacgggactgtaaaaagagtaccagttcgcagctggattgtgtagacactacgccttgcaaggtggatgtgagcgaggaagccccttgccagcccactgaggcaaagccgatttcccccaccacacgagaggcggctgccgctcagcccgcagcctcaaaacccgccaattgttag

SEQ ID NO: 15770 - DNA, 1026 bp, synthetic construct
  source 1..1026: mol_type = other DNA; note = Synthetic coding sequence
atggcagatggttgctgtcctgggaacaccaccgcaatccctgctgttcctactatcactacctatcctgtcaaaggaggcttcagacatgctctctgcctccctagttcctgccattcaaggatgtggcagcttgttacctgtcaggagagttgtcagccatcaataggagcccccagtgggtgcgacccagccagttgccagcccacgcgcctccctgccacatcctgtgtgggctttgtttgtcagcctatgtgttcacacgctgcctgttaccagtcaggaaccggccagtcgccttgccttgtttcctcctgtcagccatcctgctctgagtctacttgttgtcaagaaaaatgttgcgacgccagcccttgccaacaaagctcctgccaggagtcagtgtgtatgtctggaagttgtcaggccgcatgcggacaaagcgtgtgttgcgatgctggaagttgtcaaccaagttgttccgaagtgaccagttgccccgaaacctcatgcctgcccactatatgcaccgcctccccatgccagcccacttggtgtcagggaagcagttgtcaacctgtgagtggggaaggacaaccctgcaagtccacgtattatcagcccatctgctatatctttaagccatgccagtcagcactgtatatgcccgtgccctgtcaaccttccacctgtgtcttcagctcatgcaatacaacctgctgtgttccatctcactgccaacctccccactgtcaattggttccgagtacatgcttcatttatcaacccgtggctaattgtcaggcaccatgctctacaaagaattgttgtaaacctgcttcctgcgacactgtaatctccggccagccaacatgtgacggaccccctagctacaatcagagcggctgtaagtccgcatgctgcgtcacgggattgggcactagtccctcatccgggagcaactgtttgccaacctcctgccagccgtcatgtgagagttctttttgtaaggccaccctgtgttag

SEQ ID NO: 15771 - DNA, 588 bp, synthetic construct
  source 1..588: mol_type = other DNA; note = Synthetic coding sequence
atggtaagctcatgctgcgggtctgtatgttcggatcagagctgtggccagggcttgggccaggaatcctgctgtaggccttcatgttgccagactacatgctgtaggactacttgctgccggccttcttgttgtatatcctcatgctgcagaccaagttgttgcatcagttcctgttgcaaaccatcctgttgtcggactacatgctgccgcccaagctgctgcatttcatcttgctgccgcccatcctgttgtatttccagctgctgtaagccttcctgttgtagaactacgtgttgtagaccttcatgctgcatcagctcctgctgcaggccaagctgctgcataagtagttgctgcaaaccaagttgctgccaaacgacttgctgtaggccaagttgctgcatttcttcatgctatcgcccccaatgctgccaaccctcctgctgccggcccgcttgctgcataagctcgtgctgccacccgtcctgctgcgtcagcagttgtaggtgtcctttctcatgtcctactacttgttgcaggactacttgcttccaccccatttgctgcggatcctcgtgctgctag

SEQ ID NO: 15772 - DNA, 588 bp, synthetic construct
  source 1..588: mol_type = other DNA; note = Synthetic coding sequence
atggtgaactcctgttgcggttcagtctgcagtcaccagggatgcggacgggatctgtgccaggagacatgctgccgcccctcgtgttgcgagacaacttgttgtcgcacaacttattgtagaccctcttgctgtgtctcttcatgctgccgacctcagtgttgccaatcagtgtgttgtcagcccacctgttgcagacctcgttgttgcatctcatcatgttgccgcccaagctgctgcgtgtctagctgctgtaagccccagtgctgccagtcaatgtgctgtcagccgacatgttgccgccctagatgttgtataagcagctgctgtcggccatcttgctgcgtaagctcctgctgccgacctcagtgttgtcagtccgtgtgttgccagcctacctgctgccatccctcatgtagcatatcgtcgtgctgccgcccatcttgctgtgaatccagctgctgccggccctgctgctgcctgcggccagtgtgtggcagggtctcttgccacactacatgttatcgaccaacgtgtgtgatcagctcgtgtcctcgccctctctgctgtgcaagtagctgctgttag

SEQ ID NO: 15773 - DNA, 633 bp, synthetic construct
  source 1..633: mol_type = other DNA; note = Synthetic coding sequence
atggtctcttcttgttgtggcagcgtatgttctgatcaaggatgtgggcaagatctgtgccaggagacatgctgtcgtccatcatgctgtgagacgacatgttgccgcactacgtgctgccgcccttcctgttgcgtgagcagttgctgtagaccacagtgctgccagtcagtgtgttgccagccaacctgctcaagacctagttgttgccagacaacatgctgccgaaccacttgctacagaccctcctgttgtgtttcgtcttgttgtaggccacaatgttgtcagccagcatgttgccagcccacctgttgccggccctcctgctgtgagaccacatgttgtcacccgaggtgctgtatcagctcctgctgcaggcctagctgttgtgttagctcatgttgcaagccacagtgctgtcagtctgtctgctgccagccgaactgttgccggccaagctgcagcatctcgtcatgttgccggccatcatgctgtgaaagcagttgttgtaggccgtgctgttgtgttcggccggtgtgtggcagggtttcctgccacacgacatgctataggcccacctgtgtcatcagctcctgcccccggcctctgtgttgtgcaagctcctgctgctag

SEQ ID NO: 15774 - DNA, 387 bp, synthetic construct
  source 1..387: mol_type = other DNA; note = Synthetic coding sequence
atgacagggagttgttgtggttcaacactgagctcactttcatacggggggggctgctgtcagccatgttgttgcagagatccttgttgttgccggccagtgacttgccaaacgacagtgtgcagacctgtgacctgcgtcccacgatgcacccggcctatttgtgaaccatgtcgacgccctgtctgttgtgacccctgttccttacaggaaggatgctgcagaccaataacttgctgtccgtcctcatgcaccgccgttgtttgtcgtccctgttgctgggccaccacgtgttgccagcctgtttccgttcagagcccctgctgtcgtcctccctgcggacagcctaccccttgcagtacaacatgccggacatctagttgttag

SEQ ID NO: 15775 - DNA, 387 bp, synthetic construct
  source 1..387: mol_type = other DNA; note = Synthetic coding sequence
atgaccgggagctgctgtgggagcactttttcgtccctgagctacggaggcgggtgctgccagccatgttgctgcagggatccttgctgttgtcgcccagtgacctgccagaccactgtctgtcgccctgtgacatgtgttcctcgctgtacgagacccatctgcgaaccttgccggcggcctgtatgctgtgacccatgtagcctgcaggagggttgctgccgtccaattacatgctgtcctagtagctgcaccgccgtcgtctgccgcccatgttgctgggccacgacgtgttgccagccagtttccgtacaaagtccatgttgcagacctccatgcgggcagcccaccccctgctccacaacctgcaggacaagctcttgctag

SEQ ID NO: 15776 - DNA, 297 bp, synthetic construct
  source 1..297: mol_type = other DNA; note = Synthetic coding sequence
atggactgctgcgcctcccggggatgcagcgtacccacagggccggccacaaccatctgctcatcagacaagtcatgccggtgtggcgtctgcctgcctagcacatgtccccataccgtgtggctactcgagcccacctgttgcgacaattgtccaccaccatgccacatcccgcaaccatgcgtgccaacatgcttccttttgaacagttgtcagcccacacctggactagagactctcaatctgactacttttactcaaccctgttgcgaaccatgcttgcccagaggttgttag

SEQ ID NO: 15777 - DNA, 297 bp, synthetic construct
  source 1..297: mol_type = other DNA; note = Synthetic coding sequence
atggactgctgtgcgagtcggtcctgcagtgtgcccaccggacccgcaacgaccatctgttcaagcgacaaatcttgccgctgcggggtgtgtttgccctctacatgcccccatacagtttggctgcttgagccgatctgctgcgacaattgtcctccaccctgccacatcccacagccatgcgttccaacgtgttttttgctgaatagctgccagccaactcccgggctggagacactgaatctgaccactttcacacagccctgctgtgaaccctgccttcccagaggctgctag

SEQ ID NO: 15778 - DNA, 297 bp, synthetic construct
  source 1..297: mol_type = other DNA; note = Synthetic coding sequence
atgtactgttgcgccctgcggtcttgcagtgtacccacggggcctgcaaccaccttttgctcctttgataagagttgccgctgcggcgtatgcttgccttccacgtgtcctcatgaaatcagcctattgcagcctatttgctgcgacacttgtcctccaccgtgttgtaagcccgatacttatgtgccgacttgctggctgttgaataattgccaccctacacccggcctgtctggaataaatttgacaacatatgtgcagcccggttgtgagagtccctgtgaaccaagatgctag

SEQ ID NO: 15779 - DNA, 291 bp, synthetic construct
  source 1..291: mol_type = other DNA; note = Synthetic coding sequence
atgtgccacacttcttgctcttctgggtgccagcctgcctgctgcgcccctagcccatgtcaggcctcgtgctacatcccggtggggtgccagtcttcagtttgtgtacctgtgtcctttaagcccgccgtttgcgtgccagttaggtgccagagctccgtgtgtgtacctgtgtcatgtcgtccagtggtgtacgctgctccatcatgccagagttctggctgctgtcaacccagctgtacatcagtgctgtgtagacctatttcatgttctacacctagctgttgctag

SEQ ID NO: 15780 - DNA, 339 bp, synthetic construct
  source 1..339: mol_type = other DNA; note = Synthetic coding sequence
atgtgccacacctctcacagttctgggtgtccaatggcgtgccccggatccccatgctgcgtcccatctacatgctatccgcctgaggggtacggaacatcatgctgctgctcagctccgtgcgtcgcgttattgtgcaggcccctatgcggcgtctccacctgctgtcagccagcttgttgtgtcccatcgccatgccaggtggcatgctgcgtgccagtatcatgtaaacccgtgttgtgtgtggcatcattctgtcccacgagcggatgctgtcaaccgttctgccctaccctggtttatcgaccagtcacgtggagtacccccactgggtgctag

SEQ ID NO: 15781 - DNA, 666 bp, synthetic construct
  source 1..666: mol_type = other DNA; note = Synthetic coding sequence
atggcaacatccaccatgtccgtatgctcttcggcatattccgactcatggcaagttgatgcatgtcctgagagctgttgcgagcccccctgttgtgcaacgtcctgttgtgcacccgctccgtgcctgacgctcgtttgcaccccagtgtcatgcgttagcagtccatgctgccaggccgcatgtgaaccatcgccttgtcaatcgggctgcacaagctcttgtacccccagctgttgccagcagagcagctgtcagccggcatgctgtacatcatctccctgtcagcaggcttgttgcgttccggtgtgttgcaaacctgtgtgctgtgtacctgtctgctgcaagccggtctgttgtaaacccatctgttgcgtgcctgtttgttccggggcctcgagttcctgctgtcagcagagttctaggcagcccgcctgctgcaccacatcttgctgtcgcccatcctcttccgtgtctcttctctgtcgtccagtttgtcggtcgacttgttgcgttcccattccctcttgttgcgcgccagctagcacatgccaaccatcatgctgtcggcccgcttcttgcgtctcactcctttgtaggcccacttgcagccggctcagctctgcgtgctgtggcctgagttccggacagaaatcctcctgttag

SEQ ID NO: 15782 - DNA, 768 bp, synthetic construct
  source 1..768: mol_type = other DNA; note = Synthetic coding sequence
atggctgctagcacgatgagtatctgctcttctgcatgcactaactcctggcaagtggacgactgccccgaatcctgctgtgagctgccatgtgggacgccatcttgctgcgcccccgccccctgtttgacattggtgtgtacacctgtgtcatgtgtctccagcccttgttgtcaagccgcgtgtgaaccctcggcctgccagtccgggtgtaccagcagttgcactccgtcctgctgccaacagagcagttgtcaaccagcttgctgtacgtcatcgccttgtcaacaggcctgctgcgttcctgtctgttgtaaacccgtgtgttgtgtccccgtttgttgcggcgcaagttcttgttgccagcagtcttcctgtcaacccgcatgttgtgcctccagtagttgtcagcagagttgcagagttcctgtgtgttgcaaagcagtgtgttgtgtgcctacttgttctgaatctagtagctcctgctgtcaacagtcctcatgccaaccagcgtgttgcacctcttcaccatgtcagcagtcatgctgcgtttctgtctgctgcaaacccgtatgctgtaagagcatatgttgcgttccagtctgctctggtgcctcatccccttgctgccaacagagctcgtgccaacccgcatgttgtacttcctcttgctgtcgtccgagttcttctgtcagtctcctctgtcgtcccgtctgttctagaccagcaagctgctcattctcttccgggcagaagtcatcgtgttag

SEQ ID NO: 15783 - DNA, 312 bp, synthetic construct
  source 1..312: mol_type = other DNA; note = Synthetic coding sequence
atgtgtgggtcgtactaccgcaattacaatggagggcacggctacggttgttgtggctacgggggcctgggttgcggctacggcggttgtggttacggatgctgcgggtatggaggacttggcttcggctacgggggtttggactgtggatacggtggcctgggttgtggctacggtagtttctgtgggtgtggttatcggggactggattgcggatatgggtgcgggtacggatatgttagtcacagcttctgcggatgtggctacagatgcggatcgggatacggaagctcctttggctactactactag

SEQ ID NO: 15784 - DNA, 3117 bp, synthetic construct
  source 1..3117: mol_type = other DNA; note = Synthetic coding sequence
atggttagctccgcccagatggggttcaatttacaggccctcctcgagcagctgagccaagatgagctgtcaaagtttaaatacctcataaccaccttctctctcgctcacgaactgcagaagatcccacataaagaggtggacaaggctgacggaaagcagcttgtcgagattctgaccacccattgcgactcctactgggtcgaaatggcgagtttacaggtgtttgaaaagatgcacaggatggacctgtcagaaagagcgaaggacgaggtccgagaggcagcattaaaatctttcaacaagcgcaagccactgtccctcgcattcaccgaaacaaaagggaacgtaatatgcttggggaaagaagtcttcaaggggaagaagccagacaaagacaataggtgccggtacatcttaaaaacaaaattccgagaaatgtggaagtcgtggcctggagacagcaaagaagtgcaggtgatggctgaacgctacaagatgctgatcccattttccaacccccgtgtgctgcccggacctttttcctatacggtcgttttgtatggccccgctgggttggggaagaccacactggcgcaaaagctcatgctggactgggcagaagataaccttattcacaaattcaaatacgctttctatctgagttgccgcgaactctcaaggttggggccgtgcagttttgctgagctggtgtttagggactggccagaactccaagatgatatccctcatattttggcccaggcccgcaagatcctctttgtgatcgacggttttgatgagcttggcgccgctccaggagccttgattgaggacatttgcggcgactgggagaagaagaaacctgtgccagtgctcctcggctcacttctcaatcgggtcatgctgccaaaagccgcccttcttgtaaccacgcgcccacgagccctgagggatcttcgaatcctcgcagaggaaccaatctatataagggtagagggatttctcgaggaggacagacgggcttatttcctccggcactttggagatgaggaccaggcaatgagggctttcgagttgatgaggtctaacgcggcacttttccagttagggtcagctcctgccgtgtgttggatcgtctgcactacactcaagctgcagatggagaagggagaggatcctgtgcctacctgtctgacccggaccggtctattcttgcgattcttatgttcaaggtttccacaaggggctcagttgcgaggggcgttgagaactctgtcgctcctcgcagcccagggactctgggctcagacaagcgtgttgcaccgcgaggatctcgaaagattgggcgtgcaggaatccgatcttaggctgtttttagatggtgacatcctgagacaggaccgggtgtcaaaaggttgctacagctttatccacctcagcttccaacagtttctgactgcactgttctacacgctcgaaaaagaagaggaggaggaccgagacgggcatacttgggacattggggatgtacaaaaactgttgagtggcgtggagaggctgcgaaaccccgatctgatacaagccggatactacagcttcggactcgctaatgagaagcgggcaaaagagctggaagcaacattcggctgtagaatgagcccggacataaaacaggaattgttgcgctgtgatataagctgtaaaggaggccactctacggtgactgatctccaggagctacttggttgtctgtatgagagccaggaggaagagttggtgaaagaggtgatggctcagtttaaagagatttcactgcatcttaatgctgtggatgtggtgccaagttctttttgtgtcaagcactgccgaaatctacagaaaatgtccctccaggtcatcaaggaaaatttgccagaaaacgtcaccgcttctgagagcgatgccgaggtcgagagaagccaggacgatcaacacatgcttccgttctggaccgacctctgtagtatttttggcagcaataaagatctgatgggcctagctattaacgactcattcctgtccgcttctcttgtccggattctgtgtgaacaaatcgctagcgacacttgtcaccttcagcgggtggtcttcaagaacatatcacccgccgacgcccatcgtaatctgtgccttgctttgaggggccataagactgtcacgtacttaactcttcaggggaatgaccaggacgacatgtttccagctctgtgtgaggtcttgaggcaccccgagtgtaacttacgttaccttggcctggtgagctgctccgcaacaacgcagcagtgggctgatttgtcgctcgccctggaggtgaaccagagcctgacgtgcgttaacctgtcagacaacgagctcctcgatgaaggagccaagctgctctataccacattgcgacatcctaagtgttttctacaaagactgtccctagaaaactgccacttaacggaagccaactgcaaagatctggctgccgtcctcgtggtttcccgcgaattgacgcacctttgtctggcaaagaaccccattggtaacacaggggtaaaattcctatgtgaagggctgaggtacccagagtgcaagctgcaaacgctggtcctgtggaactgcgacatcacctccgatggttgttgcgacctgactaagcttttacaagagaagagctccttactgtgtttagacctgggtctgaatcatattggcgtgaaagggatgaagtttttgtgcgaggctcttaggaaacccctctgtaatttgcgctgcctgtggctctggggctgttccatccccccatttagttgtgaggatttatgtagcgctttatcctgtaaccagtcacttgtgacattggatctggggcagaaccctctcgggtcttccggcgtaaaaatgttattcgaaacactgacctgtagtagcgggacgctgcgcacgctgaggctgaagatagatgactttaatgacgaattgaataagttactggaggagatcgaggagaagaatccgcaacttattattgacactgagaagcaccatccatgggccgaacgtccaagctctcatgacttcatgatttag

SEQ ID NO: 15785 - DNA, 762 bp, synthetic construct
  source 1..762: mol_type = other DNA; note = Synthetic coding sequence
atggagctggaacagcgcgaagggacaatggccgccgttgggtttgaggaatttagtgctcccccgggctctgaacttgctttgcccccactgttcggaggacacatcctggaatccgagctcgagacggaagttgagtttgtgtctggcggactgggcgggagtggacttagagagcgagatgaggaagaggaggctgcgcgcggcagaagacggagacaaagggagttgaaccggcggaagtaccaggccttagggcggcgctgtagggagatcgaacaggtgaatgagcgcgtgttgaatcggctgcatcaggtacagcggatcacacgaaggttgcagcaggaaaggaggttcctgatgcgagtgcttgacagctacggagacgactaccgagcaagtcagttcacgatcgttctggaggatgagggctcccagggcacggacgcaccgacgcccggcaatgccgagaatgagcccccagagaaggagaccctgagccctccccgccgcacgcctgcaccaccggaacctggcagtccagcacccggagagggaccatctggacgaaagcggaggagggtgccccgcgatggaaggcgggccggcaatgctttgaccccagagctcgcacccgttcagatcaaagtcgaggaagacttcggattcgaggccgacgaagcattggactcaagctgggtgagccgtggtccggacaaattattgccataccccacactggcttctcctgctagcgattag

SEQ ID NO: 15786 - DNA, 2679 bp, synthetic construct
  source 1..2679: mol_type = other DNA; note = Synthetic coding sequence
atgctgcggactgccggccgcgacggactgtgtcgattgtccacttatctggaggagttggaagccgtcgagctgaagaagtttaagctctatcttggtactgctactgaacttggcgaagggaagattccgtggggaagcatggaaaaagccggccctctcgaaatggcacagctcctgatcactcacttcggccccgaagaggcatggcggttggcactgtctacatttgagaggattaaccgcaaggatctctgggagcgcggtcagcgagaggatctcgtccgggatacgccaccaggcggcccttcgtctttgggaaaccagagcacttgcctgctggaggtttctcttgtgacaccccgtaaagacccgcaggaaacctacagggactatgttaggagaaagttccggctaatggaggacagaaatgccaggttaggcgagtgcgtaaacctcagccatcgatacacccgactcctgctggtgaaggagcatagcaacccaatgcaggttcaacagcagctgctggataccggacgcggacacgccaggaccgtgggacaccaggcctccccaataaaaattgagactctcttcgagcccgatgaagagaggcctgagcctccaagaacagtggtcatgcaaggagccgcaggcatcggcaaaagcatgctcgcacataaggtcatgcttgattgggctgacggcaagttgttccagggccgcttcgattatttgttctatattaattgcagggagatgaatcagtctgcgaccgagtgtagtatgcaggatctcattttctcatgctggcccgagccctctgctcctctgcaggaactgatccgcgttcccgaaaggttactgttcattattgatggctttgatgagctgaaaccctccttccatgatccccagggcccatggtgtctgtgttgggaggaaaaaaggccaactgaacttctgctgaatagcctgatcaggaagaagctcctgcccgaactgtcactacttattactacacgacccacagcgctggagaagcttcacagacttctggaacatccacgccacgtcgagatcttagggttctctgaagcagagcggaaagagtacttttataagtatttccataatgccgagcaagccggccaggtgttcaattacgtgcgtgacaatgagccactatttactatgtgttttgttcctttggtctgctgggtggtttgtacttgcctccaacagcaactagaaggaggcggcttgctgaggcaaacgtctcgaaccactaccgccgtctacatgctgtacttattgagccttatgcagccaaagccgggtgcaccacgcctgcagcctccccctaaccaacggggactctgcagccttgccgctgacggtctgtggaatcagaagattctgtttgaagagcaagatctgagaaaacacggcttggatggtgaggatgtgtccgccttcttaaatatgaatatattccagaaagatatcaactgtgagagatattacagttttatccatctctcttttcaggaatttttcgcagcgatgtattacatattggatgagggcgagggcggagccggccccgatcaagacgtgacacgcctgctgactgagtacgccttttccgagcggtcttttcttgctttgacgtctagattcctattcggactgttaaacgaggagactaggtcacacctcgaaaaatcactgtgctggaaagtaagtccccacatcaagatggatcttctgcaatggatacaatctaaggctcagtctgacgggtccaccctgcagcaagggagtttggagtttttcagctgcctctacgagatccaggaagaggagttcatccagcaagcactgtctcatttccaggtgatcgttgtatcaaatattgccagcaaaatggaacatatggtgtcctctttctgtttgaaacgttgtcggtccgcacaggtgctgcacctctacggcgccacttactctgccgacggcgaggatcgcgcacgctgctcggccggggcccacaccttattggttcagctgagaccagagagaactgttctgctggatgcttactctgaacacctcgcagcggccctgtgtacaaatcctaacctgatcgaactcagcctgtacaggaacgctctcggctccagaggcgtgaaactactctgccaggggctgcgacatccgaattgcaaactgcagaacctgcgactgaagagatgtagaatttcatcaagtgcctgcgaagacctctctgcggcactcattgcaaataagaacctcacgaggatggatctcagcggcaatggagtggggtttcccggaatgatgctgctgtgtgaggggcttaggcaccctcagtgcaggctacagatgatccagctgaggaagtgtcaattggagtccggagcgtgtcaggaaatggcctccgtcttagggaccaaccctcacctcgtggagttagatctgactggtaatgcccttgaagacttgggattgagactgttgtgtcagggtctgcgccacccggtgtgccgcctgcggactctctggtggctgttcgggatggacttaaataaaatgacacactctcgacttgccgcgctccgggtcaccaagccatatctggatattggctgctag

SEQ ID NO: 15787 - DNA, 3189 bp, synthetic construct
  source 1..3189: mol_type = other DNA; note = Synthetic coding sequence
atgttacgcacagctgggagggatggtctgtgtcgactgtccacctatctggaagaattagaagctgtggaattgaagaaattcaagctctacctgggtaccgccacagagctgggagaaggcaaaatcccctggggctctatggagaaagcaggccccctggaaatggcacaactattgatcactcatttcggccctgaggaagcgtggcggctcgcgctttcaactttcgagcgaatcaatcgcaaagacctgtgggaacgcgggcaaagggaggatttggtgagagataccccacctgggggccctagctcccttgggaaccaaagtacttgtctgcttgaggtatccctggttactccacgtaaggatcctcaggagacatacagagattatgttcgcaggaagttccgactaatggaggacaggaatgcgcggctaggagaatgcgtgaatctttcccataggtatacacgactgcttctcgttaaagaacatagcaaccccatgcaggttcagcagcagctgcttgacaccggtcggggtcatgcccgaacggtcgggcaccaggcctcacccattaaaattgaaacgctgtttgagccagacgaagaacggcctgagcctccaagaaccgtggtgatgcagggagcagccggaatcggcaaaagcatgctggctcacaaggtgatgctggactgggccgatggtaagttgttccagggtcgcttcgattatctcttttacatcaactgtcgagagatgaatcagagcgctacagaatgctctatgcaggacctcatcttcagttgttggcctgagccatcagcacctcttcaagaactgatccgcgtacctgagcgcctgctcttcatcattgatggcttcgacgagctcaaaccctcatttcacgacccccagggtccctggtgcctgtgctgggaggaaaaacgcccaactgagctcctactaaactcactgattagaaagaagctgctccccgagctctctttgctgatcacaacacggccaacagcccttgagaagctccacagactgctggagcatccgcgccatgttgagattctcggtttttcagaagctgaacggaaggagtatttctacaaatacttccacaacgcagaacaggctggacaggtgttcaactacgttcgggacaacgagcctctgtttaccatgtgtttcgtgccactggtgtgctgggtggtgtgcacatgcctccagcagcagcttgagggtggagggctgctgcgccaaacatcccgcaccactactgctgtatatatgttatatttgttatctttaatgcagccaaaacccggagcgcctcgcctgcagcctccacccaaccagcgcggcctgtgcagcctggcggcagatggtctgtggaaccagaaaatacttttcgaggagcaagatttgaggaaacatggcctcgacggggaagacgtgtctgctttcctcaatatgaatattttccagaaggacatcaattgtgaaaggtattatagttttatccatttatccttccaagaattcttcgctgcgatgtactacatattagatgagggcgagggtggcgccggtccggatcaagatgttaccagactgttgactgagtacgcgtttagcgagcgcagctttctggcgctgacctcccgcttcctgtttgggctactgaatgaggagactcggtcccatttggagaaatctctatgttggaaggtgagcccccatataaaaatggatctgctgcagtggatccagtcgaaagcacagagcgacggctctaccctgcaacaaggcagtctcgaattcttctcctgtctgtacgaaattcaggaagaagaattcattcagcaggccctgagccatttccaggtaattgtggtctcaaatatcgcaagtaaaatggaacacatggtgtcctctttctgcttaaagcggtgccggagcgcccaggtcctgcatctgtatggggccacgtatagtgccgatggggaagaccgagcccgatgttcagccggtgctcacactctgctggtgcagctgcgaccagagaggaccgttctcctggacgcctactccgaacatctggccgccgcactgtgtaccaaccctaatcttatcgaactttctctgtaccgcaacgccctcggatccaggggggtgaagttgctttgccagggtctgcgacacccgaattgtaaactccaaaaccttcgcctgaagagatgtagaatctcttcatcagcatgcgaggatctaagcgcggcacttatcgccaacaagaatctcacacggatggatttgagtggaaacggcgttggcttccctggcatgatgctgctttgcgagggcttgaggcacccgcagtgtcgtctccagatgatacagctcaggaagtgtcagcttgaatccggcgcgtgccaggaaatggcaagcgtgttgggaacgaatcctcaccttgtggagcttgacctgacaggaaacgccctggaggatctcgggctcagattgttgtgccaggggcttaggcatccggtgtgccgactcagaactctttggctcaaaatctgcaggttaactgcggcagcatgtgatgagctggcaagcactctgagcgtgaatcagtccttgcgcgagctcgatctgagtctcaatgagcttggtgatctgggggtacttctcttgtgcgaaggactgaggcacccaacgtgtaagctccagacactccggcttggcatctgccggctgggatctgccgcatgcgagggattgtctgttgtcttgcaggcaaaccacaacctgcgcgagcttgacttatcctttaatgaccttggagattggggactgtggttactagcagaaggcctacagcatcccgcatgcagacttcaaaagctgtggctggactcctgcggactaaccgcaaaagcctgcgagaacctctattttactctcgggattaaccagacactcacagacttgtatcttacaaacaatgctttgggtgacaccggcgtgagattattgtgtaaacgtctttctcatcccggctgtaaactgcgcgttctctggctgttcggcatggatttgaacaagatgacccacagccgactggccgccctgcgggtgactaagccctatcttgatatcggctgctag

SEQ ID NO: 15788 - DNA, 3015 bp, synthetic construct
  source 1..3015: mol_type = other DNA; note = Synthetic coding sequence
atgctgcggaccgctggacgcgatggactatgtcggttatccacctacttagaagaactcgaagcagtcgagctgaagaaattcaaactgtatctgggtacggccaccgaattaggggaaggcaaaatcccctggggatcaatggagaaagccggccccttggagatggcccagctgttaatcacccattttggccccgaagaagcctggcggctggctctgtcgacctttgaacgcatcaacagaaaagacttgtgggagcgggggcagcgtgaggatctggtgcgcgatacaccccctggggggcctagtagtctcgggaaccagtccacctgtttactggaagtctctctcgtgaccccacgaaaagatccacaggaaacctacagggactacgttcggcgtaaatttaggctgatggaggatcgaaacgcccggctgggcgagtgcgtgaacttgtcccacagatataccaggcttctgctggttaaagaacactccaatccaatgcaagtccagcaacaactcttggatactggacgaggacacgcacggaccgtgggacatcaggccagccccatcaagatcgagacactgtttgaacctgatgaggaacgacccgaaccgcctagaacagtcgtgatgcagggcgccgcagggatcggcaagtcaatgctcgcccacaaggtgatgctggattgggccgacggtaagctgtttcaagggaggtttgattatctgttttatatcaactgccgcgaaatgaaccagtctgccactgaatgctcaatgcaggatctaatttttagctgttggccagaacctagcgccccgctccaggagctgatacgggtgcccgaacgtcttctgttcatcatagacggctttgacgaactaaaaccttcctttcatgatccacaggggccctggtgcctgtgctgggaggagaaacgccctaccgagcttctccttaattctctgatccgcaaaaaactcctgcctgagttatctctgcttatcaccacccggccaaccgccctggaaaagctgcaccgactactggagcatccccgtcatgtggagatccttggtttctccgaagccgagcgtaaggagtacttctacaagtatttccataatgctgagcaggcgggacaggttttcaattatgtccgcgacaacgagccattgtttacgatgtgttttgtgccactggtgtgctgggtagtgtgtacttgcttacaacagcagttggaaggcggaggcctgctgagacagacttctcggactaccaccgcggtttatatgctatatctactatctctcatgcagccgaagcccggagctcctcgcctgcagccaccaccaaaccaacggggactctgcagcctggccgctgacggcctctggaatcagaaaatccttttcgaagagcaggacttgcggaagcacggccttgatggcgaggacgtgtccgccttcctgaatatgaacatcttccagaaagatattaactgtgaacggtactacagcttcatccacctcagcttccaggagtttttcgcagcaatgtattacatcctcgacgagggcgagggcggcgcagggcccgaccaggacgtgacccgactgttaaccgagtatgccttctcagaacgttccttcctggccctgacatccaggttcctattcggtctcctgaatgaggagactaggtctcaccttgagaaaagtctatgctggaaagtgtctccacacatcaaaatggacctgctacagtggatccagtccaaggcacagagtgacgggtctacgttgcagcaggggtctctcgagttcttttcatgcctgtatgagatacaggaggaggagttcattcagcaggctctgagccactttcaagtgatcgttgtaagcaacatagccagtaaaatggagcacatggtttcaagcttttgcctaaagcgatgtcggtcagcccaagtgctccacctgtatggagccacctactccgcagatggcgaggatcgcgctaggtgtagtgcaggtgcccatacgcttctagtccagctgcctgagcgtacagttctgctggatgcttattccgaacacctcgctgcagctttatgtacgaacccgaacctgattgaactaagcctgtatcgcaatgcgctcggcagccgcggggttaagctgctatgtcaggggcttcggcaccctaactgtaagttgcagaatctccgattaaagaggtgccgcattagtagttccgcttgtgaggatctgagcgccgccttgatcgccaacaagaatctgactcgaatggacctatctggaaacggggtggggtttcccggcatgatgttgctgtgcgagggtctcaggcatccccaatgccgcctccagatgatccagctaaggaagtgtcagctcgagtcaggagcttgtcaggaaatggcaagtgtgctgggcacaaatcctcacctcgtggaactggatcttaccgggaacgccctggaggacttaggactgagactactatgtcaaggactcaggcacccagtgtgtcgcttacgaactctctggctgaaaatttgtcggctgactgctgcagcgtgtgatgagctggcttctaccctgtccgtgaatcagtcgctgagagaactggacctgtctctgaacgaactcggcgacctcggggtgctcctgctgtgcgaggggctaagacacccaacctgtaaactccaaactttgcgcctggactcatgcggcttgactgcgaaggcctgcgagaatctatactttacactgggaattaatcagactctgacagacttgtatctgaccaataatgctttaggtgataccggggttagactcctgtgcaagcgattaagtcatcccggttgtaagctgagagtcttgtggctgttcggcatggatctgaataaaatgactcattccaggctggccgcattgagggtgacaaaaccttacctggatatcgggtgctag

SEQ ID NO: 15789 - DNA, 327 bp, synthetic construct
  source 1..327: mol_type = other DNA; note = Synthetic coding sequence
atggcaagcggcaggccagaggagctctgggaggccgtggtcggggcggctgaacgattccgcgcccgtactgggaccgagttggttctgctgaccgctgcccctcctccaccaccaagacctgggccgtgcgcatacgccgctcacggtcgcggggcactcgctgaagcagccaggcgttgcttgcacgacatagccctcgcccaccgcgccgccaccgctgcgcgtccccctgcccccccacctgcccctcaaccgccaagtcccactccctcacccccgagaccaacgctcgcccgtgaagataatgaggaggatgaggactag

SEQ ID NO: 15790 - DNA, 771 bp, synthetic construct
  source 1..771: mol_type = other DNA; note = Synthetic coding sequence
atggcaagtggcaggccagaggagctgtgggaggcagttgtaggggccgccgaacggttcagggccaggaccggaacagaacttgtgctcttaactgctgcccctccaccgcctccacgaccaggcccgtgcgcttatgcggcccatggcaggggtgccctggccgaagccgctcgaaggtgcctgcatgatatcgccttggcacaccgtgctgccaccgctgcacgccccccagcacccccaccagcaccgcagccccctagcccaactccttctcccccgcggccaacactggcgcgcgaagataacgaggaagacgaggatgagcccacagaaaccgaaaccagtggggaacaactcggtatttctgacaacggaggcctgttcgtgatggacgaagatgctacactgcaggacctgccgccattctgtgagagcgatcctgaatccacggacgacggctcactctccgaagagactcccgcgggtccgccaacttgttctgtgccacctgcatccgcactgcctacccagcagtacgctaagtcattacctgtgagcgtacctgtttgggggttcaaggagaaacggacagaagcccggagcagcgatgaggaaaatgggccaccctctagtccggatttagaccggatcgcagcttctatgagggctctcgtcttgcgggaagccgaagatacacaggtcttcggagatctgccgcgcccacgacttaacacctccgatttccagaagctcaagcggaagtattag

SEQ ID NO: 15791 - DNA, 771 bp, synthetic construct
  source 1..771: mol_type = other DNA; note = Synthetic coding sequence
atggcaagtggtaggccggaggaactctgggaagctgtggttggcgccgcagaaaggttccgcgccaggactgggacggaattggtgctgcttacagcagccccccccccccctccccggcccggcccctgtgcctatgcagcccatggacgtggagctcttgctgaggcagctcgtaggtgcctacatgatatcgcgcttgcccaccgggctgccaccgccgctaggccccccgcccccccgcccgctcctcagccacctagtcctacaccaagccctccccgaccgacattggcccgagaagacaacgaagaagacgaagatgagcctacagagacagagacatcaggagaacagctggggatctcagacaacggaggattatttgtaatggacgaggacgctactcttcaggatcttcctccgttttgtgaatctgaccctgaatcaacagacgacggttccctttccgaggagaccccggccggcccacctacctgctccgtgcccccggccagcgccctgcccactcagcagtacgcaaagtcattgcccgtttcagtaccagtgtggggcttcaaagagaagaggactgaggcccggagcagcgacgaggaaaacggcccaccctcatcacctgatctcgaccggatagcggcatctatgcgcgccctggtgttgagggaggccgaagatacacaggtattcggggatctacctcggccccgacttaacacctctgactttcagaagctgaagcgcaaatactag

SEQ ID NO: 15792 - DNA, 771 bp, synthetic construct
  source 1..771: mol_type = other DNA; note = Synthetic coding sequence
atggcctctggcagaccagaagagctgtgggaggcagtggtcggggccgctgagcgttttagagcccggactggcaccgaactcgtgctgctgactgctgctccaccccctcccccgcgacctggcccatgcgcctacgcagcccacggccgcggcgccctagctgaggcagcccggaggtgtctgcacgacatcgcccttgcccaccgcgctgctaccgcagcccgccctcctgctcccccacctgcgccgcagcctccgtctcccacaccgagtccccccagacccacactcgccagggaagacaacgaagaagacgaagatgagcctactgagacagagacctcgggcgagcaactaggcatctctgataatggcggcctgttcgttatggacgaagatgcgacgctccaggatttgcccccgttctgtgagtcggatcccgagagcactgacgatgggtccctttccgaagagactcccgctggaccgccgacatgctccgtgccacccgcaagtgccttgccaacacagcaatacgctaagtccctccctgtctcagtccccgtctgggggttcaaggagaaacgtaccgaggcaaggtcatctgatgaggagaatggtcctccctccagccctgatttagaccgcatagccgcctccatgcgggccttggtactgcgcgaagctgaagatactcaggtgtttggtgatctaccgcgtcctagactgaatactagtgacttccagaagctgaaacgcaagtattag

SEQ ID NO: 15793 - DNA, 771 bp, synthetic construct
  source 1..771: mol_type = other DNA; note = Synthetic coding sequence
atggcttctggcaggccagaagagctatgggaggccgtagtcggagctgccgaaagatttcgagctaggactggcacagaattagtgttgcttacagccgcacccccaccccctccccgaccgggaccatgtgcttacgctgcccatgggcggggggctctcgccgaggccgcccggcgctgcctgcacgatatcgctctggcccatcgtgccgccactgccgcgcgtcccccagctccgcccccagccccacagcctccctccccgaccccaagtcccccacgaccaaccctggcccgcgaggacaatgaggaagatgaagacgaaccaacagagaccgaaacaagcggtgaacaactggggatttcagacaacggcggtctgttcgttatggatgaagatgctacactgcaagatctgcctccgttctgtgagagcgatccggaatctaccgacgacggaagcctgtcagaggagacgccagccggtcctccaacctgtagcgtgccgcctgcttcagctttgccaacccagcaatacgcaaaatccctgcctgttagcgtccccgtgtggggattcaaggagaagcgaactgaggcccggagcagtgacgaggaaaatggacctccaagtagtcctgacttggacaggattgccgcttctatgcgcgctctcgtgctgagggaggcagaggatacccaggtgtttggcgacctgccacgcccccgactgaatacctcagatttccaaaaactgaaaagaaagtactag

SEQ ID NO: 15794 - DNA, 831 bp, synthetic construct
  source 1..831: mol_type = other DNA; note = Synthetic coding sequence
atgagtttcgaaggaggtgacggggctgggcccgccatgcttgcgacaggcacagcccgcatggcttctgggcgccccgaggagttgtgggaagccgttgttggagcggccgagaggtttagggccagaactggaactgaattggtcctactcactgcggcgcccccaccgccaccccggccgggaccttgtgcatatgccgcccacggccgcggtgcgctggctgaggctgccagaaggtgtttgcacgatattgccctcgcccacagggctgctacagccgctcggccgcctgctccccctcctgcacctcaaccccccagcccaacaccaagtcctcctcgccccactctcgcccgagaggataacgaggaggacgaggacgagcccaccgaaactgagacgtcgggtgaacagctcggcataagtgacaacggaggtctgttcgtcatggatgaagacgctacccttcaggaccttcctcccttttgcgaaagcgaccctgaaagtacagatgacggctctctttcagaagagacccccgcgggccctccaacgtgctctgtgccgcctgccagtgccttgcctactcagcagtatgccaagtcccttcccgtgtcagttccagtctgggggtttaaagaaaagcggaccgaggcgaggtccagcgatgaagaaaacgggccgccgtcctcccctgatttagatcgcatcgcagcctctatgcgagctttagttctcagggaagccgaagacacacaggtgttcggggacctgcctagaccccggttgaacacctctgactttcagaagctgaagcggaagtattag

SEQ ID NO: 15795 - DNA, 906 bp, synthetic construct
  source 1..906: mol_type = other DNA; note = Synthetic coding sequence
atgacaaggcacggtaagaactgcacagcaggagccgtttatacatatcacgagaaaaaaaaagacacagcggcgtccggctatggcacacagaatattaggctgtcaagggacgccgtgaaggacttcgactgctgctgtttatccctgcaaccctgccacgatcctgtggtgacccctgacggctacctgtacgaaagagaagcgatcctggagtatattctgcaccagaaaaaagaaatcgcccgtcagatgaaagcatatgaaaaacagcgcgggactcgaagagaagagcaaaaagagctgcagagggctgcctcccaggaccatgtgagaggtttcttagaaaaagaatcagccatcgtaagcagacctcttaacccctttactgcgaaggcgctgtctgggactagccctgatgacgtgcagcccggtccttccgttgggccaccatccaaagacaaagataaagtcctcccatccttctggatcccatcactgaccccagaagccaaggcgactaaacttgagaaacctagccgcacggtcacctgccctatgagcggtaaacccctgcggatgagcgatctcacacccgtccattttacacctctagactcgtccgtggaccgagttggactgataacccggagtgaaagatatgtctgcgcagtgacgcgggacagcctaagtaacgcaacaccatgtgccgtgctgagacctagcggtgccgtggtaactctggaatgcgttgagaagctaatccgcaaggacatggtcgaccccgtcaccggcgataagcttactgaccgtgatatcattgtactgcagcgaggcgggaccggcttcgccgggtccggtgtgaagctgcaggcggagaaatctagaccagtaatgcaggcatag

SEQ ID NO: 15796 - DNA, 612 bp, synthetic construct
  source 1..612: mol_type = other DNA; note = Synthetic coding sequence
atggcggaagtccaggtacttgtgctcgatggccgtggtcacctgctaggccgcctggccgcgatcgtcgcaaagcaggtgctgctggggcgaaaggtcgttgtggtgcgctgtgaaggcataaatattagtggtaacttctatagaaacaaactgaagtacctggcctttctcagaaaacgcatgaataccaacccgtcaaggggaccttatcatttcagggccccatcacgtatcttttggagaaccgttaggggcatgctgccacacaagaccaaacgcggccaggcagccctggataggctgaaagtgttcgacgggattcctcccccatacgataaaaaaaagaggatggtggtgcctgccgccctgaaagtcgtccggctgaaacccactcgcaagttcgcttatttgggtcgcctggcacacgaagtagggtggaagtatcaagcggtgacagccacgctagaggagaagcggaaagaaaaagccaaaattcactaccggaagaagaagcaactgatgcgactgaggaaacaggccgagaaaaacgttgaaaagaaaatcgataagtataccgaggtgttgaaaacccacggtctcctggtctag

SEQ ID NO: 15797 - DNA, 690 bp, synthetic construct
  source 1..690: mol_type = other DNA; note = Synthetic coding sequence
atgacatgctgcagtcaggtgcctccccgcaggcggccttccctcgcactttcccctcggctggactgtaatggcctaaatggcgtgcccggatccatttgggacttcgtgtccggcagcttcagccccagtccaagcccgatcctatctgcgggcccccccagtagctccagcgctagccctaatggagctgagctcgcgagggtgagacgccagctcgacgaagcaaaacgtaagatccgccaatgggaggagtcatggcagcaggtaaaacaagtttgcgatgcttggcagcgcgaggctcaggaggcgaaagaacgggccagggtggctgacagcgataggcagctggccttgcagaagaaggaggaggttgaagctcaagtcaaacagctgcaggaggagcttgagggactgggggtggcctcgacccttccaggcctgcgcggctgtggcgatattggtacaatacccctgccaaagcttcacagcctgcagtcacaactgaggttggaccttgaggccgtggatggagtcatattccagctgagagccaagcagtgtgtagcctgtagagaacgtgcgcatggtgccgtattgagaccatgccaacaccacattctgtgcgaaccatgtgctgcaactgctccagagtgcccatattgcaagggccagcctctgcagtggtag

SEQ ID NO: 15798 - DNA, 2283 bp, synthetic construct
  source 1..2283: mol_type = other DNA; note = Synthetic coding sequence
atgatggaagaacgcgcggccgccgccgtggccgcagctgccagcagttgcagaccgctaggcagcggcgccgggcctgggccaacgggggccgctcctgtgagcgcccccgccccgggcccaggaccagctgggaagggcgggggcggtggggggtcacctggcccaactgccggacctgagcctctgtccctgccagggatcctgcactttattcagcacgaatgggccaggtttgaagccgagaaggcccgatgggaggccgaacgcgctgagttgcaggcccaagttgccttcttgcagggggaacgcaaaggccaggagaacttaaaaaccgacctggtaaggcgcatcaagatgctggaatacgccttgaaacaagaaagagccaagtatcacaagctcaagttcggtaccgacctgaatcagggggagaaaaaagcagatgtgtctgagcaggtgtcaaacggccccgttgaatccgtcacgcttgagaattccccacttgtttggaaagaagggcgacagctgctcaggcagtacttggaggaggtagggtatactgacactatcttggatatgaggagtaaaagggtccgatctctcctgggaaggtccttggagctgaacggagccgtcgaaccgtccgagggcgccccacgggctccacccgggcccgccggtctctccgggggtgagtccttattagttaaacagatcgaggaacagattaaaaggaatgctgcagggaaagatgggaaagagcggcttggtgggtcggttctgggccagatccccttcctgcaaaattgcgaggacgaagatagtgacgaggacgatgagctggactccgtacaacacaagaaacagcgcgtgaaactcccaagtaaggctcttgttccggagatggaggatgaggacgaggaggatgattctgaggatgccatcaacgaattcgactttctggggtcaggagaggatggtgagggcgctccggatccacgccgctgcactgtggacgggtcccctcacgaactcgagagtcgccgggtcaagcttcaaggcatattggcggatctacgcgatgtagatggactgccccctaaagtgactggtcctcctcctgggacaccacagccccgcccacatgaaggctcttttggttttagtagcgacgtgtttataatggataccatcggtgggggagaggtatccttaggcgatctggccgatctcacagtaacgaatgacaatgacttaagttgcgacctgagcgacagcaaagatgccttcaagaaaacctggaacccaaaattcaccctcaggtctcattacgatgggatcaggtcccttgctttccaccattctcagagcgcccttctgacagcttccgaggacggtacgttgaaactgtggaacctccagaaggccgtcacagcaaaaaagaacgctgcattggatgtggaacctatacacgccttccgcgctcatcggggacccgtactagctgtagccatgggaagcaattctgagtactgttattcaggaggggctgacgcctgtatccacagctggaagatccctgatctgtccatggatccctatgacggctacgatccctcagtcctgtcccatgtgctggaaggccacggcgatgccgtgtggggattggcatttagtcccacatcccagcgcctggcatcttgttctgcggacggaactgtacgtatatgggacccgagctctagcagcccagcctgtctttgcacgttccctacagcatccgagcacggcgttcccactagcgtcgcctttacgagcaccgagcccgcccacatagtagcctccttcagaagcggagacaccgtgctatatgacatggaagtgggatccgccttattgacactggagtctcgaggcagcagcgggcccactcagataaaccaagtcgtttctcacccaaaccagcctctgacaatcacagcccacgacgacaggggaatacggtttctcgacaaccggactggaaagcctgttcacagtatggttgctcaccttgatgccgtaacctgcctcgccgtggatccaaatggtgcgttcctgatgtctggctctcacgactgcagcttgcggctttggtcactggacaataaaacctgtgtgcaagaaattacggctcatcgcaagaaacatgaagaagccattcatgcggtggcctgccacccctctaaggcactcattgcatctgctggcgccgacgcactagcaaaggtttttgtttag

SEQ ID NO: 15799 - DNA, 327 bp, synthetic construct
  source 1..327: mol_type = other DNA; note = Synthetic coding sequence
atgacccccgaggagctgcagaagcgggaggaagaggaatttaatacaggtcctctgtccgtcctgactcaatccgtcaagaacaacacccaggtgttgatcaattgccggaataacaagaagctgttaggaagggtgaaagctttcgatagacactgtaatatggtccttgaaaatgtaaaagagatgtggacagaggtgcctaagagcggcaaaggaaaaaagaagtcaaagcctgttaacaaagaccgttatatttcaaagatgtttctcaggggagactccgtaatcgtcgtgcttcgcaatcctttgatcgccggcaagtag

SEQ ID NO: 15800 - DNA, 1275 bp, synthetic construct
  source 1..1275: mol_type = other DNA; note = Synthetic coding sequence
atggtccaaactttgtattattccgcagaccacaaacttctggatggcaacctgctcgacggccaagccgaggtctttggctccgacgacgatcatattcagttcgttcagaagaaacccccaagggaaaatggtcacaaacagatctcatctagcagtaccggatgtttgagctctcccaatgctacggtgcaaagccctaagcacgagtggaaaatcgtggcatcagagaagacttctaacaatacctatctctgcctggcagttttagacggcatcttttgtgttatctttctgcacggcaggaactctccacagagctccccaacaagcacaccaaaattaagtaagtccctttccttcgagatgcagcaggacgagctgatagaaaagcctatgagccctatgcagtatgcacgatcaggcctcggcacggccgagatgaatggcaaactgattgctgctggcggctacaatagggaggaatgcctcaggactgtggagtgctataacccccatactgatcactggagcttcttggcccccatgagaacaccaagagcccggttccaaatggccgtgctgatggggcaattgtatgtggttggtggatccaatggccattcagatgatttatcttgcggggagatgtacgactcgaatatcgacgactggatccctgttcccgagcttcgaactaatcgctgcaatgccggcgtctgcgctcttaacgggaagctttatattgtgggagggtccgacccatatggacagaagggcctcaagaactgtgatgtgtttgatcccgtgacaaaactgtggacgagttgcgcaccgctcaacatccgtagacatcaaagcgcagtctgtgagctgggcggctacctctacattatagggggcgccgaatcctggaactgtttaaacacagtcgaaagatataatccggagaacaatacctggaccctcatagcccctatgaatgtcgctcgcagaggcgctggggtagccgtgctcaacggtaagctattcgtatgcggcggattcgacggttcacatgcgataagttgcgttgagatgtatgatccgaccaggaacgagtggaagatgatgggaaacatgacctcgccccgaagtaatgcgggcatcgcaaccgtgggaaacacaatttacgcggtgggaggcttcgatggcaatgagtttctcaacaccgtggaagtgtacaacctggaatcaaacgagtggtccccttacactaaaatcttccagttttag

SEQ ID NO: 15801 - DNA, 483 bp, synthetic construct
  source 1..483: mol_type = other DNA; note = Synthetic coding sequence
atgaacaatgcaaggtacctgtggaaaagaattccccctgctatcaaaagtgcgaactcagagttaggggggatctggtctgtgggtcagcggatatggcaaagagactttcccggtatctacacgaccatcaacgcacatcagtggagcgaaaccgttcagcccattatggaggctcttagggacgctacacgtcgacgagccttcgccctggtgagccaggcctatacttccattatagccgatgatttcgcagcgttcgtggggctgcctgtcgaggaagctgttaagggcatcctggaacagggctggcaagccgactctactacacgcatggtgctcccaagaaagcccgtcgcaggtgccttggacgtgtccttcaacaaattcattcccctgtccgaacccgctccagttccccctatcccgaatgaacagcagttggcccggttgaccgactacgtggcattcctggaaaattag

SEQ ID NO: 15802 - DNA, 927 bp, synthetic construct
  source 1..927: mol_type = other DNA; note = Synthetic coding sequence
atgatggaagagatctccataatggtggcttacgacgcgcacgtattctctcaacttcacgacgaagacttcctgaccagcctagtggctatctccaaaccgcgctcaatggttcctacgaaaaagttgaagaagtacgaaaaggagtatcagactatgcgtgagtctcagcttcaacaagaagatcctatggatcggtataaaagggaaaaccgccggctccaggaagctagtatgagattagagcaggaaaacgacgatctggctcacgagctggtaacaagcaagatagccttacggaacgatcttgatcaagccgaggacaaagctgatgtgttaaacaaggagcttctgttgaccaagcagcgtcttgtggagaccgaggaggagaaaaggaagcaggaagaggagaccgcccaattaaaagaagtgttcagaaagcagctcgaaaaagctgagtacgagatcaagaagacaactgcgatcattgccgaatataaacaaatctgttcccagctgtctacccgcctagagaaacagcaagctgccagtaaagaggaattggaggtcgttaaggggaagatgatggcttgtaaacactgctctgatatttttagtaaggagggtgctctcaagctcgccgctacaggcagagaagatcaagggatagagacggatgatgaaaaagatagtttgaaaaaacagttgcgagaaatggaattagagttggcacagactaagcttcagttggtagaagccaagtgcaagatccaggagttggagcatcagcgcggcgcactcatgaatgaaatccaggcagcgaagaatagctggttttctaagactttgaatagcataaagaccgcaactggcacgcagcccttgcagcctgcccccgtaactcagccaccaaaagaaagtacctag

SEQ ID NO: 15803 - DNA, 3600 bp, synthetic construct
  source 1..3600: mol_type = other DNA; note = Synthetic coding sequence
atggccagcgccggtactcagcattatagtatcggactccgacagaaaaattccttcaagcaaagcggacccagcggaaccgtcccagccaccccaccagaaaagccaagcgaaggccgggtgtggccccaggcgcatcaacaggttaagcctatttggaagctagaaaagaaacaagttgagacgctgtccgctgggctcggacccggcttattgggcgtccccccccagccagcttacttcttttgcccatccacgctgtgcagctccggtaccacagcggttatcgctggacatagttcttcctgttacctccattctctgcccgatctgttcaattcgacgctcttgtaccgtcgctcatcgtacaggcagaaaccatatcaacagctcgagagtttttgcctccggtcatccccaagtgagaaaagtccattctcgctccctcagaagtccctgcctgtgtctttaaccgcgaacaaggcaacatcctcaatggtcttctccatggcccaacccatggcgtcatctagtacggaaccatacctttgcctcgccgcggctggcgagaacccatcaggaaaatccctagcatcagccatcagtgggaagattcccagccctctaagttcatcctacaaacccatgctgaacaataactcttttatgtggcccaactcaacccctgtacctttgctgcagaccacccaagggttaaaaccagtgtccccaccaaagatccagcccgttagctggcaccattctggtggcaccggagactgtgcgccacagcctgtcgatcataaggtgcccaagagcatcggcacagttcccgccgatgccagtgcccatatcgcactgtcgaccgcttcctctcacgacacttccactacatctgtggcatcttcctggtataatcgcaacaacctcgctatgcgcgctgaacctctgagctgtgcgctggacgattcaagtgacagtcaggatcccactaaggagatacggttcacagaagccgtccgcaagctgaccgccagggggtttgagaaaatgcccaggcagggctgtcaactagagcagtcctcctttctgaaccctagtttccagtggaatgtgctgaaccgctccagaaggtggaagccgcccgcggtcaatcagcaattcccccaggaggacgcaggctccgttcggcgagtcttgccaggtgcttctgacactttgggactggacaacaccgtgttttgtacaaaaagaatttccattcacctgctggctagtcatgcgtcgggactgaaccataaccctgcgtgtgaatccgttatcgatagcagtgctttcggagagggcaaagccccagggccaccttttccacagacactaggaatagctaacgtggccaccaggctttcatccatccaacttggccagtccgaaaaagaacggcctgaagaggcacgcgagctggactccagtgacagagacatctcttcagccacagatttgcagcccgaccaggctgaaacagaggacactgaagaggagctggtggatggcttagaagactgttgttcgcgggacgaaaatgaggaggaggagggcgactctgaatgttctagtctgagcgctgtaagcccgtccgaaagtgtggctatgatctccagaagctgcatggaaattctgactaaaccattgtcgaatcacgagaaggtggtgagacctgctttgatctattcattgttcccaaatgttcctcccacaatttattttggaaccagagatgagcgggtagagaaattgccatgggagcagcggaaactgctccgctggaaaatgtccaccgtgacgcccaacatcgtaaagcagaccatcggccgatctcattttaagatcagcaaacgtaacgatgattggctgggttgctggggccatcacatgaagtctccctcgtttcgaagtatccgcgaacatcagaaattgaaccactttccaggatcttttcagattggacgaaaagatcgcttatggcgcaacctgtccagaatgcagagtcggttcggaaaaaaggagttttcattctttcctcagagttttatcctgccgcaggacgctaaactcctacgcaaagcatgggaatctagctctcggcagaagtggatagttaaacctccagcgagcgcccgcgggatcggaattcaagtcatccacaagtggagtcagttgcctaagaggaggccactcctggtgcaaagataccttcataagccatacctgatatcaggcagcaaatttgaccttaggatctatgtgtacgtgactagttacgatcctctcagaatctatctcttctcagacggcctcgtgaggtttgcatcttgcaaatattctccgtcaatgaagtcgttgggtaataaattcatgcacctgactaattattcagtcaacaagaagaacgccgaataccaggcaaacgcagatgagatggcctgtcagggccacaagtgggccctgaaagctttgtggaactatctgagccagaagggcgtcaatagcgatgccatctgggaaaagattaaagacgttgtagtgaagactatcatttcgagcgagccttatgtaacttctctcctgaagatgtatgtgcgaagaccgtactcctgccatgaactgttcggcttcgatatcatgctcgacgaaaatcttaaaccatgggtgttggaggtgaacatttctccttccctccattcttcttctccattggatatctcgattaaagggcagatgattcgcgatctccttaatcttgccgggtttgtattgcctaacgccgaagatatcatctcgtcccctagtagctgctccagttccacaacctctctacccacatccccaggagacaagtgtcgaatggccccagagcacgtgactgcccagaagatgaaaaaggcttactacttaacacagaaaattcctgatcaggatttctatgcaagcgtgctcgatgttctgacccccgacgatgtaaggatcctggtagagatggaggacgaattcagcaggagaggacagtttgagcggatcttcccgtcccacatttcctcccgatacctgcggtttttcgagcaacctagatattttaacatcctgacgactcagtgggagcagaaataccatggcaacaaacttaaaggggtcgacctgctgcgttcttggtgttacaaaggatttcatatgggagtagtcagcgattccgcccccgtatggtccctgcccacatcactactgacgatctcaaaagatgatgtgatcctgaacgctttctctaaaagtgaaacatcaaagcttggcaagcagtcctcttgcgaggtctcgctactgctgtctgaggacgggactacacccaagagtaagaaaacccaagccggactgtctccatatcctcaaaaaccatctagtagtaaggatagtgaggacacctctaaggagccttcgctgagcacccaaaccctgccagtgatcaaatgtagtggccaaaccagtaggctgtccgcctcttctaccttccagtccatctccgactcgctactggcggtgtctccttag

SEQ ID NO: 15804 - DNA, 2337 bp, synthetic construct
  source 1..2337: mol_type = other DNA; note = Synthetic coding sequence
aggatccaagagcagctcgaatcatcttttactggactgacagacgaaaaggtcaaggcttacctatccctgcatccccaggttttagacgagtttgttagtgaatcagtgtctgcagagacagttgagaaatggttgaagaggaagaacaacaaaagtgaagatgaatctgcccccaaagaggtgtcgcgatatcaagatacaaacatgcagggcgtggtgtacgaacttaattcatatattgagcagcgactcgacactgggggtgacaatcagctgttgctttatgagctttcatccatcatcaagatcgcaactaaagcagatgggtttgcactgtacttcctgggcgagtgcaataacagtctctgcatatttaccccgcccggcattaaggaaggcaaacccaggctcattcctgccggacctatcacacaaggtacaactgtatctgcctacgtcgcaaaatcccggaagactctgctggtggaagatatcctgggcgacgagcgttttcccagaggcactggactggagtctggaacacgcatccagagcgttctgtgtctgccaattgtgactgcaataggggatctgataggtatcctcgaactatatcgacactgggggaaggaggctttttgcctaagccaccaggaagtggccacagcaaatctcgcgtgggccagtgtggctatacatcaggtccaggtatgcagagggctggcgaaacagaccgagttgaatgactttctcctagatgtttcaaagacctacttcgacaacattgtagctatcgacagcctactagagcacattatgatttacgccaagaatcttgtcaatgccgacaggtgcgctctcttccaggtcgaccacaaaaataaagaactatattcagatctgtttgacatcggggaggagaaggaggggaaacccgtctttaaaaaaactaaggaaataagatttagcattgaaaagggtatcgccgggcaggttgctagaaccggggaggtgcttaatatccccgatgcctatgcggatccccggtttaacagggaagtagacctgtacactgggtataccacccggaatatcctgtgtatgccaattgtttcaagaggaagtgtgatcggggtggtgcagatggtgaataagattagtggctccgccttcagcaagacagacgaaaacaattttaaaatgtttgctgtgttctgcgcactcgctctgcactgcgccaacatgtatcatcgaattcgccacagcgagtgtatctaccgtgtgacaatggagaaactcagctatcattcgatttgcacctccgaggaatggcagggcctgatgcagttcacccttccagtgcgcctttgtaaggagatcgagcttttccactttgatatcggacctttcgaaaacatgtggcctggtattttcgtctatatggtgcatcggtcttgcggaacctcatgttttgaattggaaaaactgtgtaggttcataatgagcgtcaagaaaaactatcggcgtgtcccctaccacaactggaagcacgctgttactgttgcgcattgcatgtacgctatccttcagaataaccacactctcttcaccgatctcgagcggaaaggcctcttaatcgcttgtctgtgtcatgacttggatcaccgagggttttccaattcttatctgcagaaattcgaccacccactggccgccctgtactctacttctacaatggagcaacaccacttcagccagaccgtgtctatcttacagctggagggacataacatctttagtactctgtcttccagtgaatacgagcaggttctggaaattatccgaaaggccattattgctactgacctggcgctctactttgggaacaggaagcaactggaggagatgtaccaaaccggtagtctgaacctcaacaatcagtcacatcgggacagggtgatcgggctgatgatgaccgcgtgcgatttgtgttcagtcacaaagttatggcctgtcaccaagttgacggctaacgacatctacgccgaattttgggctgagggagatgaaatgaaaaaactggggatccagcccatccctatgatggaccgcgacaaaaaagatgaggtcccccaaggccagctcgggttctataatgctgtggctattccttgctacacgactctgacacaaatccttccaccgaccgaacccctgcttaaggcatgtcgggacaacctctcccagtgggagaaagtgatccggggagaagagacggccacatggatctctagcccatcggtggcccaaaaggcggccgcctctgaagactag

SEQ ID NO: 15805 - DNA, 1281 bp, synthetic construct
  source 1..1281: mol_type = other DNA; note = Synthetic coding sequence
atgtggccactgacagcactattgctcctcgtgccctctagcggccaggcggcaaccctggagaaaccaatactgagtctgcacccaccctggactacgatttttaagggggagagagtgaccctcaagtgcgacggataccatcccctgctccttgagttacaacctatatccactctatggtaccttggacatttgttgctgccatcccacaaaaaatctattgaggttcagacacctggagtataccggtgccagacccggggcgcccctgtgtctgaccccatacacctgagcgtgagtaacgactggctgatcttacaggtcccctatgcgcccgtctttgagggtgaaccactcgtgcttcgctgccggggttggtatgataaggttgtctataagctccactattatcacgacggccaagctgtccgctatttccactcatctgcgaactacacagtgctgcaggcgcgagccagcgattccggcaggtatcaatgctcaggcactatgcgaatcccagtggaaagcgccccaatgttctctgcaaaagttgcggttacggtgcaggagctctttcgcgcccccgtgctccgggtaatgggtcctagggaggctcgcggggccgcccttggcggagtggttctgcgttgtgacactcggttgcaccctcagaaacgtgacacaccactgcagtttgcattctacaaatattccagagcggtgaggaggttcgactggggagctgagtataccgtcccggagcccgaggtcgaggaattggaatcatattggtgtgaagcagccactgctaccagatccgtgagaaaacggtcaccttggctacaacttccgggcccaggctcaccacttgatccggcatcgacaactgcccctgcaccatgggctgctgcgctggcaccgggtaacaggccactgtctttccgtaagcctcctgtcagtcggagtgtcccgctcgttactagcgtgcgcaacactacaagtacaggattgcagttccccgcctccggggcacctacagccggccctcccgcgtgtgctcccccaacccccctcgagcagtcagctggggcgctgaaacccgatgtggacctcctgctacgggaaatgcagctgctcaagggcttattgagtcgggtcgtcctggagctgaaagagccgcaggctcttcgcgaattgagaggcactcccgaaacaccgacttctcatttcgcggtgtcacccgggactcccgaaacaactcctgtagaaagctag

SEQ ID NO: 15806 - DNA, 1779 bp, synthetic construct
  source 1..1779: mol_type = other DNA; note = Synthetic coding sequence
atggacgtcatgctggaaaactattgtcacctgatctctgtgggctgtcacatgacaaagccagatgtgatcctgaaactcgagcgtggagaggagccctggacctcattcgccggccatacatgcttggaggaaaattggaaggctgaagatttcctcgttaaattcaaggagcatcaggagaaatacagcaggtcggtggtgtccattaatcacaagaagctggtgaaggaaaaatcaaagatttatgagaaaacgttcaccttgggcaagaacccggtgaattccaagaatctacctcccgagtacgacacacacggcaggatccttaagaacgtgtccgagcttattatctcaaacctgaaccctgccaggaagcggctgagcgagtacaacggctacgggaaatctctcttatctaccaagcaagaaactacccaccccgaggtgaaaagtcacaaccaatccgctcgtgccttcagtcataatgaggtgttgatgcagtaccaaaagaccgagaccccggctcagtctttcggttataacgattgcgaaaagtctttcttgcagcggggtgggctgatcacccacagtaggccctacaaaggcgagaaccctagcgtctacaacaagaaaaggcgggcaactaatatagagaaaaagcatacatgcaacgagtgcggaaagagcttctgtcggaagagtgtgctgatcctccaccagggaatacacagtgaggagaaaccttaccagtgtcaccaatgtggtaacgcatttcgccgcaagagctacctgattgaccatcagaggactcatacaggtgaaaaacctttcgtgtgtaacgagtgcgggaaatcattcaggttgaagacggcactcacagaccaccaacggactcacacgggcgagaaaagttatgagtgccttcaatgtcgcaacgcattccggctaaagtcccatctcattcggcaccagcgcacccacactggcgaaaagccctacgagtgtaacgattgcggtaagtcattccgccagaagaccacactgagtctgcatcagaggatccataccggcgagaaaccctatatctgtaaggaatgcggaaaaagttttcaccagaaggcaaatttaacagtccaccaaaggactcacacgggggaaaaaccctacatctgcaacgaatgtggcaagagtttctcgcagaaaaccaccctcgctctgcatgaaaaaacccacaatgaggaaaagccttatatctgttccgaatgcggtaagagttttaggcagaaaacgaccctggtcgcccatcaacggacccatacaggggagaagagttatgaatgccctcattgcgggaaagccttcaggatgaaaagttacttaatcgatcaccaccgcacacacacaggagaaaaaccgtacgaatgtaatgaatgtggtaagtcattttcccaaaaaacgaatctgaacctccaccaacggattcatacaggcgagaaaccgtatgtgtgtaatgaatgtggaaaatctttccgacagaaggctacactcactgtgcaccagaagatccatactggtcagaaatcctatgagtgtccccaatgcggcaaggcttttagtcggaagtcatacctcatccatcaccagcgcactcacactggggagaaaccatacaaatgcagtgagtgcggaaaatgcttcaggcagaagactaaccttatcgtacatcagagaacacacactggtggcgaggacggcctcacaggctgccttagttag

SEQ ID NO: 15807 - DNA, 645 bp, synthetic construct
  source 1..645: mol_type = other DNA; note = Synthetic coding sequence
atggaggtgactggggtatcagctcctactgtaaccgtgttcattagcagtagtctaaacacattccgcagcgagaagcggtattctagaagtctcactatagccgaatttaaatgtaaacttgagctgctggtgggctctcccgcttcctgcatggagctcgaactttatggggtggatgacaaattctatagcaaactcgaccaagaggatgcattgctcggatcatatcccgtggacgatgggtgccgcattcacgtgatcgatcactcaggagctcgtctcggtgagtacgaggacgtgtctagggttgagaaatacactatttcccaggaggcctatgatcagcgtcaagataccgtgaggtctttcctgaagcgaagcaagctgggcagatataatgaggaggaaagagcccaacaggaggccgaggccgcacagcgtctagcagaggaaaaggcacaagcttcgtctatacccgtcgggagcagatgcgaagttcgagccgcagggcagagcccacgccgcgggactgtcatgtacgttggcgcctggctcgccggacctgttccgggatcccgggctcctagaccgggtgggaacgtgggaggaacagtggagccacgccgcccgcggtccgcttag

SEQ ID NO: 15808 - DNA, 189 bp, synthetic construct
  source 1..189: mol_type = other DNA; note = Synthetic coding sequence
atgagcatccaatggaaaacccgacagctgcagtccaaactgcacgaagccgacattgtcgttctgggctcccctaagcccgaggagatacccctgacctggattcaacccggcacaactgtcctaaactgctcacacgactttctgtcagagagcctcatcatcattagacgaatggctatcttctag

SEQ ID NO: 15809 - DNA, 1269 bp, synthetic construct
  source 1..1269: mol_type = other DNA; note = Synthetic coding sequence
atgtaccccaatcctctaatttactgtacctgttgggacccctggaacctcggtcctcgcaagctgatcaagactcctcagttgccacgtaaaaattctactggttcttctaaattgactcccctggttccagcccccaaaaatcacaactacctccaacccacgaaacctgtcgtatccccaaagatgaagattcattctgccaggcaggaggaaacaaataagtccttctatgaggttataaatgtgtccccagggtatcagctggtgaggaacagagagcaaatctccgtcacactcggggatgaaatgtttgatcgaaaaaaaaggtgggaaagcgagatccccgacaaagggaggttcagtaggactaatataattagtgatctggaggaacaaatctctgagctgactgccatcatcgagcagatgaatcgagaccaccagtcagcccagaaactgctcagctcagaaatggatctgcgatgcgctgaaatgaaacaaaacttcgaaaataagaatagggaactcaaggaggcccacgaagcagagttgagcgagctggaaaacaattacaaggccgcattaaaagcagagaaattggcagcccaggaaaaactggaggagatggggaaagagtacaagtacctaaagaatatgttcaggacctatcaagacagtatctatgacgagatggaagaaaaatggagcaagcagaaggctaagtggaagaaagacgagaagttcgaacgagagaacatcctgcttcagcagaaaaagaagatgacaaaaaagtttgagatggaaagcggggaggaggataagaaaataaacgaatcttgtagcgccgtttttgaaaatttcatacaggaaaaggaggaattgctgaaacagcaccaaagcgacacactgcaactggaagaactgcggaaaactaaggaagtgatgcaggaagagttgcacgcccaagccctgattttggaaagcctaaacaccaacctgtactatacgcagctggagctgcaaaaggagaaggccatcgtcggtaacctggaaaaaatgctccagacaaagttcgctgagactgaggagaagtataagcatactattcagatccttacagaagaaaatatccatctgaagcaaaagatcatctccaagaatgaagagatctgtgaaggttgtagtggccgacttgcttctatcaccgtcagcaaagatgactccgatacagtgcaggacggtagcaaaaagggacaggaatcctag

SEQ ID NO: 15810 - DNA, 1380 bp, synthetic construct
  source 1..1380: mol_type = other DNA; note = Synthetic coding sequence
atggtcccttttggcccctttgctttcatgcccggcaaactggtccatacgaacgaggttaccgtcctccttggtgataattggttcgcaaaatgttcagccaaacaggccgtcggtctggtagaacatcgaaaggagcacgttagaaagaccatcgacgatttaaagaaggtgatgaagaattttgaaagtagagtcgaatttaccgaggacctccaaaagatgagcgatgctgccggtgatatcgtggatattcgtgaggagattaagtgcgattttgagttcaaggccaagcaccggattgctcacaaaccccattccaaaccaaagacgagtgacattttcgaggccgacattgcgaacgatgtgaagtctaaggatcttctggcagacaaagaattgtgggcacggctcgaggagctggagaggcaggaggaattgctgggagagctcgatagcaaaccggatacggtcattgccaatggcgaggacacaacaagttctgaagaagaaaaggaagatcggaatacgaacgtgaatgctatgcaccaggtaacagacagccacacaccgtgtcataaggatgtggcgtccagcgaacctttctcaggccaggtcaacagtcagttgaactgctcagtaaatggatcctcctcttatcattcagacgacgacgacgatgatgacgacgatgatgacgatgataatattgacgatgatgatggagacaacgatcacgaagcactaggggtgggggataattctataccgaccatctatttttcacatacagtggaacctaagagagtgcggattaacactggaaagaacaccaccctcaaattctccgagaagaaggaggaggccaaaaggaagaggaaaaacagcaccggttctggacactccgcacaggagctccccacaattagaacgcccgcagacatttaccgcgcgtttgttgatgtggtgaacggtgaatatgttcctcggaaaagcatcctaaaatcccgatcaagggagaacagcgtctgcagcgacacttcggagtcttccgccgccgagttcgacgataggaggggggttcttcgctctatcagttgtgaagaagctacctgctcggatacctccgagtccatattggaagaggagccccaagagaaccagaagaaacttttgccccttagcgtcactccagaagctttttctggcacagtgattgagaaagaattcgtcagccccagtctgaccccccctcccgccatcgcccatccagcactgcccacgattccagaacgcaaagaagtgctcttggaggcctctgaagaaaccggaaagcgggtgagtaagtttaaagccgcgagattacagcaaaaagactag

SEQ ID NO: 15811 - DNA, 1068 bp, synthetic construct
  source 1..1068: mol_type = other DNA; note = Synthetic coding sequence
atgcgcgagatcgtccacatccaggctggccagtgtggcaatcagattggagcaaagttctgggaagtgataagtgacgaacatggaatcgaccccaccggctcataccatggagatagtgacctgcaactgttgacacatagtctgggcgggggcacaggaagtggaatgggaacgttgctgatttcaaaaatccgggaagagtacccggaccgcattatgaatactttttctgtgatgccttcccccaaagtgtccgatacggtggtggagccatataacgcgaccctgtccgtacaccaactggttgagaataccgacgagacatattcaatagataatgaagcactctacgacatttgttttagaaccctgaagctgaccactccgacatatggagacctcaaccacctagtgtcagctacaatgtctggcgttactacctgtctgagattcccggggcagctgaacgccgacttaagaaaattagccgttaacatggtaccctttccacgactccatttcttcatgcctggcttcgcacctctgacctcccgagggtcccagcagtatcgtgccctgacggttccagaactgacccagcagatgttcgattccaagaatatgatggcagcctgcgacccccgccatgggcgatacttgaccgtggccgcaatctttcgggggagaatgtcgatgaaagaagtggacgaacagatgctgaacgtgcagaacaagaatagttcctactttgtcgaatggattcccaacaacgtcaagaccgccgtgtgcgacatccctcccaggggcctcaaaatgagtgccacttttataggcaacagcacagctattcaggagctgttcaagcgcatatctgaacagtttactgcgatgtttagaagaaaggctttcctgcattggtataccggcgagggaatggatgaaatggagttcacggaggccgagtccaatatgaatgacctggtcagcgagtatcagcagtaccaagatgcaacggccgatgagcagggagagtttgaagaggaggagggcgaggacgaggcctag

SEQ ID NO: 15812 - DNA, 255 bp, synthetic construct
  source 1..255: mol_type = other DNA; note = Synthetic coding sequence
atgaaggtgaaaattaagtgctggaatggagtggccacctggctctgggtggccaacgacgagaactgtggtatttgtaggatggctttcaatggctgttgtccagattgcaaggtccccggcgatgattgcccattagtctggggacaatgtagtcactgtttccacatgcactgtatattgaaatggttgcatgcccagcaggtgcagcaacactgtccaatgtgtagacaggagtggaagtttaaagagtag

SEQ ID NO: 15813 - DNA, 1416 bp, synthetic construct
  source 1..1416: mol_type = other DNA; note = Synthetic coding sequence
atgaagatgcaggtgttttgcaagagtattgaggatatgaccgtgaaggcggaacagagccaacaggaggccgccaagaaacatgaagaagagaagaaggaactggaaagaaagttgtctgatttggagaagaaaatggagaccagccacaatcagtgccaagagctcaaagcccgctacgaaagagcaacatctgagaccaaaacaaagcacgaggaaattctccagaatcttcagaagacactcctggacactgaagacaaacttaagggggccagggaagagaattcgggcctgctccaggagctggaggaactgaggaagcaagccgacaaagcgaaagcagcacaaaccgccgaggacgcgatgcagattatggaacagatgacaaaggagaagactgagaccctcgcctctttggaagacactaaacaaacgaacgccaaactccagaacgaattggacacactgaaggagaataacttaaaaaacgtcgaggaactgaataagtcaaaggagctccttactgttgagaatcagaaaatggaggaattccgcaaggagatagagacactcaagcaagccgcagcccaaaaatcacagcagttgtccgctttacaggaggaaaatgttaaattggcggaagaacttgggagatcaagagacgaggtgacgtcgcatcagaagctcgaagaggaaagatcagttttaaacaaccaactgctggaaatgaaaaagcgtgaaagcaaatttatcaaggatgccgacgaagagaaggctagtctccaaaagtcaatcagcatcacttccgctctgctgaccgaaaaagacgccgagttagagaagctgcgcaatgaggtgaccgtgctaagaggggagaacgctagtgccaagagcttacattccgtagtccaaaccttggagtccgacaaggtgaagttagaattgaaagttaaaaacttggagttgcagttgaaggaaaacaagcgccagctttcttcttcgtcaggaaacacggacacacaagccgacgaagacgaaagggctcaggagtctcaggtcatgattgactttctaaatagcgtcatcgtagatctccagcgcaagaatcaggatctcaagatgaaagttgagatgatgagcgaggctgcactgaatggcaatggtgacgacctcaataactatgactctgatgatcaagaaaaacagtcaaaaaagaaaccccggctgttttgcgacatttgcgattgcttcgatctgcacgacactgaagattgtccaacacaagcccagatgagcgaagacccaccacattccacccatcacggcagtcggggagaggagaggccttattgcgagatctgtgaaatgtttggacactgggctaccaactgcaacgatgacgagaccttttag

SEQ ID NO: 15814 - DNA, 1602 bp, synthetic construct
  source 1..1602: mol_type = other DNA; note = Synthetic coding sequence
atgagcagctgtgtgtcctcccagcctagctccaatagggcagccccacaggacgagctcggaggaagggggagctctagcagcgagtcacaaaaaccatgcgaggccttaagagggctgtccagtttgagcatacatttagggatggaaagcttcatcgtggttacggaatgcgagcctgggtgcgcagtagatctcggtctggctagagatcgtcctctggaggccgacggtcaagaggttcccctggataccagcgggagtcaggccaggccacatttgtctggaagaaaactttctttgcaagagagatctcaagggggtcttgctgccggcggaagcctggacatgaatggtaggtgtatctgtcccagtctcccctatagccctgtgtcaagcccacagtccagtcctcgcctgccccgacggccgaccgtggagtcacatcacgtgtctatcacgggcatgcaggattgcgtgcagctgaatcagtacaccttgaaggatgagatcggaaagggaagctacggtgtagtcaagctggcttacaatgagaatgacaatacatactatgccatgaaagtgctgtcgaagaaaaaattaatccggcaagctggattcccacgcagacccccccctaggggtacacgaccagcacccggaggctgtatccagcctaggggcccaatcgagcaagtgtaccaggagatcgccatcctcaagaaacttgaccatcccaatgtcgtgaagctggtcgaagtcttggacgaccctaacgaggatcacctgtatatggtctttgaattagtgaaccagggccctgtcatggaagtaccgacactgaagcccctgtctgaagatcaagcccggttctactttcaggacctgattaaaggcatcgaatacctacattaccagaagattatccatcgcgatattaagccttccaacttgctcgtgggcgaggatggtcatatcaagatcgcagacttcggggtttccaatgagttcaagggttccgacgctcttctgtccaatacagtgggcacgcctgctttcatggcccccgaaagcctgagcgaaacacgtaagatctttagcggtaaagcattggacgtgtgggctatgggggtgacattatattgttttgtattcgggcagtgtcccttcatggacgaaagaattatgtgcttgcattccaaaatcaaatctcaggctctcgagttcccagatcaaccagacatcgcagaagatttgaaggacctgattacgcgcatgttggacaaaaatccagaatctcgcatagtggtgcccgaaatcaaactgcatccctgggtcactcgccatggcgccgagcctcttccgtcagaggacgagaattgcacattagtcgaggttacagaggaggaggtggaaaattctgttaaacacataccatcactggccactgttatccttgtgaaaacgatgatcagaaagagatcattcggaaatccatttgaaggctcacgaagagaggagcggagtttgtctgcacccgggaatctcttgacaaaaaaacccactcgggaatgcgagagtctcagtgaattaaagacttag

SEQ ID NO: 15815 - DNA, 1671 bp, synthetic construct
  source 1..1671: mol_type = other DNA; note = Synthetic coding sequence
atgtcgtcatgcgtgtccagccagccctcaagtaatagagccgccccccaagatgaactgggtgggcgcgggtcgagcagctccgagtcacagaaaccctgtgaagcactccgtgggctaagtagcctgtctatccacttgggaatggaaagctttatagtcgtgacagagtgtgagcccggctgtgccgtggatttgggccttgcccgtgaccggcccttggaggctgatgggcaagaggttccactggacacgtccggttctcaggcacggcctcatctatccggacgaaagctttctctgcaggaaagaagccaagggggtctggccgctggaggcagtttagacatgaatgggagatgcatatgtccttcattaccctactcacctgtctccagtccccagtcttccccaagattgcctcgaaggcctactgttgagtcccaccatgtgagtattaccggcatgcaagactgcgtccagctgaatcagtatacgttaaaagatgaaatcggtaaggggagttacggggtggtaaagcttgcctacaacgaaaatgacaacacatactacgccatgaaggtcctgagcaagaagaaactgattcggcaagctggattccctagaaggcccccacctaggggcacccgcccggccccagggggttgtatacagccaaggggtcctattgagcaagtgtaccaggagattgccatcttgaagaagctagatcacccgaatgtcgtcaaactagtagaagtcctggacgacccaaatgaagaccacctgtacatggtgttcgaactggtgaatcaggggcccgttatggaagtgccaacgttaaagcccttgagtgaggatcaggcacgattctatttccaggacttgattaaggggatagagtatctacactaccagaaaatcatccaccgcgatattaaaccctctaacctgctggtgggagaagatggacacattaagatagccgattttggagtgtctaacgagttcaagggaagtgacgccctgttgagcaacaccgtcggcacacctgctttcatggctccagagagtctatccgagacaaggaagatcttctccggtaaggccttagacgtttgggcaatgggcgtaacattatattgtttcgtgtttggacaatgcccatttatggatgaaaggattatgtgccttcactcaaagatcaagtcacaggctctggaattcccagatcaaccagacattgctgaagatttaaaggacctcattaccaggatgctcgataagaatcccgagtcccgtatcgttgtccccgagattaaactgcacccatgggtgacccggcacggcgccgaacccctgccgtcagaggatgagaactgcactctagttgaagtgaccgaggaagaggtggaaaattcagtcaagcatattcctagtctcgccaccgtcattttggtcaagaccatgattagaaagcgctcattcggcaacccatttgaaggcagcaggcgcgaggagcgaagcctgtccgcccccggaaatctgcttacgaagaagcccactcgggagtgcgaatcactcagcgagttaaaaggtactaagaaaaaaaagggccttgattccatgacatccaccgtcgccgccgggtggctcgatcggagggtgtag

SEQ ID NO: 15816 - DNA, 309 bp, synthetic construct
  source 1..309: mol_type = other DNA; note = Synthetic coding sequence
atgctgagcgaggaagagaaagaggaattgaaggccgagctggttcagctagaggatgaaatcacaaccctgcgacaagtgctgagcgcgaaggagagacacctggttgagatcaagcagaagctgggtatgaacctgatgaatgaattgaagcagaatttctccaagagttggcacgacatgcagaccacaacagcatacaagaagacccacgaaactttgtcacacgcagggcagaaggcaacagctgcttttagcaacgttggaaccgcaatcagtaagaaatttggagacatgcggagaaaatag

SEQ ID NO: 15817 - DNA, 615 bp, synthetic construct
  source 1..615: mol_type = other DNA; note = Synthetic coding sequence
atggaagccgaacccaagggccttctggagacagagcccctacagggaactgacgaggacgcggtggcatccgccgatttttcttccatgcttagcgaggaagagaaagaagagctcaaggctgagctcgtccagctggaggatgagattacaaccctgagacaggttctgagcgccaaagaaagacatctagttgagatcaagcaaaagttgggtatgaatctgatgaacgagttgaagcagaatttctcaaagtcttggcacgacatgcagactaccactgcgtataaaaagacacatgaaacccttagtcacgcagggcagaaagcaactgcggcttttagcaatgttgggaccgcgatcagtaaaaagtttggcgacatgagctactctatcagacactcgattagcatgcccgcaatgcgcaactcgcccactttcaagagctttgaggaacgggtcgaaaccacagtgaccagtcttaagacgaaagtcggcggtacgaacccaaatggtggctcctttgaggaggtgctctcttcgacggctcacgcaagtgctcaaagcttagcaggaggatccagacgaaccaaagaggaggaacttcaatgttag

SEQ ID NO: 15818 - DNA, 369 bp, synthetic construct
  source 1..369: mol_type = other DNA; note = Synthetic coding sequence
tgatacctggtcgccctgggttgcatcaagccactgtgcgacctgctcaccgtaatggatagcaaaatcgtgcaggtcgccctgaacggcttggagaacattcttcgcctcggcgaacaagagtcgaagcagaacggcatcggtattaatccctactgcgccctgattgaagaggcctacgggttagacaagatcgaattccttcaatctcacgagaaccaggaaatataccaaaaagctttcgacctcattgagcactactttggagtggaagaagacgacccaagtattgtacctcaggtcgacgagaatcaacagcaatttattttccagcagcaagaggcccctatggacggttttcagctgtag

SEQ ID NO: 15819 - DNA, 1137 bp, synthetic construct
  source 1..1137: mol_type = other DNA; note = Synthetic coding sequence
atggaggtcaagccaccacccgggagacctcaaccagactccgggcgacgcaggcgccgacgtggagaagagggtcatgatccaaaagaaccagagcagttgcgtaaactgttcatcgggggactgagtttcgagaccaccgatgactccctacgggaacattttgaaaagtgggggactctaactgattgtgtggttatgcgagacccgcagacgaagaggtcgagaggctttgggttcgtcacctacagctgtgtggaggaagttgacgccgccatgtgcgcacgaccccacaaggttgacggcagggtggtcgagccaaaacgagcggtgtctagagaggactccgttaaaccgggggcccaccttactgtaaaaaagatctttgttggaggcataaaggaagataccgaagagtataatctcagggattactttgaaaagtacggtaaaatcgaaacgattgaagtgatggaggatagacagagtggaaaaaagagagggttcgctttcgttacgttcgacgatcacgataccgtcgataaaattgtggttcagaagtaccacaccataaacggtcacaactgtgaggtaaagaaagccctgtccaagcaagaaatgcagtccgctggcagccaaagaggccgtgggggcggttccggtaatttcatgggaaggggcgggaatttcggaggcgggggcggaaactttggtagaggcgggaatttcggggggaggggcggctacggaggtggtgggggcgggagtagaggtagctacggagggggggacggcgggtacaatggctttggcggagacggaggcaactatggaggggggccgggctattctagcaggggcggttacggcggaggcggcccaggctacggtaatcaaggcgggggctacggcggcggggggggttacgatgggtacaacgagggcggcaattttggcggaggcaattacggaggcggcgggaactacaatgacttcggcaactactcaggccaacagcaatccaattacgggcctatgaaaggaggatcttttggcggtagaagttctgggagcccctacggggggggatatggaagtggtggaggttccggcgggtatggcagccggcgcttctag

SEQ ID NO: 15820 - DNA, 3063 bp, synthetic construct
  source 1..3063: mol_type = other DNA; note = Synthetic coding sequence
atgaggagatttctgaggccaggtcatgaccctgttagagaaaggttaaaaagagacctgtttcaatttaataaaacggtcgaacatggcttcccgcatcagccgtcagcactgggatattcgcccagcttacgcatactggccataggcacacgcagtggggctatcaagttgtacggcgcaccaggggttgaatttatggggttgcaccaggagaacaatgcagtgactcagatacacttgctgcccggtcagtgtcagctggtgactctcctggatgacaactctctccacctgtggtcattgaaagttaagggcggcgcctctgaactgcaggaagacgagtcattcaccttgcgcggaccgccaggagccgcaccctctgcgacccagatcacagtggtgctgccccattcctcctgtgaactgctgtatctcggaaccgagtccggcaacgtgtttgtggtacagctgcccgctttcagagctctcgaggatcgcacaataagttctgacgctgtgctgcaaaggctgcccgaggaagcccgccacagacgagtctttgaaatggtggaagccttgcaagaacatccgcgcgaccccaaccaaatcctcattggttactcacggggtctcgtggtcatctgggatttgcagggcagtagagtgttgtaccacttcctttcctctcaacagctggaaaacatctggtggcagcgcgacggtaggctgttggtgagctgtcactcagatgggtcatattgccagtggcctgtctctagcgaagctcagcagccggagccactccgcagcttggtcccttatggcccctttccctgcaaagcaatcactagaatcttatggcttaccacccggcaagggctccctttcaccatatttcagggcggcatgccccgcgcctcatatggcgatcgccactgtatttcagtgattcatgatggccagcagacagccttcgactttaccagccgggtaatcgggtttacagtcctgacagaagctgatcctgcggcaacatttgatgacccttatgcactcgtcgtcttagctgaagaagagttggtggtcattgatctccagactgccggatggcctcccgtgcagttgccgtacctggcttccctccattgctctgccattacatgctcacaccatgtttccaacataccacttaagctctgggagaggatcattgcagcagggtcccggcagaatgcacattttagcacaatggagtggccgatcgacgggggaactagtctcacaccagccccgccccagcgtgatctgctgcttactggacatgaagacggtacagtcaggttctgggatgcctccggggtgtgtctgaggctgttgtataagctctctacagtgcgagtttttctgacagatacagacccaaacgagaactttagcgcccagggcgaagacgagtggccgccattgcgcaaggtcgggagcttcgatccttactctgatgacccgaggctcggaattcagaagattttcctatgtaagtattcgggctatctagcagtcgcgggaactgctggtcaggttttagtacttgaactcaacgatgaagcagcggagcaggctgtggagcaggtggaggctgacttgctgcaagaccaggagggttaccggtggaaaggacatgagcggctggccgcgcggtccggccctgtccgctttgaacccgggttccagccgtttgtcctggtgcagtgtcaacctccggcagtcgtgacgagtctggcactgcatagtgagtggcggctggtggcatttgggacatcccacggattcgggctttttgaccaccagcagcggaggcaagtattcgtcaaatgcactctgcatccatctgatcagcttgccctagagggccccctgtcccgggtgaagtcactcaaaaagtccctaaggcagtcctttcgccggatgaggaggagtcgggtgagctcacgcaaacgacacccagcaggacctcctggagaggcccaggaggggtcagccaaagccgagcgaccagggctgcagaatatggaactggcaccggttcagagaaaaattgaggcccgcagcgctgaggacagctttacgggttttgtgagaacactctattttgccgacacgtacctaaaggatagctcccggcactgtcctagtttgtgggctggaaccaacggcggcaccatttacgccttttctctgagagtaccccccgctgaacggcgaatggatgagccggtgcgggctgagcaggccaaggagattcaactcatgcaccgggcccccgttgtgggcatcctggtgcttgacgggcatagtgtgccgctgcccgagcctttggaagtggcccatgatctctccaaatcccctgatatgcagggatctcaccaactcctagtcgtatctgaggagcaatttaaggtgtttactcttcccaaggtatcagccaaactgaagttgaagctgacggcgttagagggctctcgcgttcggcgtgttagcgtggcacactttggctccagacgggctgaggactatggcgaacaccacctggctgtgctgaccaacctcggagacattcaggttgtgagtcttcccctcttgaagcctcaggtcagatacagctgcatccgccgggaggacgtatccgggatcgcgagttgtgtctttacaaagtatggccagggattttacctcatttcaccctctgaatttgagaggttttctctgagcacaaaatggctagtagagcctagatgcctagtggattccgcggaaactaagaatcacagaccgggcaacggagccgggcccaagaaggccccatccagggcacggaacagtggtactcaatctgacggggaggagaaacaacctggtctggttatggagcgcgcactgctcagtgacgaacgcgttctgaaggagatccaaagcacactcgaaggagaccgaggctctggaaactggcggagccacagagccgcagtcggctgttccctatccaacgggggagcagaatag

SEQ ID NO: 15821 - DNA, 1458 bp, synthetic construct
  source 1..1458: mol_type = other DNA; note = Synthetic coding sequence
atggcggcagagctttacgcacctgcctcagccgcagcagcggatctggctaattctaacgccggtgccgccgtgggccgcaaagctggccctaggtcacccccttcagcccctgctcccgcgccccccccaccggctcctgctccccccaccctgggcaacaatcatcaagagtctcctgggtggcggtgctgcagacccaccctccgagaacgcaacgcactcatgttcaacaacgaactgatggccgacgtccactttgtggtgggaccgccaggtgcaacccgcaccgtgcctgcacataagtacgtgctggccgtcggatcttccgtcttttacgctatgttttatggtgatctggctgaagtgaagagtgagatccatatccccgacgtcgagcccgcggcgtttctgattctcctgaaatatatgtattccgatgagattgaccttgaagccgataccgtactggcgactctgtacgccgccaaaaaatacattgtgccagcattggctaaggcttgtgtgaacttcttggagacttccctggaggccaagaatgcctgcgtgttactgagccaaagccgcctgttcgaagaaccagagcttacgcagcgctgttgggaggttattgacgcccaagccgagatggccctcagatccgagggattttgtgagatcgacaggcaaactttagagatcattgtcacacgagaagcccttaatacgaaggaggccgtggtgtttgaagccgtgctaaattgggccgaggctgagtgcaaacgccaggggttaccgatcacaccacggaataagaggcacgtgttgggcagggccttgtacctggtccggattcctaccatgacattggaagagtttgccaatggagctgcacagagcgatattctaacgcttgaagaaactcacagcatctttttgtggtatacagcaacaaataagccccgactggatttccctctaaccaagaggaaggggctggccccccagcgttgccaccggttccagagctctgcttatcgctctaatcaatggcgctaccgtggaagatgcgactctattcagttcgccgtggatcgacgagtctttatcgctgggttgggtctgtacggcagcagttcgggtaaggcggagtacagtgtgaaaatcgaactcaagaggctgggagttgttctcgcacagaacttaacaaaattcatgagtgacggctcttccaatacctttcccgtctggttcgagcatccagtccaggtcgaacaggacaccttttataccgcctcggcagtattagacggctctgagctgtcctactttggtcaagagggtatgacggaagttcagtgcggaaaggttgccttccaatttcagtgctcatcagatagcactaatggcaccggagtccaggggggccagatcccagagctcatcttttatgcttag

SEQ ID NO: 15822 - DNA, 2883 bp, synthetic construct
  source 1..2883: mol_type = other DNA; note = Synthetic coding sequence
atgtcacggctcattgtgaagaacctgcccaacggtatgaaggaagagagattcaggcagctcttcgccgcattcggtaccctcactgactgtagcctgaaattcacaaaagatggaaagttccgtaagttcggctttattggattcaagagcgaggaagaagctcagaaagctcagaaacactttaacaagagctttattgacacgtcacggatcacagtcgagttttgcaaatcctttggggaccccgcgaaaccaagggcttggtctaagcatgcccagaaaccatcccaacccaaacagcccccgaaggattcaacaacccccgagattaaaaaagatgagaagaagaagaaagtcgcggggcagctggaaaagctgaaagaggacacggagtttcaggagttcctctcggtgcatcagcggcgagcccaggccgccacttgggcaaatgatgggctcgatgccgaacccagcaagggtaaatctaaaccagctagcgactaccttaacttcgactccgactccggccaggaatcagaggaggagggtgcgggtgaagacctggaagaggaagctagtcttgaacctaaggccgccgtgcagaaggagttgagcgacatggactacttgaagtcaaaaatggtgaaggctggatcaagttcttcctcggaagaggaagagtctgaggatgaggctgtacactgcgatgaggggtctgaagcagaagaagaggactcaagcgcaacccccgtgctgcaggagagggacagtaagggtgcggggcaggaacaaggcatgccagccgggaaaaagcgtccaccagaggcccgggcggaaactgaaaaacccgccaatcaaaaagaaccaaccacatgtcataccgttaagcttcggggggcgccatttaatgtgaccgaaaagaacgttatggaattcctggcccctctaaagcctgttgccatccgcattgtgcgcaacgctcatgggaataagacaggctatatatttgtggacttcagcaacgaggaggaagtgaagcaggctctaaagtgcaaccgcgaatacatgggtggtagatatatagaggtgtttcgcgaaaagaacgttccgactactaaaggggcgcccaaaaatacaacaaagagttggcagggtcgaatcctgggcgagaatgaagaggaagaagaccttgctgagtcgggcagactgtttgtcaggaacttgccatacacctctacggaggaagatctggagaaactgttctccaagtatggccccctatccgaactgcattatcctattgattccctgactaaaaaacctaaaggattcgctttcattaccttcatgttccccgagcacgctgttaaagcctatagcgaagtagacggccaagtgtttcaggggaggatgcttcatgttcttccgtcgacgattaagaaggaagctagcgaggacgcctcagcactgggctcttcgtcctacaaaaagaaaaaagaagcacaagacaaagcaaacagtgcctcttcccacaactggaacacactatttatgggccctaacgcagtagccgatgcaattgcccaaaagtataacgccacgaaatctcaggtgtttgatcacgaaacaaaaggctctgtggccgtgcgcgtggccctcggagaaacccagcttgtacaggaggtaaggagattcctaatagataacggggtgtcactggactccttttcacaggccgctgcagagagaagcaaaacagtaatcctggtcaaaaacctcccagcaggaaccctggcggcccagcttcaagaaaccttcggccattttggtagtttgggcagggtgcttctgcctgagggaggtataactgctatcgtcgaattcctggagccattagaagcacgaaaagcattcaggcatctggcctactccaaattccaccacgttccactttacctcgagtgggcccccgtcggcgttttcagctcaacggccccacagaaaaaaaagctgcaggacaccccctcagagccgatggaaaaggatccagccgagcccgagactgtccccgacggggagacgcccgaggacgagaacccaaccgaggaaggagccgacaatagctccgctaagatggaagaagaagaagaagaggaggaggaggaagaggagtctttgccaggatgcacactcttcattaagaatctcaactttgacacaaccgaagagaaactcaaagaagtcttctcaaaagtgggcaccgtcaagtcctgttccatttccaagaaaaagaacaaggcaggcgtgttgctctctatgggattcggcttcgtggagtatcgaaagccagaacaggcccagaaggctctgaaacaattgcaaggacatgtcgtggatgggcataaacttgaagtcaggatcagcgagcgggcaaccaaacctgcagtaacacttgcaagaaaaaaacaagtgccacgaaaacagacaaccagcaagatcctggtgcgcaatatcccattccaggcccactctcgagaaatccgggagctgtttagtaccttcggcgagttgaagacagtgcgacttccgaagaagatgactggtactggaactcacaggggtttcggttttgttgattttttaactaagcaagatgcaaagcgcgctttcaacgctctctgccatagtacacacctgtatggacgccggctggtcctggaatgggcagactctgaggtgaccctgcaggccctccggcgcaagaccgcagcccacttccacgagccacctaagaaaaagagaagtgtggttctggacgagatcctagagcaactggagggcagtgattccgattctgaggagcaaaccctccagctctag

SEQ ID NO: 15823 - DNA, 669 bp, synthetic construct
  source 1..669: mol_type = other DNA; note = Synthetic coding sequence
atggaaaggatagagggagccagcgtcggccgctgcgcggctagcccctatttgcggccgctgacactacactatcgccagaacggcgcccagaaatcatgggattttatgaaaacacatgacagcgtgaccgttctgctttttaacagcagtagaagaagcttggttctggtgaaacagttccgtcccgccgtctatgccggggaagtagagcggcgcttcccgggtagcttggccgctgtagaccaggatggaccaagagagctccagccagccctgcccggcagtgcaggcgttactgtggagctctgtgccggcctggtggaccagcccggcctcagtctggaagaagttgcttgcaaggaggcttgggaggaatgcggataccatttagctccatccgacctccgccgagtagccacctactggagtggcgtgggtcttactggctcaagacagaccatgttttacacagaggtgacagatgcgcagagaagcggccccggaggaggactggtagaagagggagagctcatcgaggtggttcacctgccgctcgagggcgcacaggcctttgccgacgatcctgacatccccaagaccctcggggtgatattcggagtatcatggttcctgtcccaagttgctcctaacctcgacctgcagtag

SEQ ID NO: 15824 - DNA, 876 bp, synthetic construct
  source 1..876: mol_type = other DNA; note = Synthetic coding sequence
atgaatatgatttggcgcaacagcattagctgtctgaggctggggaaggtgcctcacagataccaaagcggataccaccctgttgccccactgggctctcgaatcctgacagatcctgctaaagtcttcgaacataatatgtgggaccacatgcagtggagcaaagaagaagaagcagctgctagaaagaaggtgaaagagaactccgcagtgcgtgtccttttggaggagcaggttaagtatgagagagaagcatcgaagtactgggacactttttataagattcacaagaacaagttcttcaaagatcgtaactggcttctgcgggaattcccagaaattcttccagtggatcaaaagcctgaggaaaaagcacgcgagtctagttgggaccacgttaaaacaagcgccactaacagattttctcggatgcactgtccaacggtacctgacgaaaagaaccattatgaaaagtcctctggaagtagcgagggacagtcaaagaccgagtctgatttttcaaacttagacagcgaaaaacacaaaaagggtcctatggagactggactttttcctggctccaatgcaacctttcgcatcctggaagttggctgcggagctggcaacagcgtctttccgattcttaacaccctggagaactcccccgaaagttttctgtactgctgcgattttgcctctggagcggtggagttggtgaagagccattccagctacagggccactcaatgttttgctttcgtacatgatgtgtgcgacgatggattgccttacccctttccagatgggatccttgacgttatcttgctcgttttcgtgttgtcttccatccatcccgatcgcaccctcttcatatag

SEQ ID NO: 15825 - DNA, 630 bp, synthetic construct
  source 1..630: mol_type = other DNA; note = Synthetic coding sequence
atgaagaaagttaggctgaaagagctggaatccagattacaacaggtcgatggattcgagaaaccgaagctcttgcttgaacagtatccgacacgaccacacatcgccgcttgtatgctatatactatccacaacacctacgatgacatcgagaacaaggtagtcgctgacctgggctgcggatgcggcgtcttgagtattggcacagccatgttaggcgctggcttatgcgtaggctttgatatagacgaggatgccctagaaatcttcaaccgcaatgcagaggagtttgagttgaccaacattgacatggttcagtgcgacgtgtgcttgttgagtaacagaatgtcaaaaagttttgacaccgtgatcatgaatcccccattcggcactaagaacaataaaggcaccgacatggcattcctgaagaccgcgctggagatggccaggacagcagtatactcactgcataagagctcaacacgggagcacgtgcagaaaaaggccgcagagtggaaaatcaagatcgatataatagctgaactgagatatgatctgcccgcctcctataaattccacaagaaaaaatctgtcgatatcgaggtggacctcataagattcagcttctag

SEQ ID NO: 15826 - DNA, 504 bp, synthetic construct
  source 1..504: mol_type = other DNA; note = Synthetic coding sequence
atgccggcctatcactcgtccttgatggatccagacaccaaactcatcggcaatatggcactgctgcccatacggtctcagttcaagggtcctgcaccgagagagacgaaggataccgatatagtagatgaggcgatctactacttcaaggctaatgtgttcttcaagaactatgaaattaaaaacgaggccgaccgcacactcatctatatcacattatatatttcagaatgtctgaagaagcttcagaagtgtaatagtaagtctcagggtgaaaaagagatgtatacactggggatcacgaactttcccattcccggggaacctggcttccctctgaatgccatttacgccaagccggccaacaagcaggaggacgaggtcatgagagcatacctgcagcagctccgacaggagaccgggctgcggctgtgtgaaaaggtcattaagggagacttgaagttttccgccgcccttaaactcgcactgaacaagaataagtag

SEQ ID NO: 15827 - DNA, 4074 bp, synthetic construct
  source 1..4074: mol_type = other DNA; note = Synthetic coding sequence
atggctgacacagatctgttcatggagtgcgaggaggaggagctggagccctggcagaagattagcgatgtcattgaggactctgtcgtggaagactacaattcggtagataaaacaaccaccgctggtaatccgctggttcagcaggggggccagccacttatccttactcagaatccggcgcctgggttaggtaccatggtgactcagccagtgctgcggccggtccaagtgatgcagaatgccaaccatgtaacaagtagccccgtggcgtctcagcctatattcatcacaacgcagggatttcctgtccgaaacgtccgtcccgtccagaatgccatgaatcaggttggtattgtcctgaacgtacagcagggccagacagtcaggccgatcacactggtccccgctccagggacccagtttgtcaagcctacggtgggcgtgcctcaggtgttttcacagatgacccccgtcaggcccggatccactatgccggtcagaccaactaccaacacctttactaccgtgatcccggcaaccttgaccatcagaagtactgtgccacaaagccagtctcagcagaccaagagcacaccatctacgtctacgacacctacagctactcagcctacatcattagggcagctggctgtccagtcccctggccaatccaaccaaactactaaccctaagctcgccccttcgtttcccagtccgccagctgtgagcatcgcgtcatttgtcaccgttaagcgcccaggtgtaacaggggagaattcaaacgaggtggcaaagctggtgaatacccttaacactattccatctttgggacaatcccccggccccgttgttgtgtcaaataacagcagcgctcacggaagtcaacgcacctctgggcccgagagttctatgaaggtgacaagtagtataccggtctttgatttacaggatggggggcggaagatctgtcccagatgtaacgctcagttcagagtcaccgaagctctgaggggccatatgtgttattgttgtcctgagatggtggaataccagaagaagggtaagagcttagactccgagccatccgtgccaagcgcagccaaacctcccagcccggaaaagacagcaccagttgcttcaactccatcttctacacccatacctgctctctcgccgccaaccaaagttccagaacccaatgagaatgtgggcgacgccgtacagactaagctgatcatgttagtcgacgacttttattatgggagggacggcggaaaagtggcgcagctcacgaatttccccaaagttgccacctcattccgctgcccacactgcactaaacgcctgaaaaataatatccggtttatgaaccacatgaagcatcatgtggaactggatcagcagaacggggaagttgacggtcacacaatctgccagcactgctatcgccagttcagcacgccttttcaactgcagtgccatctagaaaatgtgcatagcccatacgagtctactacgaagtgcaaaatttgcgaatgggcatttgaatcagaaccattgtttcttcagcatatgaaggacactcacaaacctggcgaaatgccctacgtttgccaggtctgtcagtaccggtcctccttgtactccgaggtggacgtccacttcaggatgatccacgaagatacgcgtcaccttctgtgcccatattgtttaaaggtcttcaaaaatgggaatgccttccaacagcattacatgcgccaccagaaaagaaacgtgtaccactgtaacaagtgtagattacagtttctcttcgcgaaggacaaaattgagcacaagttgcaacaccacaagactttccgtaagccaaagcagttggagggcctcaaaccaggcaccaaggtgactatcagggcgtctcggggtcagccaagaaccgtgcctgtttcttccaacgacactcccccaagcgcactgcaggaagccgctccgctgacaagcagtatggatcccttaccggtgttcttgtaccctcctgtccagcgctctattcagaaacgggctgtacggaaaatgagtgtgatgggcaggcagacctgtttagaatgctcatttgagattccagatttcccaaaccattttcctacctatgtgcactgcagtttgtgcaggtactcaacatgctgtagccgcgcctacgcaaaccacatgatcaacaaccatgtgccacggaaatcacctaaatacttggctctgtttaaaaatagcgtgtccggaatcaagttagcctgcacttcatgcaccttcgtaacgtccgtgggggatgcgatggccaagcatctggtctttaacccatcccacaggagttcatccattctgcctagagggctgacctggatcgcccatagtcgccatggtcagacccgcgacagagtgcacgataggaatgttaaaaatatgtatccacctcccagtttccctaccaacaaggctgctactgttaagagcgccggtgctacaccagccgagcccgaggagctgctcacccccttagcccccgccttgccaagtccagcttcgactgctacgccaccccctaccccaacccaccctcaggccctagccctgccaccactcgccacagaaggagctgaatgcctgaatgtggacgaccaagacgaaggaagcccagtcactcaagaacctgaactggcatccggaggtgggggatccggaggcgtgggcaagaaagagcagctctccgtgaagaagcttagagtggtgctctttgccctctgctgtaatactgagcaggctgcagaacactttaggaacccgcagaggaggattagacgctggctgagaaggttccaggcttctcagggcgaaaacctggaaggtaaatacttaagttttgaggccgaggagaagctggccgagtgggtcctcacgcagagggaacagcaactaccagttaacgaagaaacactttttcagaaggccacgaagattggccgctccctcgaggggggttttaagatatcgtatgagtgggctgttaggttcatgttgagacaccatcttacccctcacgcccggcgcgcagtcgcgcataccctgccgaaggatgttgccgaaaatgccggcctttttattgatttcgtccagcgtcagatccacaaccaagatttgccactgtcaatgatagtcgccatagatgaaatttccctctttctggacaccgaagttttgagttcagacgatagaaaggaaaacgccctgcagacagtcgggacaggcgagccatggtgcgacgtcgtgcttgctattttggcggacggtaccgtccttcccaccctcgtattctataggggtcaaatggatcagcccgccaacatgcctgacagtatactgcttgaggcgaaagagtctggttattctgacgacgagattatggaactgtggtcaacaagggtttggcaaaaacatacagcatgccagaggagcaagggcatgctggtaatggattgtcaccgcacacatttgtctgaggaggtgctggcaatgctgagcgcatcgtctactttgcccgctgtcgttccagccggctgctcttccaaaatacagccactggatgtttgcattaagcggacggtaaagaatttcctccacaaaaagtggaaggaacaggctagggagatggcagatactgcctgtgactccgacgtattgctgcagctcgtgctggtgtggcttggcgaggtgctcggggtcatcggcgattgcccagagctcgtgcagcggtctttcctggtggcttcggttttaccagggccagacggaaatatcaactcaccaaccaggaatgcggacatgcaagaggagttgatcgcttcactcgaagagcaattaaaactcagcggagagcacagtgaaagctccacccccaggcctagatcttccccagaagagactatcgaacctgagtccctgcatcaactctttgaaggagagtcggaaaccgaaagcttctacggtttcgaggaggcagatctagacctaatggagatttag

SEQ ID NO: 15828 - DNA, 288 bp, synthetic construct
  source 1..288: mol_type = other DNA; note = Synthetic coding sequence
atgttgaaaaacaagggtcatagctccaagaaagacaatctcgccgtcaacgctgtggcattgcaggaccacatccttcatgacctccagttgaggaatctttccgtggcggaccactcaaagacgcaggtgcagaagaaggagaataagtccctcaagagggacaccaaggccattatcgacacaggcctaaagaaaaccacccagtgtccaaagctggaggactctgagaaagagtatgtcttagaccccaagccccctccactgactcttgggtaccacagctag

SEQ ID NO: 15829 - DNA, 708 bp, synthetic construct
  source 1..708: mol_type = other DNA; note = Synthetic coding sequence
atgttgaagaataaaggccactctagcaagaaagacaaccttgctgtaaatgcagtggctctgcaggatcacatcctccatgatctgcaactccgcaacttatcggtggccgatcatagcaagactcaagtgcaaaagaaggagaataagtcacttaaacgggatacaaaggctataatcgacacagggctcaagaaaactacccaatgtccaaaattggaagatagtgagaaagaatatgtcttagaccctaaaccgcctccactgacactggctcagaagttaggcttaattggacccccccccccccctttaagcagcgatgagtgggaaaaggttaagcagcggtccctgttacaaggtgactcagtgcagccatgcccaatctgcaaagaagagtttgaactgaggccacaggtgctgttgtcctgttcgcatgttttccacaaggcctgcctgcaggcttttgaaaaattcactaacaaaaagacttgtcccctttgtaggaagaaccagtaccagacaagagtcatccatgatggggcacggctgtttcgaataaagtgcgtgaccagaatccaggcttattggagggggtgcgtggtgcgtaagtggtacaggaaccttcggaagacggtaccgcccaccgacgcgaaactgcgaaagaaatttttcgaaaaaaaaacacaggactggaagcctgcctag

SEQ ID NO: 15830 - DNA, 1089 bp, synthetic construct
  source 1..1089: mol_type = other DNA; note = Synthetic coding sequence
atgctgaagaacaaagggcacagctctaagaaggacaacctcgctgtgaacgctgttgcactgcaagaccatattctgcatgacctgcaattgcgtaatctgagcgttgcagaccatagtaagacgcaggttcagaagaaagaaaataagtcccttaagagagacacaaaggcaatcattgataccgggttaaaaaagacaacacagtgccctaagcttgaggactccgagaaggaatacgtgctcgatcctaaacctccacctctgacgctggctcagaaattgggtctcatcggaccaccaccaccacctctatctagcgacgaatgggagaaggtcaaacaaagatccctgttgcaaggagacagcgtacagccgtgtccgatctgcaaagaagagtttgaacttcgccctcaggttctattgtcctgttcccacgtgtttcataaagcctgcttgcaggcatttgaaaagtttactaacaaaaaaacatgtccgctttgccgcaaaaatcaataccagaccagggtgattcatgatggcgccaggctcttccggattaaatgtgtcacacggattcaggcctactggcgcggatgtgtggtccggaaatggtataggaatctaagaaagaccgtcccccctacggacgctaagctgcggaagaagttcttcgaaaagaaatttactgagataagtcataggatcctctgcagttacaatactaacatcgaagagctctttgccgaaatcgaccagtgcttagcgatcaaccgctctgtcttgcagcaactcgaagagaaatgcggtcacgagataactgaggaagagtgggaaaagattcaggtgcaagccctgaggagggagacacacgagtgcagcatctgcttagctcccctgagtgcggccggaggccaaagggttggcgccggtcggaggtcccgagagatggcgttgctcagttgctcacatgtatttcatcacgcttgcctgttagccctggaggaattttccgtcggtgacagacccccctttcacgcttgtcctctgtgcagaagctgctatcagaaaaagatcctcgagtgctag

SEQ ID NO: 15831 - DNA, 1278 bp, synthetic construct
  source 1..1278: mol_type = other DNA; note = Synthetic coding sequence
atggacaagaacattggggagcaactgaataaggcttatgaggctttcaggcaggcctgtatggaccgagactcagctgtgaaagaactacagcaaaaaactgagaattatgagcaaaggattcgcgagcaacaggagcagctctccctacagcagaccatcatagacaaactgaagtcacagctattgctcgttaactcgacccaagacaataattacggatgtgtgcctttgctcgaggactctgaaacacgtaaaaataatctcacgctggaccaaccacaggacaaggttatctcaggtattgctagagagaaattgcccaaagtaaggagacaggaggtgagcagccctcgcaaagaaacttccgcccgatcactcgggagccccctgctgcacgaacggggcaacatcgaaaagaccttttgggatttgaaagaagagttccacaaaatatgtatgctggccaaggcacagaaagatcacctcagtaagctgaatattccagatactgccaccgagacacagtgctctgtgccaattcagtgtacagataagactgacaaacaggaagcactgtttaagccccaggcaaaggatgatatcaatcgaggcgcccccagtatcacctcggttacccctcgaggcctgtgccgtgatgaagaggataccagcttcgagtccctgtccaagttcaatgttaagttccctccaatggataacgatagcactttcctgcactcgaccccagaacgtcccgggattctgtccccagccactagtgaagcagtctgccaggagaaattcaatatggaatttcgcgataaccccggtaacttcgtgaagactgaagagaccctgttcgagatccaaggcatcgatccgatcgctagtgcaattcaaaacctgaagaccactgacaaaacgaaaccatccaacttagtgaatacatgcattcggacgacgttggacagggcagcctgcctgcccccaggcgatcataacgccctgtatgtgaacagttttccactgctggacccaagcgacgcacccttcccttcgttggacagccctggaaaagccataagagggccacagcagcccatatggaagcccttccccaaccaggactctgactccgttgtacttagcggcaccgacagcgagcttcacattccacgggtgtgcgaattctgtcaggcagtgttcccacccagtatcacctcgcgcggtgatttcctgaggcaccttaacagccattttaatggagagacttag

SEQ ID NO: 15832 - DNA, 639 bp, synthetic construct
  source 1..639: mol_type = other DNA; note = Synthetic coding sequence
atggctccttggggtaagcgactggcaggtgtgaggggtgtgctcttggacatatctggcgtgctttacgactcgggggccggcggcgggacggccatagcagggtcagtggaagcagtagcgagattgaagcgatctcgtcttaaggtccgattctgtaccaacgaaagtcagaagtcccgcgcggaactagtgggtcagcttcagaggctcggatttgacataagcgagcaggaagtgaccgcccccgcacctgccgcgtgtcagatacttaaagaacaggggctgcgcccttatttgttgatacatgacggcgtgcgtagcgagttcgatcaaatcgatactagcaaccccaactgtgtcgtgatcgccgacgcgggagagtctttttcatatcagaacatgaataacgcttttcaagtgctcatggaattagaaaagccggtgctgatcagtctgggcaagggacggtactataaggagacgtcgggattaatgctggacgtgggtccctacatgaaggccctggaatacgcttgcgggatcaaagctgaggtggtgggtaagccgagtcccgaattcttcaaatcggctttgcaagccataggtgtggaggctcaccagctcttatctgtgtag

SEQ ID NO: 15833 - DNA, 2868 bp, synthetic construct
  source 1..2868: mol_type = other DNA; note = Synthetic coding sequence
atggaagtgggcagtgaggaggagaaatgggagaaactggatgcggagtttgatcacttcgtggtggatatgaaaccttttgtgctgaaactgccccacagaaccgaaaggcagcgctgtgcgctgtggatacgtaaactctgtgaaccttccggaaccggcgcggggatcatgggtaggaagaaccgcaacctgtatgccaaactgctgctacatatgctgaaacgcggggccctggaaggcccatttacccaccgcccggagccaggcacactaaagatcctgccgtcatatatgtctatatattttgatgaaccaaatcctgcacgggcgaagggcagctctcctgagggtttgcccgcctgggtcctcggcgaactcgagaccagtgagcacaagctgaacgaaagctggaagctgtcctcaggggaagacaacacactagtgcagtcccccacagacgtgtacagtagagaacaatataccggcaagctgcgggttcgttctcactctctgtctccgacccatcgtgaggacgggcaaaatattactccaaaaatttgcgaagtgtatagcaagaagtctccggtctcactcgatgactctgacatcgaggcccggttgaactcctggaacctcggtatcgagaacccccgttacttgagacagaaaccaattcccgtgtccctaatgacgccaaagttctcgctgcgcaagagttccagttttcacgatgaccattttctgtctcggatccgggagaaggaactggacatgaagaccaagatgatggaggccaagtttcacgaggagaagctcaagctgcagcagaagcatgatgcggatgtccagaaaatactggaacggaagaacaatgagatcgaggagctcaaaaccctttacaggtctaaacaacacgaaacagaagaaacgatccggaagcttgaaaaaaaggtccagaccctcatacgggattgtcaagtaatcagagagactaaagaagatcagattgccgaactgaaaaaaatttgcgagcagtcaacagaaagcctcaacaatgactgggagaaaaagctacataacgccgtggcagagatggagcaagaaaagttcgatctgcaaaagcaacacaccgaaaatatccaagagctgctagaagacacaaacgtccgccttaataagatggagagtgaatacatggctcaaacccagtccaccaatcacatgatcaaagaactggaagcgcgggtgcagcagctgacaggtgaggctgagaatagcaacctgcagcgacagaaactgatccaagagaaggccgagctggaaagatgttaccagattacttgctctgaactgcaggaggtgaaagctagaaggaataccctgcacaaagaaaaagaccacttagtgaatgattacgaacagaacatgaaactgctccagacgaagtacgacgctgatatcaatctgttaaaacaggaacatgcgctgtcggcaagcaaggccagctctatgattgaagaactggagcaaaacgtatgccaactgaagcaacaactgcaggagagcgagctgcagagaaaacagcagctgagagatcaggaaaacaagtttcaaatggagaagagccatctgaagcatatctacgagaagaaggcccatgacctacagagtgagctcgacaaaggaaaagaagacacccagaaaaaaatacacaagtttgaggaagcacttaaggagaaggaggagcagcttacacgtgtcactgaggttcagcggctgcaggcccagcaggccgatgccgctctggaggagttcaagcgacaggtggagctgaactccgagaaggtgtacgctgagatgaaagaacagatggaaaaagtggaggctgatctaacgagatccaagagtttaagagaaaaacagtctaaagagtttttatggcagctcgaagacatccgccaacgctacgagcagcagatcgttgaacttaaactggagcatgagcaagaaaagacacacctcctacagcagcataatgcagaaaaagacagcctcgttcgggatcatgagagagaaatcgaaaacttggaaaagcagctgagggcagctaacatggaacacgagaaccagatacaagaatttaagaaacgcgacgcacaagtcattgctgacatggaagcccaggtgcacaagctgcgggaggagctgataaatgtgaattcacaacgcaaacagcagctcgtggagctgggcctactgagagaagaggaaaaacagagagccaccagggagcacgaaattgtggtgaataagttgaaggccgaatcagagaaaatgaaaatcgagctgaaaaaaacccacgctgccgaaactgaaatgaccctcgagaaagccaacagcaaactcaagcaaatcgaaaaagaatatactcagaagctggcaaagtcgtctcagataatcgccgagctacagacgaccataagtagtcttaaggaagaaaacagccagcagcaattagccgcagagagacgtcttcaagacgtgcggcagaaattcgaagatgagaagaagcagctgatcagagataatgatcaggccatcaaggtgttacaggatgagcttgagaataggtcgaaccaagtgagatgtgccgagaagaaactccaacataaggaactggagtcacaagaacagatcacttacatcagacaggagtatgaaactaagctgaagggacttatgcctgccagtctaaggcaggaactcgaggacacaatttctagcctcaagagccaggttaatttcctccagaagcgggcaagcattctgcaggaagaacttacaacctatcaaggcaggaggtag

SEQ ID NO: 15834 - DNA, 1269 bp, synthetic construct
  source 1..1269: mol_type = other DNA; note = Synthetic coding sequence
atgccgcgtaaggggacacagccatctacagcccggaggagggaggaaggcccccctccaccatcacctgatggtgccagctctgatgctgagcctgagcctccgagcggacgaactgaaagccctgccaccgctgccgagacagcgtccgaggaactcgataatcgttcactggaggagatcctcaattccattccccccccgcctcccccagccatgactaatgaagcaggtgcgccaagactgatgattacccatattgtcaatcaaaactttaaatcatacgccggtgagaagatactgggtccatttcacaaaaggtttagttgcatcataggtcctaatggctcaggcaagtccaacgtgattgatagcatgctttttgttttcggatatcgagcccagaaaatacggagtaaaaagctcagtgtgctcatacacaactccgacgaacacaaggacatccaatcttgtaccgtcgaagtgcatttccagaagatcatcgataaagaaggtgacgattacgaggtcatcccaaactccaacttctatgtgagccgcaccgcatgccgcgataacacctcagtctatcacatctctggtaaaaagaagactttcaaggatgtgggtaacctcctcaggtcacatggaatcgatctagaccacaataggttccttatcctccagggggaagttgaacagatcgccatgatgaagcccaaagggcaaacagagcacgatgagggaatgctcgagtatttagaagacattatcggatgtggtaggctgaatgagcctatcaaggttctgtgccgccgggtcgaaatactaaatgagcacaggggtgaaaaactcaatcgggtgaaaatggtggagaaggaaaaagacgccctggaaggtgagaaaaacatagcaattgagttcctcaccctggagaacgaaatcttccgtaaaaaaaaccatgtgtgccagtattatatttacgagctacagaagagaatcgcagaaatggaaactcagaaggaaaagatccacgaggacaccaaggagattaatgaaaagagcaatatcctgagcaacgaaatgaaagcgaagaacaaggacgtgaaggataccgagaaaaaactcaataagatcaccaagtttattgaagaaaataaggaaaaattcacccagctggatttggaggacgtacaggtcagagaaaagctcaaacacgccacctccaaggccaaaactggtgagaccacgagtaagcgtaagaagtag

SEQ ID NO: 15835 - DNA, 303 bp, synthetic construct
  source 1..303: mol_type = other DNA; note = Synthetic coding sequence
atgcgcaagcggctctcggctcctgaactccggctctctcttacgaaggggccaggtaacgacggggccagtccaacacagtccgctccctccagcccagacggcagttctgatctcgaaatcgatgaactcgagaccccatctgactctgagcaattggattctggtcatgagttcgagtgggaggacgagctcccgcgggctgaaggacttggcacttccgaaaccgccgaacgattgggccggggctgtatgtgggacgtgacaggcgaggatgggcaccactggcgagttttccgctag

SEQ ID NO: 15836 - DNA, 1059 bp, synthetic construct
  source 1..1059: mol_type = other DNA; note = Synthetic coding sequence
atgggcaaagtagagaattcaaagtcggcgcaaggcctcgccggtctcaggaatctcgggaatacctgttttatgaattcaatcctgcagtgcctgtctaacaccagggaactgcgcgactactgcttgcaacgtctgtacatgagagaccttcaccacggatccaacgctcacaccgcacttgtggaagaatttgccaagctcattcaaaccatctggacctcctccccaaacgatgtagtctcgccttctgaatttaaaacgcagatccagcggtacgctcccagatttgtgggctataatcagcaggacgctcaggagttcctgagatttctcctggacggacttcacaacgaagtgaatcgcgtgacactgagaccaaagagcaatccagaaaatttagatcacctacctgacgacgagaagggccggcagatgtggcggaaatacttagagagagaagattcaagaataggggacttgtttgtgggccagctgaagagttcacttacatgcacggactgcggatattgtagcaccgtctttgatcccttttgggaccttagtctgccaattgcaaaacggggataccccgaggtcactctgatggattgtatgcgcctgttcacaaaggaggatgttctggacggtgatgagaaacccacctgctgtcgttgtcgtggaaggaagcggtgtatcaagaaatttagcatccagcgcttccctaagattctggtgctgcatttgaagagatttagcgaaagtcgcattcggactagcaagcttactacatttgttaatttccccttgcgcgacctcgacctgagggagtttgcatctgagaatactaatcacgctgtgtacaacctctacgccgtttcaaaccactccgggaccactatgggcggtcactacaccgcctactgtcgatcccctgggaccggggaatggcacacattcaacgattcttccgtaactcctatgagctcatcacaggtgagaactagcgacgcctaccttctgttctacgaactcgcctcaccaccttctaggatgtag

SEQ ID NO: 15837 - DNA, 1497 bp, synthetic construct
  source 1..1497: mol_type = other DNA; note = Synthetic coding sequence
atggtgatcgaggaagttaacttcatgcaaaaccacctggagattgaaaagacgtgtagagagtccgcagaggcccttgccacaaagctgaacaaagagaataaaaccctgaaaagaatcagtatgctttacatggcaaagctgggacccgacgtgattactgaggagattaatattgatgacgaggactctaccacagatactgatggcgctgccgagacctgtgtttctgtacagtgtcagaaacagatcaaagagttgagagaccagatcgttagtgtgcaggaagaaaagaaaatcctggccatcgaactcgaaaacttgaagagcaagctggtcgaggtcatcgaagaggtgaataaagtgaagcaagaaaagaccgtcctcaacagtgaggttctcgaacagaggaaagttttggagaagtgcaatagggttagcatgcttgccgttgaggagtacgaggagatgcaggtgaatcttgagttggagaaagacctaaggaagaaggccgagtcttttgcgcaggagatgtttattgaacagaataaactcaagcgccagtcccacttactgctccagagcagcatcccggatcaacagttactgaaagccctggacgagaatgctaagctgacacagcagttagaggaggagaggattcagcatcagcagaaagtgaaggaactggaagaacagcttgaaaacgaaacactgcacaaggagatccacaaccttaagcagcagctcgaacttctggaggaggataaaaaggagttggagctcaagtaccagaattctgaggagaaggcccgcaatctcaaacatagtgtcgacgagttacaaaagcgggtgaaccaaagcgaaaactctgtgccacctcctcctcctcctcccccccctctgccacctcccccaccaaacccgattcggtctttaatgtccatgattagaaaacgatcacacccatcaggcagtggtgcaaaaaaggagaaagctacccagcccgagaccacagaggaagtcacagatttgaagaggcaagctgtggaggaaatgatggatcgcattaagaaaggcgtgcacctgcggcctgtaaaccaaactgctaggcctaaaacaaagcccgaatcatctaaaggatgtgagagcgccgtggacgagctgaaaggcatccttggaactctcaacaagagtacgtcttcaaggagcctgaagagtcttgatcctgagaacagcgagaccgaactcgagaggattctgaggcggcggaaagtgactgccgaggccgattcttcttcccctaccgggatcctggcgactagcgagagcaaaagcatgcccgtgttaggctctgtctcttcagtgaccaagacagcactaaataagaagacactagaggccgaatttaattcgccctcaccgcctacccccgagccaggcgaaggaccccgaaaattggagggctgtacatcttctaaagtgactttccaatag

SEQ ID NO: 15838 - DNA, 1950 bp, synthetic construct
  source 1..1950: mol_type = other DNA; note = Synthetic coding sequence
atgaacagtagcgacgaagagaaacagctgcaactgatcacaagtctgaaggaacaggccatcggtgagtacgaggatctccgtgcagaaaaccaaaagaccaaggagaagtgcgataaaattaggcaggaacgggacgaggctgtaaagaaactggaggagttccagaaaatctcccatatggtaatagaggaggtcaactttatgcaaaatcacctagagattgagaagacttgtcgggaatccgcagaggcactggcaaccaaacttaacaaggaaaataagactctcaaacggatttctatgctgtacatggccaagctggggccagatgtcatcacagaggaaattaacatcgatgacgaagattctacaaccgacacagacggagctgccgagacatgcgtgagtgttcagtgccagaaacagattaaagaattgcgtgatcaaattgttagcgtacaggaagagaaaaaaatccttgccatcgaactggaaaatcttaaatctaaattggttgaggtcattgaggaggtaaacaaggtcaagcaggaaaaaacagtactgaattccgaagtgctggagcagagaaaggtcctggaaaaatgcaatcgcgtttcaatgctcgccgtcgaagagtacgaagaaatgcaggtgaatctggaacttgagaaagatttgagaaagaaggcggaaagcttcgcgcaggagatgttcatcgaacagaataaactcaagcgccagtctcatctgttactgcaaagttctattccagaccagcagttacttaaagcccttgacgagaatgccaaactgacacaacaactggaggaggagcgaatacagcaccagcagaaagtgaaagaactcgaggaacaattagagaacgagactctgcataaggagatacacaacctcaaacagcagctcgaactcttagaagaggacaagaaggaattggagctcaaatatcagaactctgaagaaaaagcacgcaatcttaagcacagcgtcgacgaattgcagaagcgcgtgaatcagtctgagaattcagtgcctccaccacccccgccaccacctcccctaccccctccccctccaaaccctatcagatcgctcatgagtatgattcggaaaaggagccacccctcaggaagtggagccaagaaagagaaagctacacagcctgagaccaccgaggaagtgaccgacctgaagaggcaggctgtggaagaaatgatggatcggatcaagaaaggagtccacctccggccagtgaaccaaacagcacggccaaagacaaagccagagtctagtaaggggtgtgagagcgcggtcgatgagttgaaaggcatcctgggtactctgaataaatcaactagttcacgctccctcaagtccctagaccctgaaaacagtgagaccgaactggaacgcatcctccggcgccggaaggtaactgctgaggcagactcctcatcgccaaccgggattttagccactagcgaatcaaagagcatgcccgtacttggcagcgtctcgtctgtgacaaagactgcactgaataagaagaccttggaagccgagtttaattccccaagccctcccacacccgagcccggagagggaccacggaagctcgaaggatgtacttcttcgaaagtcacctttcagcctccctcatcaattggctgtcgaaagaaatacatcgacggggaaaagcaagctgagcctgttgtggtgctcgacccagttagcacacatgaacctcagacgaaagatcaggtggctgagaaggatcccacccagcacaaagaagatgaaggagagatacagcctgagaacaaagaagatagcatcgagaacttctttcctttccacttcggtttcgaaggggtgttgccactagccggcgtaactctctccactaaagcccgcgacccaaagtag

SEQ ID NO: 15839 - DNA, 837 bp, synthetic construct
  source 1..837: mol_type = other DNA; note = Synthetic coding sequence
atgggaaaaagttccgaatggtgtgagagaattgcgggaatccagaagttcgtgttggagaaatggacaaaaaaggccaagcctgaggatactctgaatctgtgtcaactgctaaacaatgacttggcgagcacggtcgtgtcctatcctagaaggttcgttggcctgggcactctgccaatgcaggcaccggagcttgctgtgaaagagatggagcgctgcgtgaaggagctgggcttccccggcgttcagatcggaactcacgtcaacgaatgggatttgaacgctcaagaactgttccctgtgtacgctgccgctgagagactgaaatgcagcctgtttgtccacccctgggacatgcaaatggacggcaggatggccaagtattggctcccatggcttgtcggcatgcctgccgagacaactatagccatctgttctatgataatgggtggcgtgtttgagaaattccccaagctgaaagtgtgctttgctcacggcggtggggccttcccattcaccgtaggcagaatatcccatggcttcagcatgagacccgatttatgtgcccaagataacccgatgaacccgaaaaagtaccttgggagcttctacaccgatgccctggttcacgatccactctcacttaagctgttgactgacgtgatcggcaaggataaagtgatcctgggaaccgactatccattccccctgggcgagctcgaacccggaaaactgatcgagagcatggaggagttcgatgaggaaaccaaaaataaactgaaagccgggaatgcattagcttttctagggctggagagaaaacagtttgagtag

SEQ ID NO: 15840 - DNA, 1368 bp, synthetic construct
  source 1..1368: mol_type = other DNA; note = Synthetic coding sequence
atgttcacagagggtgaggagatgtacctgcaaggcagcactgtttggcacccagactgtaagcagtcaaccaaaacggaggagaaactaaggcttcctaatatacggagaagtagctccgatttcttctactccaaaagcctgatccggcgcaccgggaggtctccttcactacagccaacccgcacaagcagcgaatcgatctattcccgcccaggatcgagtatccctggttcacctggacacactatctatgccaaagttgataatgagattctggattacaaggatctggcagccatcccaaaagtgaaggccatctacgatattgagcgccccgacctgatcacatatgaaccattctacaccagtgggtatgatgataaacaggagagacagagcttaggtgaaagtccccggaccctgtctcccactccctccgcagaagggtaccaggatgtaagggacaggatgattcaccgctccacatcacagggctcaataaatagtccagtgtactcacgccattcatatacacctactacatcccgtagtcctcagcatttccataggccggatcaggggatcaatatctatcgcaaacctccaatttacaagcagcatgctgcactcgcagcacaatctaaaagctctgaggatattataaaatttagcaagttcccggccgctcaggctcccgatccaagtgagacgcccaagatcgaaaccgatcactggcccggtccaccttcgttcgccgtggtgggccccgatatgaagcggaggtcctctggccgcgaggaagatgacgaggagctcttgcggcggagacaactccaggaggagcagcttatgaagcttaactcaggcctcggacagctgattctcaaagaggagatggagaaagagtcccgggaaagaagttcattactggccagtagatacgattctccaattaattccgcttcccacatcccaagttctaaaactgccagccttccaggctatgggcgtaatggcctgcacagaccggtgagcactgatttcgcgcaatacaattcttatggcgatgtatccggcggcgtcagggactatcagaccctcccggatggccacatgccggctatgcgcatggataggggcgtgtcgatgcctaatatgctggagcctaaaattttcccgtacgaaatgctgatggtcaccaatagggggcggaataaaatcctgcgcgaggtggacagaaccaggctggagcgtcatttggctcctgaagtgtttcgtgagatcttcggtatgtcgattcaggagttcgatcgcctccctctgtggagacgaaacgatatgaaaaagaaagccaagctgttctag

SEQ ID NO: 15841 - DNA, 1959 bp, synthetic construct
  source 1..1959: mol_type = other DNA; note = Synthetic coding sequence
tagagccatgcgttcatcagccagtgggtctgccgccactggagagacccggtcgcacatccgcaggacccgcatcacccgtcagaaaagcccgtgatccattgtcacaaatgcggtgaaccttgcaagggtgaggtgcttcgagtgcagacaaagcacttccacatcaaatgcttcacctgcaaggtctgcgggtgtgacttagcgcagggcggcttcttcattaagaacggcgagtatctgtgtacattggactatcaccctaattgcttcgcttgcaccatctgcaagagaccgtttcctcccggggatagagtgacctttaacggccgcgactgcctctgccaactgtgtgcgcagcccatgtcttcctctccgaaggagactacattcagcagtaactgcgccggatgcggtcgggatataaagaatggacaggctcttttggctctggataagcagtggcaccttggttgtttcaaatgtaaatcttgcggtaaggtgcttacaggtgaatacatcagcaaagatggggctccatactgtgagaaagactaccagggtctgttcggagtgaagtgtgaggcctgtcatcagtttattactggaaaagtccttgaggcgggcgacaagcattatcacccgtcctgtgcgaggtgttctcgctgtaatcaaatgtttaccgagggcgaggagatgtacctccagggcagcacggtgtggcaccctgactgtaaacagtccaccaagacggaggagaaactcagaccgacgagaaccagcagcgaatcaatctactcacggcccggctcttcaatcccaggtagtcctgggcacactatttacgcgaaggtcgacaacgagatattagactataaggacctggccgccattcctaaggtgaaggcaatctatgacatcgaaagaccagatcttataacctacgagcctttctacacatcagggtacgacgataaacaggaacgacaaagtctgggcgagtctcctcgaaccctgtccccaaccccaagcgctgaagggtatcaagatgtgcgggatcggatgatacaccggtctacttctcaaggaagtatcaattcgcccgtgtactccaggcacagctacactcctacaacgtcacgctcccctcaacacttccacagacccgaccaggggattaacatctatcggaagcctcccatctataagcagcatgctgctctggctgcccagtccaagtcttccgaggacatcatcaagttctcaaaattcccagccgcacaagctccagatccttctgaaacccctaagatcgagactgatcactggcctggtccaccctcctttgccgtcgtggggcccgatatgaaaaggcggagctctggacgagaggaagacgatgaagagctactgcggcgcaggcagctccaagaggaacagctcatgaagctcaattcaggcttaggccagctgattctcaaagaagagatggagaaagaatctcgcgaacgctccagcctgttggcctccaggtatgatagccctatcaactctgcaagccacataccaagctccaagaccgccagcctgcctgggtatgggcggaacggcttacaccgaccggtgtccaccgacttcgctcaatataactcatacggcgacgtttccggtggggtccgcgactatcaaaccctgcccgatggccatatgcccgccatgcggatggacaggggagtcagcatgccaaacatgttggaaccaaaaatattcccctatgagatgcttatggtcaccaataggggaaggaacaagatactaagggaagtcgaccgaacccggttggaacgccacttggcccccgaggtctttagagagatttttggcatgtcgattcaggagtttgatagactgccgctgtggaggagaaatgatatgaaaaagaaagctaaactgttctag

SEQ ID NO: 15842 - DNA, 837 bp, synthetic construct
  source 1..837: mol_type = other DNA; note = Synthetic coding sequence
atgacccagcagtggcgcgaagtgaatgaagatcgcgaagccgtcgctcaggcaaggtcctggcagtccctgaatttgggcgacagggatatgggagttagctttatcgagaccgcactggctctgtccgcggccagagccagacgacctcttcttactagtcacccaccctccaggccttttcagcctccaaaacacacacctagcccaccgcctgctccgcgggtgaattcaaggcaccccggtagatcagtgtctctgagcttaccctctgccagtcaggccccacccgtgcccctagcctcccccgaggggaggccacacaccgttggtgccccacatgcctcaacatggaagcggacgcgcggcaggcagcgtgcccgccctccaaagattgtgaaggaagctgaagtgccgcaagcagcccttggcgtcccggcgcagggaacgggagataacggtcatacacccgtggaggaggaggttggtggaatcccagtcccggccccagggctactccaggttactgagcgtaggcaacctttaagctctgtgtcatcgctcgaagttcatttcgacttgttagatctgacggagctcaccgatatgagtgatcaggagcttgctgaagtgttcgctgattccgatgacgagaacctcaacactgagagcccggccggtctacatcccttaccaagggccggatatctgaggagcccgagctggacacgtacacgggcagagcagagccacgagaagcagcccttgggagaccctgagagacaggctaccgtcctggacaccttcctcacagtagaaagacctcaggaggactag

SEQ ID NO: 15843 - DNA, 540 bp, synthetic construct
  source 1..540: mol_type = other DNA; note = Synthetic coding sequence
atgactgacctggtcgccgtgtgggatgtggcgctttctgatggagttcacaaaatcgaattcgagcatggcaccacgtcaggcaagagagtggtgtacgtggatgggaaggaggagattaggaaggagtggatgtttaaactcgtaggaaaggaaactttctatgtgggagctgctaagacaaaggcaactatcaacatagatgctatttccggcttcgcatatgagtacacgctagagatcaatggaaagagcctcaagaaatatatggaggaccgctctaagacgaccaacacatgggtcctccacatggacggcgaaaattttcgcatagttctggagaaggatgcaatggacgtgtggtgtaatgggaagaagttggagacggccggcgagtttgttgatgacgggacggaaacccatttctccatcggtaaccacgattgttacattaaagcagtatcttctggcaagaggaaggagggcattatccacacactgatcgttgacaaccgcgagatccccgaaatcgcctcatag

SEQ ID NO: 15844 - DNA, 540 bp, synthetic construct
  source 1..540: mol_type = other DNA; note = Synthetic coding sequence
atgacagaccttgtcgctgtatgggatgtcgccctgtccgatggggtccacaaaatagagtttgaacatggcacaacatctggcaaacgggtggtgtacgtggacgggaaggaggagatcagaaaagagtggatgttcaaactggtgggtaaggagacattctatgtgggagcggccaaaaccaaggcaacaatcaatattgatgccatcagtggattcgcctacgaatacactcttgagattaacggtaaaagtctgaagaaatatatggaagaccgcagcaagaccaccaacacttgggtgctgcacatggatggcgagaacttcaggatcgtactcgaaaaggacgcaatggatgtctggtgtaatggtaaaaagctggaaactgccggggagttcgtggatgacggtactgaaacccatttctctatcggcaaccatgattgctacataaaagctgtgtctagcggaaaacggaaagagggtatcattcatacactgatcgtggacaatcgcgagatccctgagattgcctcctag

SEQ ID NO: 15845 - DNA, 1053 bp, synthetic construct
  source 1..1053: mol_type = other DNA; note = Synthetic coding sequence
atggggccttgcaatctatccagcgctgctggccctaccgctgagaagtctgtcccataccagaggacattgaaagagggacaaggtacttccgttgtagcccagggccccagtcgacccctaccttccactgccaatgtggtggtgattggggggggtagcctggggtgccagactctttaccatctcgccaagcttggaatgtctggcgctgtgctgctggagcgagaacgtctcacaagcggaactacttggcacaccgccggtctactgtggcagcttcggccgtctgatgtcgaagtagagctgctggcgcatacgagaagagtagtttccagagagcttgaggaggagactgggcttcataccgggtggattcagaacggtgggttgtttattgcctccaatagacagcggctcgacgagtacaagcgactaatgagcctggggaaagcttatggggttgaaagtcatgttctgtcccctgccgaaacgaagacactctaccccctcatgaacgtcgacgacctctacggtaccctgtatgtgccgcacgacggcactatggatcccgcgggcacttgcaccaccctggctagagcagcaagcgcaaggggtgcacaggtgattgaaaattgtcctgtgaccggcattcgtgtctggactgacgacttcggggtgcggcgcgtcgctggcgtggaaacgcagcacggatccattcagactccctgtgtggtgaattgtgctggcgtttgggctagtgcagtggggcgaatggccggcgtgaaagtgcctctcgttgccatgcaccacgcctatgtcgtgacagagagaattgaaggcattcagaatatgcccaatgtgcgagatcacgacgcatccgtctatctcagacttcagggggatgcgctgtcagtgggaggttacgaggcaaaccccatcttctgggaggaggccgtgaagtaccgccccagggctgcaggagggttgtgcctaaagacctctacagaaaaagtgtgtgcagtatggtcggacgatctccggcgggcctag

SEQ ID NO: 15846 - DNA, 2001 bp, synthetic construct
  source 1..2001: mol_type = other DNA; note = Synthetic coding sequence
atggcacgggcggggtcatgtgggggtgctgcagcaggagcgggtagacctgagccatgggagctgagccttgaggaggtactcaaagcgtacgagcaaccacttaacgaagagcaggcttgggcagtgtgcttccagggttgtagaggactgaggggaagtcctggaagaaggttacgtgacacgggggaccttctgctgcgaggcgatggttcagtgggagcgcgggagcccgaggctgctgaacccgcgaccatggtggtaccgcttgcttcctctgaagcacaaaccgtgcagtcactgggcttcgcaatttaccgcgcactggactggggcctggatgagtccgaggagcgggaactatcaccacaattagagagactgatcgacttaatggctaacaatgactcagaagatagcggctgtggcgcagcagatgaaggatacggtgggcccgaggaggaggaggaggcggagggcgtaccacgcagtgtccggactttcgcgcaagcaatgagactgtgtgcagcccggctgaccgatcccaggggggcccaggcacactaccaggcagtgtgcagagcactcttcgtggaaactctagaattgagagcatttctcgcaagagtgcgggaagctaaagagatgcttcagaaactgagggaagacgagcctcacctggagacgccaagggccgaactggacagcctgggccatacagactgggctcgcctgtgggtgcagctcatgcgtgaactgcgaagaggagtcaagctgaaaaaggtccaggagcaagagttcaatcccttgccaactgagtttcaactcactccctttgaaatgttgatgcaggatatccgggcacggaactataaattgagaaaagtgatggtcgacggcgatatccccccaagggtcaagaaggacgcacacgagctgatcctcgactttatcaggtcaaggccccccctgaagcaggtgtcagaacgccgtctgcgtccactgccaccaaagcagcggtccctccacgaaaaaatactggaagagataaagcaggaacgcagactgaggccagtgagaggagagggatgggcggcgcgtggatttggcagcctgccttgtattttaaatgcttgttccggtgacgccaagagtactagttgtattaatcttagcgttactgatgccggcggctccgcacagcggccaagacctagggtgcttcttaaagcacctaccctggctgaaatggaggaaatgaatacatctgaagaggaagaaagcccttgtggcgaagtgaccttgaagcgggatcgctccttcagtgaacacgacttagcccaacttagatccgaggtggcctcaggtctccagtcggccacacatcccccgggggggacagagcctcccagaccccgcgcaggaagcgcccatgtgtggcgcccggggagcagagaccagggaacatgccctgcaagcgtctctgaccccagccacccattactcagcaatagaggatcaagcggggaccgccctgaggcgagcatgactcccgacgccaaacatctctggttggaattctctcaccccgtagagtcattagcgctcacagttgaggaggtgatggacgtgcgtagagttctggttaaagccgagatggagaagttcttacaaaacaaggaacttttttcatccttgaagaagggaaaaatctgctgctgctgtagagctaagttccctctcttttcatggcctcctagttgtctcttctgtaaaaggtccctgcagggacctcagtggcagagcgtcgaagaggccttcccccatatatatagccacggctgcgttctgaaagacgtctgtagcgagtgcacctcttttgtcgccgatgtggtgcgttcctccaggaaaagtgtggatgttctgaatactacgcctcgaaggtccagacagacgcagtcactgtacatccctaatacacggacattggacttcaaatag

SEQ ID NO: 15847 - DNA, 474 bp, synthetic construct
  source 1..474: mol_type = other DNA; note = Synthetic coding sequence
atggagacacttcagtcagagacaaaaaccagggtactcccttcttggctcaccgctcaagtggccactaagaacgtagcccctatgaaggcacctaaacgcatgaggatggcggccgtccctgttgcagccgctcgcctgcccgccacccggacggtgtactgcatgaacgaggccgagatcgtagacgtggccctcgggatattaatcgaatctcgcaagcaggagaaggcttgtgaacaacctgctcttgctggggctgacaatccagagcactccccaccatgcagcgtctcaccccacacctcatcaggcagttcctctgaggaggaagactccggcaaacaggcactggctcccgggttgtctccaagtcagcgtccaggtggaagctctagcgcgtgttccagatcaccagaggaggaggaagaagaggacgtacttaaatacgtgcgggagatattcttcagctag

SEQ ID NO: 15848 - DNA, 804 bp, synthetic construct
  source 1..804: mol_type = other DNA; note = Synthetic coding sequence
atggcaaactgcgagcgcacgttcattgccattaagccagatggggtacagaggggattggtgggcgagataatcaagcggtttgaacaaaaagggtttcggctcgtgggactgaagttcatgcaggctagcgaggatctgctgaaggagcattatgttgaccttaaggaccgtcccttcttcgccgggcttgtaaaatacatgcattctgggcccgtagtggccatggtctgggagggacttaatgttgtcaaaactggcagagtcatgctcggagagacaaacccagctgactcgaaacctggaactattcggggggacttctgtattcaggtcggtcggaccatggcaaatctggagcgcacatttatcgccattaagccggatggggtgcagcgaggtctggttggggaaatcattaagcgcttcgagcagaaaggttttagactggtcgcaatgaaattccttcgcgcctcagaagaacacttaaaacagcattacatcgacctgaaggacagaccatttttccccggactggttaaatatatgaattccggtcctgtcgtggcaatggtgtgggagggactgaatgtggtgaaaacggggcgagtgatgctcggcgagactaaccccgccgattccaagccaggtaccatcagaggggacttttgcatacaagtagggcgaaatatcattcacggctctgactctgtgaagtcagcagagaaagagatatccttgtggttcaagccagaggaactggtggactataagtcatgcgctcacgactgggtctacgagtag

SEQ ID NO: 15849 - DNA, 879 bp, synthetic construct
  source 1..879: mol_type = other DNA; note = Synthetic coding sequence
atggtcctcctttcgaccctgggcattgtcttccagggcgagggccctcctatttccagctgtgatactggcaccatggctaattgtgagcgtacatttatagcaattaaacctgatggcgtccaaagaggactagtgggggaaataattaagcgatttgagcagaagggatttagattggtgggcctgaagtttatgcaggccagcgaggatctgctcaaggaacattacgtcgacctaaaggatagacccttcttcgctgggttggtgaaatacatgcatagcggcccggtggttgccatggtatgggaaggactgaatgtcgtcaagaccggacgtgttatgctcggagagaccaacccagccgactcaaagcccggcacaatcagaggggatttctgcattcaggtgggccgcaccatggccaacctagagcgtaccttcatcgctatcaagcctgacggcgtccagagggggctggtcggcgagatcattaagcgcttcgaacagaaagggttcagactcgtcgcaatgaagttccttagagcatcagaagagcacctgaagcagcattacattgacttgaaggacagacccttcttcccgggcctggtgaagtacatgaattccggcccagtggtcgctatggtgtgggagggactgaacgtcgtgaagacaggacgcgtcatgctgggcgagaccaatcccgccgattctaaacctggcaccatccgcggtgatttctgcatccaggtgggccggaacatcatccacggcagcgacagcgtcaagagcgccgagaaagaaataagtctgtggttcaaacctgaggagcttgttgattataaatcttgtgcccatgactgggtgtatgagtag

SEQ ID NO: 15850 - DNA, 492 bp, synthetic construct
  source 1..492: mol_type = other DNA; note = Synthetic coding sequence
atgaaaagcagccaaacttttgaagaacaaaccgaatgcatcgtgaataccctgctgatggatttcttgtccccaactttacaggtggcgagtcgaaatctgtgctgcgtcgacgaagtagactcaggtgagccatgcagcttcgatgtcgctatcattgcaggcaggcttagaatgctgggcgaccaattcaatggcgaactggaagcaagcgcgaagaacgtgatcgctgagaccatcaagggtcagactggtgcaattcttcaggacaccgtcgaaagtttgtccaagacgtggtgcgctcaggattccagcctggcctacgaaagagctttccttgccgtgagcgtgaaactgctcgagtacatggcccacatcgcaccagaggtggtggggcaggtggcaattcctatgacgggcatgattaacggaaaccaagctatccgggaatttatccaaggacagggtggttgggagaatctggagagttag

SEQ ID NO: 15851 - DNA, 558 bp, synthetic construct
  source 1..558: mol_type = other DNA; note = Synthetic coding sequence
atgggaaaaaagcagaataagaaaaaggttgaagaggtccttgaggaggaagaggaagagtatgtagttgagaaagtactggatagacgcgtggtgaagggcaaagtcgagtaccttctgaaatggaagggcttctcagatgaggacaatacatgggagccagaggaaaatttggattgccctgacctgatcgctgaatttctacaatcacagaaaactgcccatgagaccgacaagtctgagggaggaaagaggaaggctgattccgattccgaggataaaggagaggagtccaaacccaagaaaaaaaaggaagaaagtgagaagccgaggggctttgctagggggctggagcccgagcgcataatcggggccaccgatagctctggagagttgatgttcctgatgaagtggaaaaacagtgacgaggccgatctggtcccagctaaagaggccaatgtcaaatgcccccaggtcgtgattagcttctacgaagagcggcttacttggcattcctacccaagcgaggacgacgataaaaaggacgacaaaaattag

SEQ ID NO: 15852 - DNA, 1350 bp, synthetic construct
  source 1..1350: mol_type = other DNA; note = Synthetic coding sequence
atgatgctggggacagaaggcggcgaagggtttgttgtcaaggtccgaggactgccctggtcttgtagtgccgatgaagtgcagaggttctttagtgactgtaagatccagaacggcgcacagggaattaggttcatatacaccagagaaggcaggccgagcggcgaagcctttgtggagctagaaagtgaagatgaggttaagctcgcgctgaagaaggaccgcgagacaatggggcatcgctatgtggaggtctttaagtccaacaatgtcgaaatggactgggtactcaagcatacaggacctaatagcccagataccgccaatgacgggtttgtccgactgagaggtctcccattcggctgcagcaaagaggagatcgtacagtttttttcgggcctggagatcgtgcctaacggcataacactgcctgtggacttccagggccgttcaaccggtgaagccttcgtgcaattcgcatctcaggaaatcgcggagaaggccctcaaaaagcacaaggagaggattggccatcggtacatagagatctttaagagctcacgggccgaggtgaggactcattatgaccccccgcgaaagctcatggccatgcagaggccaggaccttatgatagacccggcgctgggcgcgggtataacagcatcgggagaggggccgggttcgaaagaatgaggcggggcgcgtacggtgggggctatggcggatacgacgattacaacggatacaatgatggatacggatttgggagcgacagatttgggcgcgatctcaactactgtttctccggcatgtcagaccaccggtacggcgatggcggctctacattccagtccacgaccggccactgcgtgcacatgcgcggcttgccataccgtgctacagagaatgacatctataacttttttagtccccttaatcctgtgcgggtgcacatagaaattggcccagacggtcgcgttacaggggaggcagacgttgagtttgctacacacgaagacgccgtcgcggccatgagcaaggataaagctaatatgcagcatagatacgtagagctctttttgaatagcaccgccggcgcttcgggtggtgcttacgaacaccggtacgtcgagcttttcctgaactccactgctggcgcctccggcggtgcttatggctctcagatgatgggcgggatgggactctccaatcaatcaagttacggtggtcccgcaagccaacaactatccggtggttatggcggtggctatggtggccagtcttccatgtctggatacgaccaagtgctgcaagagaattccagtgattttcaaagcaacattgcatag

SEQ ID NO: 15853 - DNA, 741 bp, synthetic construct
  source 1..741: mol_type = other DNA; note = Synthetic coding sequence
atgtctggcgctggtgaggcgcttgcacctggtcccgtgggtccacagcgagtcgccgaggctgggggaggacagctcgggtctacagctcaggggaaatgcgataaagacaacacagaaaaggatattacacaggcaactaattcacactttacacatggagaaatgcaggatcagagcatatggggaaacccctccgacggtgagttgatcaggactcaaccccaacggctgcctcagctgcagacatcagcccaagtgccatctggagaagaaatcgggaagatcaagaacggacataccgggctttcaaacggcaacgggatccaccatggcgcgaagcatggcagcgccgataaccgaaaactttccgccccagtctctcagaagatgcaccgtaaaattcaaagtagcctttccgtcaattctgacatttccaagaagtccaaggtgaacgctgtcttcagccagaaaactgggtcaagccccgaagattgctgcgtacactgcattctggcctgtctgttctgtgaattcctgaccctatgtaacatcgtgctggggcaggccagttgtgggatctgtacttccgaggcctgctgctgttgttgtggtgatgagatgggagatgactgtaactgcccatgtgatatggactgcgggattatggacgcttgctgtgagagttccgattgtctggagatctgcatggagtgttgtggtatttgttttcctagctag

SEQ ID NO: 15854 - DNA, 30 bp, synthetic construct
  source 1..30: mol_type = other DNA; note = Synthetic coding sequence
atgagttactaccagcggcctttctcttag

SEQ ID NO: 15855 - DNA, 2001 bp, synthetic construct
  source 1..2001: mol_type = other DNA; note = Synthetic coding sequence
atgaatacgggcagggacagccagtctcctgatagtgctaaagggttccgatcggtgcggccaaatctgcaagacaagagatcccctacccagagccagattaccgtgaacggcaactccggcggggccgtgtcaccaatgtcctactaccaacgtcctttctcaccctccgcatacagcctaccagcatctttgaattcttcgattgtaatgcagcatggcacgagcttagactccacagatacatacccccagcatgcccagtctctcgatggaaccacgagcagctccatccccttgtatcgctcctctgaagaagaaaagagggtaaccgtcattaaagcccctcattaccctggtatcggacccgtggacgaaagtggaattcccaccgcaatcaggaccaccgtggaccgcccaaaagactggtacaaaacaatgtttaagcaaattcacatggtgcataaaccggacgatgacaccgatatgtataatactccttacacttacaatgccgggctttacaaccccccctatagtgcccaatcgcatccagctgctaagacacagacctatcgacccctctcaaaatcacacagcgataactctcccaacgcttttaaagatgcatcatctcctgtccctcctccccacgtgcctccaccagtcccaccactgaggccaagagatcgaagctccaccgaaaaacacgattgggaccccccggacagaaaggtcgacactagaaagttccggtcagagccccgttctattttcgaatacgagccaggcaagagttctatcctgcaacacgaacggcctactgacagaatcaatcccgatgacattgatctggagaacgagccctggtacaagttcttttccgaactggaatttggcaggcctccgccaaagaagccccttgattatgtgcaagatcacagttcaggtgtttttaatgaggcatctttatatcagtccagtatcgataggtctctggaacggcctatgtcatccgccagcatggcctcagattttcggaagagacgcaaatccgagccagccgtgggccccccacgaggactaggggaccagtctgcatcccgcacttcaccgggccgtgtggacctgcccggttcctctaccaccttgacaaaatcattcacctcaagctcccctagttcaccatcgcgtgcaaaagaccgggaaagccccagaagttacagctcaacactcacggacatggggcgctctgctccccgggagaggagaggtacacccgagaaggagaaactacccgcaaaggcggtgtatgacttcaaagcgcagacatccaaggaattgtcgtttaaaaagggcgataccgtgtacatcctgaggaagattgatcagaactggtatgaaggtgagcatcacggcagggtgggtatatttcccatcagctacgtggaaaagcttacacctcccgagaaggcccaacctgcgcgccctccaccccctgcgcaacctggggagatcggagaggccatcgccaaatacaacttcaacgcagatactaacgttgagctgagcctgaggaaaggggatcgagttatcctgttaaagcgcgtggaccaaaactggtatgaaggaaaaatacccggtacgaacaggcagggtatcttccccgtctcttatgtcgaagttgtgaagaagaatacaaagggtgccgaggattaccctgacccacctatcccacattcctacagtagtgaccgaattcacagtcttagctcaaacaagcctcagcggcctgtgttcacccacgagaatattcagggcggtggtgaaccattccaggcactctacaattacacacccaggaacgaggacgagctcgagctcagagaatccgacgtaattgacgtaatggaaaaatgtgacgatggttggttcgtggggaccagcaggcgtactaaattttttggcaccttccccggtaattacgtgaagagactgtag

SEQ ID NO: 15856 - DNA, 2472 bp, synthetic construct
  source 1..2472: mol_type = other DNA; note = Synthetic coding sequence
atgaccctcttatccagccagagttcaagtcttgtcgccccctctgggtcggtaagtgccgaaaacccagaacagcgtatgctggaaaaaagggctaaagttatcgaagagctgctgcagacagagcgtgactacataagagacctggaaatgtgcattgaacggataatggtaccaatgcagcaggcccaagtgcccaacattgacttcgaaggcctctttggcaatatgcagatggtgattaaagtcagcaagcaactgcttgctgctctggaaatttctgatgctgttgggcccgtgtttctagggcatcgcgatgagttggagggcacttataaaatttactgtcagaatcatgacgaagctatcgcactcttagagatctatgaaaaagacgaaaaaattcagaaacacctccaggactccttggcagatctcaattctcttgtcctcaagaaaggctgtacgaactacatcaatctcgggagcttcctgatcaaacctgtccaaagagttatgcgctaccctctgctattaatggagctcctgaattctacacccgaaagccatccggacaaggtacccctgacgaatgccgttttggcggttaaagagatcaacgtaaacattaatgaatacaagagaagaaaggacctggtactcaaatatcgcaaaggcgacgaagattccctgatggaaaagatctccaaacttaacattcatagtatcattaagaagagtaaccgggtgagctcccatctgaaacacctcactggttttgccccccagatcaaagatgaggtgttcgaagaaaccgagaagaacttcagaatgcaggaacgccttataaaatccttcatccgcgacctcagcctatatctgcagcatattcgggagtcagcctgcgtcaaggtggttgcagcagtatcaatgtgggatgtgtgcatggagagaggccacagggatttggaacagttcgaacgcgtgcaccggtacattagcgaccagctttttaccaactttaaagagcggactgagcggctggtgatcagcccattgaatcagttactttctatgttcaccgggccgcacaaattggttcagaaaaggttcgacaaacttctggacttttataattgcactgaacgagcagagaagctgaaagataaaaagacattggaagagctccagagcgcaagaaataattatgaagctcttaacgcccagctgctggatgaattgccaaagtttcatcagtacgctcaaggcctgttcactaattgcgtgcatggatatgctgaagcgcattgcgattttgtgcaccaggccctagagcagcttaaacccttgctgtcgctccttaaggtggctggccgggaaggcaatttgatagctatctttcacgaagaacactcccgggtactgcagcagctccaggtatttacattttttccagagagcctgccggccacaaagaaaccttttgaacgtaagaccatcgataggcagtccgcgcggaaacctctgctcggcctcccatcttatatgctgcagtcagaggaactgcgcgcctccttgctcgcgaggtaccctcctgaaaagctgtttcaagccgaacgcaatttcaatgctgcacaagatctagacgtgtccctactggaaggcgacctggtgggcgtgatcaagaaaaaagaccctatgggctcgcagaacagatggctaatcgataatggagtaaccaagggtttcgtgtatagttcatttctgaaaccatacaacccgcgtcgaagccattccgatgcgtctgtcggatcccactcgagcacggagtcagagcatggctcttcttccccccggttccctcggcagaactccggttccactctgactttcaacccgagcagcatggcagttagctttaccagcggcagctgtcagaagcaacctcaggacgcttccccccccccaaaggagtgtgatcaggggactctgtcagcctcactcaatcctagcaacagcgagtcaagtccaagcaggtgtccgtccgatccggattctacctctcagcccaggtccggggacagcgctgacgtagcccgggacgtgaaacagccaactgccacgcctaggtcataccggaacttcaggcatccagaaattgtgggctactcagtgcccggccgcaacggtcagtctcaagatttggtgaaaggatgcgcacggactgcacaggcccccgaggataggagcacggagcctgacggctccgaagctgagggaaatcaagtgtatttcgccgtgtatacattcaaagcccggaatccgaatgaactgtctgtgagcgcgaaccaaaagctgaagatactcgagtttaaagacgttacggggaatacagaatggtggctggctgaagtcaacgggaagaagggatatgtgccctctaattacataaggaagaccgaatacacgtag

SEQ ID NO: 15857 - DNA, 2964 bp, synthetic construct
  source 1..2964: mol_type = other DNA; note = Synthetic coding sequence
atggcagagtcctcctccgaaagtgatcatttcagatgtcgggatcgcctgtccccctgggctgctagatccacgcacagagggacgcgtagccttcccacggttgaggtaacagagaaagttaatacaataacttccactcttcaggacacatcccgaaacctgcgtcaggtcgaccagatgctaggcaggtaccgggaatacagcaacggccaggccggagccattgagcacctcaaggagagtctggagcagagcatcgaccagctgagaagtcagagactactgaggaactccggcggaaggagcataagcgtcacctctctatcagcatcagatctagatggagggacggggtccgagttgcaccacttcccccctaccagtccgctcaaggactatggagacccgcaaggcataaaacgcatgcgtagccggacaggcgtgagatttgtccaggaaacagatgatatgactcagcttcatggttttcatcagagcctaagagacttatcttcagaacagattcggctcggggacgatttcaaccgggagctgagtcgcaggagtcgcagtgatgccgaaactaagcgcgcgttagaggagctcacggaaaagcttaacgaagcccagaaacaggaagtggtcagcgaccgagttgagcgcagactgcaggagttagaaagagaaatgaggactgagcgcgagctcgtggaacgtcggcaggatcagctggggctcatgtctctgcagctccaggaagcgttgaaaaaacaggaggcaaaggccgatgagcatgagggcgctatcaagaacaagttgcgccagaccgaaactgaaaaaaaccagctggagcaagagttagagttgagcaggagactgctaaaccaatccgagggctcaagggagacacttctgcatcaggtcgaagaacttcggacacagttgacaaaagccgagggcgatcgaaaaggactgcaacatcaagtcagccagatttctaaacagcagtctaattaccaagacgagcaaggagaagattggcgcttcagacggggagtagagagggagaagcaagatctcgaaaaacagatgtccgacctgagagtccagctcaattttagtgctatggccagtgagttagaagaggtgaagcgatgtatggagagaaaggacaaagagaaagcacacctggccagccaggttgagaatctgacccgagagctggagaacggagagaagcagcagctgcagatgctcgatcgcctcaaggaaatccaaaaccactttgatacatgcgaagccgaacgaaagcatgccgatttacaaatctctgaactcactcggcacgccgaagatgctacaaagcaagctgaaagatatctgagtgagctccagcagagtgaggctctgaaagaggaggctgagaagaggagggaagacttgaagttgaaggcccaggaaagcatacgacagtggaagttgaaacacaagaaattggagcgtgcactcgagaagcagtctgaaacggtggatgagttgactggcaaaaacaatcagattctgaaggagaaagacgagttgaaaactcagttgtatgctgctctgcaacagatcgaaaacttaagaaaggaactgaatgatgtcctcacaaagcgtgcattacaggaggaggaactccacagtaaggaggagaaactgagagacataaagagccatcaggccgatctcgagttggaagttaagaatagtttagatacaatccaccgactcgagagtgaattgaagaagcagagtaaaattcagtctcagatgaaggtcgagaaggcccacttagaggaggagattgcagagctgaagaaaagtcaggcccaggataaggctaaactgctggagatgcaagaatccatcaaggacctctcagccatccgcgcagacttagccaataagctggccgaggaggagagagctaagaaagcggtgctgaaggacctgagtgatctcacagcgcaggccaagtcaagggatgaagagaccgcaacgataataacacagctgaagttagaaagagacgtgcaccagcgggagctgaaagaccttactagctcgctgcaatcagtcaagacaaagcacgagcagaacattcaagaactgatgaaacattttaagaaggaaaagagtgaggcagagaatcacattagaacattaaaagcggaatcactggaggagaaaaatatggctaaaattcacagaggccagcttgagaaactgaaaagtcaatgcgaccgactaactgaggagctgactcagaatgagaatgaaaacaagaagctgaaactgaaatatcagtgccttaaggaccagctggaagagagagagaagcacatctctattgaagaggaacacctgcgtcggatggaggaggcccggttgcagctgaaggaccagctcctgtgcttggaaaccgagcaggaatcgattctcggagtgattggaaaggaaattgatgccgcatgcaagacattttctaaggactccgtagaaaagctcaaagtcttctctagcggcccagacatacattatgaccctcaccgctggctcgccgaatcgaaaaccaagctgcagtggctgtgtgaggagctcaaggaacgcgaaaatagagagaaaaacctgcgacaccaactgatgctgtgtcgacagcagctccgaaaccttaccgaaaacaaggaatcagagttgcagtgcctcttccaacagatcgagcgccaagagcagctcttagatgagatccacagagaaaaacgcgacctactggaagagactcagagaaaagatgaagaaatgggatctctgcaggatcgcgttatcgcactggagacctctacgcaagtagcactcgaccatctggaaagcgtgccagagaaactgtccctgctcgaggactttaaggatttccgccgctag

SEQ ID NO: 15858 - DNA, 5157 bp, synthetic construct
  source 1..5157: mol_type = other DNA; note = Synthetic coding sequence
atgtcaggaacctcctcccccgaggcagtgaaaaagctgctagagaacatgcaatcagatctgagagcccttagcctcgaatgtaagaagaagttccctcctgttaaagaagccgccgagtccggcataattaaggtcaagaccatcgcagcccgcaacaccgaaatccttgccgcacttaaggaaaattcaagtgaggtggtccagccgttcctaatgggatgtggcactaaggagccaaagatcacccaactgtgtctagccgccattcagcgacttatgagtcacgaagtagtgagtgagacagctgctgggaatattatcaacatgttatggcagctgatggagaactccctggaggaactcaaactcctgcaaactgtgctagtactgctgactactaatacagtagtccacgatgaggccctctccaaagccatagtgctttgtttccgtctccatttcactaaggataatataacgaataacaccgctgcagcaacagtgcggcaggtggtgacagtagtgttcgagaggatggttgctgaggatgaacgtcacagagacattattgagcagcccgtgctggtccagggaaattcgaaccgccgttctgtttctaccctgaagccttgtgccaaagacgcatacatgctgttccaagacctgtgtcagctcgtgaatgcagacgctccatactggctggttgggatgactgaaatgacacgcaccttcgggctggagttgctggagtcagtccttaatgatttcccacaggtgtttctccagcatcaagagttctcattcttgctgaaagagcgcgtctgtcctctggtgattaagctgttctctcctaacatcaaattcagacaagggagcagcacaagctcatctcccgccccagtcgaaaagccctatttcccaatatgcatgcggctcctgagagtcgtatccgtccttatcaaacagttttactccttgcttgtcactgagtgtgagatctttctttccctcctggtgaaattcctagacgccgataagcctcagtggctacgagcggttgccgtcgagtctatccataggttttgtgtgcagccccagctactgcggtcattctgccagtcctacgacatgaagcaacactccacaaaggtgttccgagacatagtgaacgccctcgggagtttcattcaaagcctgttcctcgtgccacctactggaaaccccgcaaccagcaatcaggccggaaacaacaatctcggaggcagtgtatctgcacctgcaaattcaggcatggtgggcattggaggcggcgtgaccctcctgcctgccttcgaatacagagggacgtggatcccaatactgacgattaccgtccaaggatccgcaaaggctacatatttagagatgctcgataaggtggagccaccaaccattcccgagggctatgcgatgtctgtggcattccattgtctattggacctcgtccggggaattacgtccatgatcgaaggagagcttggagaacttgagactgagtgtcagacaactacagaggaggggagcagtccgacccaatctacggagcaacaggacctgcagagcacatcagatcagatggacaaggagatagtgagccgagcggtgtgggaggaaatggtgaacgcctgctggtgtggactgctggcagccttaagcttgctgctggatgcaagcaccgacgaggccgccacagagaatattctcaaagccgagctcacaatggctgctttgtgcgggagactggggctagttacatcccgggatgccttcattacagccatttgcaaaggcagcctccctccacactatgcactgactgttttgaataccacaactgccgccacccttagtaacaagtcctacagtgtacagggccagagtgtcatgatgatatctccctccagcgagagccaccagcaggttgtggccgtcggccaacctctggcagttcagcctcaggggaccgtcatgttgaccagcaaaaacatccagtgcatgcgaactctgctgaatctcgcccactgtcatggggccgttttgggcacctcttggcagttagtgcttgctacactgcaacaccttgtgtggattctgggtttaaaaccttcatccgggggggcattgaaacctggaagggctgtagaaggccccagtaccgtactcacgactgctgtgatgaccgaccttcccgtaataagcaacatcctgagccgactgttcgagagtagccagtaccttgacgacgtgtccctgcatcacctgatcaacgcgctctgtagtctctcactggaagctatggacatggcgtatggtaacaacaaagagccatccctctttgccgtggcgaagctcctggagactggcctcgtgaacatgcaccgaatcgagatcctgtggcggccactgacaggtcatctgcttgagaaagtgtgtcagcatcccaactcccgtatgagggagtggggagcagaggccttgacctctttgattaaagctgggctgacgttcaaccatgatcccccactctctcaaaaccagcgactccagttattgctgcttaaccccctgaaggaaatgtcaaacatcaaccatccagacatccgcttaaagcagttagaatgcgtcctccagatactccaatcacagggcgatagtttagggccaggctggcctctggttctcggtgtcatgggggcaattaggaatgatcagggcgagagcttaatccgaactgctttccagtgcctgcagctcgtagttacggacttcttgcctacaatgccctgcacatgcctgcagattgtggttgacgttgccggttccttcggtctgcacaatcaggagcttaatatatccctgacttctatcggcctgctgtggaatatcagtgattatttctttcagcgcggagagaccattgaaaaagaattaaataaggaggaagccgctcagcagaaacaagcagaggagaagggggtggtgcttaaccgcccattccaccctgcaccgcccttcgactgtctgtggttgtgtctgtatgcaaagctcggcgagctttgtgtggaccctagacctgccgtccgaaaaagtgccggtcaaaccctgtttagtaccatcggagcccacggcactttgcttcagcactctacctggcataccgtaatatggaaagtgctgttccacctacttgatcgggtgagggaatcatcgacgacagccgataaggaaaagatagagagcggcggagggaacatcttaattcaccattcacgggacaccgcagagaagcagtgggctgagacgtgggttctgacacttgctggtgttgctcggatttttaacacccgacggtatctgttgcagcccctgggggatttctcccgggcttgggacgttctgctggatcatatccagagtgcagccctctcaaaaaacaacgaggtatcattggcggcgttaaagtcttttcaggaaatcctccaaattgtcagtcctgtgagggattctgataaacctgagacaccccccgttgttaacgttccagtgcccgtacttataggtcctatctcaggtatgtctcgaccctttgttcgaacagattctataggagaaaagctcggccgctacagctcgtctgagccgcctatcgtgacagacgaactcgaagatttaaacctttggtgggccgcttggaatacgtggtacaggatcgggagcgagtctaccaaaccccccatcaccttcgataaactcacttttattccaagccagccttttctaacagcattaatccagattttcccagctctttaccagcacatcaaaacaggcttcaatatggatgatctccagaaactgggggtgatactgcactccgccattagcgtcccaatatcttcggatgcctcccctttcattctgcctagttatacagaagccgtgctcacctccctgcaggaagccgtactcaccgccctggacgtcctccagaaggccatatgcgtgggacctgaaaacatgcagatcatgtatcccgctatcttcgatcagctgttggcgttcgtggagttttcatgtaagccccctcagtatggccaactggaaactaagcacattgcaaacgctaaatataaccagatccagctatttgctcctgctgaatgggtcgctctcaattatgtgccatttgcagaacgcagcctggaagtggtcgttgatctgtaccaaaaaacagcatgccataaggcagtcgttaatgagaaagtccttcagaacatcataaaaaccctgagagtccccctgtctctgaaatacagttgtcccagcgagtcaacctggaagttggccgtttctagtctcctgcgggtgttgagcattgggctgccggtcgcgcgccagcatgctagttcagggaagtttgattcgatgtggcctgaactggccaatacattcgaggatttcctctttacaaagtccataccacccgataacttatcaatccaggagttccagagaaacgagaacattgacgttgaggtggtgcagctcatctctaacgagatcttgccctatgctaattttatccccaaagaatttgtggggcagatcatgactatgctgaacaaaggaagcattcacagtcaaagtagtagttttacagaggctgagatagatatacgcctgcgggaagagttttccaaaatgtgcttcgagactctgcttcagtttagcttcagtaacaaagtgacaactccccaggaaggctatattagccgtatggctctgtccgtgctactgaagcgatcacaagatgttctccataggtacattgaggatgaaaggctgtctgggaaatgtcccctgcctaggcaacaggtcacggaaatcatttttgtgctaaaggctgtgagcaccttgatcgactccctcaaaaaaacacagccagaaaatgttgacggcaacacttgggcacaggtaattgccctctatcccactcttgttgagtgcattacttgctcctcctcggaagtatgcagcgctctgaaagaggctctggttcctttcaaagatttcatgcagcctcctgcttcgagagtacagaacggtgagtcatag

SEQ ID NO: 15859 - DNA, 2100 bp, synthetic construct
  source 1..2100: mol_type = other DNA; note = Synthetic coding sequence
atgtcctcccgcaaagtgctcgcaattcaagcaaggaagagacgtcctaagcgggaaaagcatcccaagaaaccggaaccgcagcaaaaggcacctttggttccaccacctcccccgcctccaccccccccgcctccaccgctacccgatcccacacctccggagcctgaggaggagatcttggggagcgatgacgaagaacaggaagaccccgcagattactgtaaaggcggataccatcctgtcaagatcggagatctgtttaacgggagatatcatgttatcaggaaactggggtggggacattttagtacagtgtggctctgttgggatatgcagggaaagagatttgtcgcgatgaaggtagttaagtcagctcagcactataccgagacagctcttgacgagattaagctgctcaaatgtgtccgcgagagtgaccccagcgatcctaataaggacatggtagtgcagctcattgacgactttaagatatctggaatgaatggtatccatgtttgcatggtctttgaagtgcttgggcaccacttgctaaagtggatcatcaaatccaattaccaaggcttgccagtaaggtgtgtgaagagcattatcagacaggttctccaggggctggattatctgcacagcaagtgcaaaatcattcatactgatataaaacccgagaacatcctcatgtgtgtggatgatgcctatgtgcggagaatggctgctgaggctacggagtggcaaaaagcaggcgctccaccccccagcgggtcagctgtaagcaccgcaccacagcagaaaccaatcggaaagattagcaagaacaaaaagaagaaattgaaaaagaagcaaaaacgccaggcagaattactagaaaaacgcttgcaggaaattgaggaactcgagcgtgaagcagaaagaaagataatcgaggagaacataaccagtgccgccccaagcaatgaccaggatggagagtattgcccagaagtaaaactaaagacaacagggctcgaggaggcagctgaggcggagacagcgaaagacaacggagaagccgaggaccaggaggaaaaggaagatgccgaaaaggaaaacattgaaaaggacgaggacgatgtggatcaggaactggcgaatatcgatcccacttggattgagtcaccaaaaactaacgggcacattgagaacggtccatttagcctggagcagcaattggacgacgaggacgatgacgaggaggattgccctaatcccgaagagtacaatctggacgaacccaacgccgagtcagattacacttacagctcgagctacgaacaattcaacggggaactgcctaatggacggcacaagatacctgagagtcaattccctgaattttctacgagcctgtttagcggttccctggagccggtggcttgtggaagcgtgctgagcgagggctcgccactgaccgagcaggaagagagctcccccagtcacgataggagtaggaccgttagtgctagcagtactggggatctaccaaaagctaagactagggctgccgatttactggtgaatccactggatcctcgtaatgccgacaagattcgggtgaaaattgcggacctcggtaatgcttgctgggtccataagcacttcacagaagacatccagaccagacagtacaggagcatagaggtgctgatcggcgccggctacagcacccctgcagacatctggtccaccgcctgcatggcgtttgaacttgctaccggtgactacctttttgaaccacacagcggcgaggactacagccgcgacgaggaccacattgcgcacattatcgaactgctgggctccatccccaggcattttgctcttagcggaaagtattccagggagtttttcaacagaagaggcgagctgcggcacatcaccaaactgaaaccgtggtccctgttcgacgtccttgtggagaagtatggctggccccacgaagacgccgcccagtttacagattttctgatcccaatgctggagatggttcccgaaaagcgagccagtgcaggggagtgcttaaggcatccctggctaaactcctag

SEQ ID NO: 15860 - DNA, 1113 bp, synthetic construct
  source 1..1113: mol_type = other DNA; note = Synthetic coding sequence
atgggcttcaataggccaagcaagatacaggaaaatgctctcccactgatgctggctgagccgccccaaaatctgatcgcccaatcccaatccggcactggaaagacggctgcctttgtccttgccatgctatcacaggtggagcctgctaataaatacccccagtgtctgtgcctgagcccaacatatgaactggctcttcaaactggaaaggtgattgagcagatgggcaagttctacccagagctgaaattggcttacgctgtccggggtaataagttggagagaggacagaagatctctgaacagattgttatcggaaccccaggaaccgtcctggactggtgctccaaattgaaattcatagaccctaaaaagattaaggtgtttgttctcgacgaggctgatgtaatgatcgcgacacagggtcatcaggaccagagcatcagaattcagcggatgctcccgcggaactgtcagatgcttttgttctctgccacttttgaagacagcgtttggaaatttgcccagaaagtggtcccagatcctaatgtcattaaactaaaaagagaggaggaaaccctggacaccattaaacaatactatgtgctgtgttcgtcccgggacgaaaaattccaggcactctgcaatttatatggggccattaccattgcccaggcaatgatcttttgccacacccggaagactgcatcctggctcgctgcagaattatctaaagaaggccaccaggtagccctgctatcaggagaaatgatggtggaacagcgagcggctgttatcgaacgttttagggaggggaaggagaaggtcttggtaacgaccaatgtatgcgcccgcgggattgacgttgagcaggtctcagtcgttatcaactttgacttacctgtcgataaggatggaaatcctgacaacgagacgtatttgcacagaattggccgcacaggaaggtttggaaaacgggggctggccgtaaacatggtcgatagtaagcactcaatgaatatcctcaatcggatccaagaacatttcaacaagaagatcgagcggctggacaccgacgatttagacgaaatcgaaaaaattgccaattag

SEQ ID NO: 15861 - DNA, 2640 bp, synthetic construct
  source 1..2640: mol_type = other DNA; note = Synthetic coding sequence
atgttctggaagttcgacctgcactccagctcacacatcgatactctgcttgaacgcgaagatgttacccttaaggaattaatggacgaagaagatgtgctgcaggaatgcaaggctcagaataggaagcttatagaattcctcttgaaggctgaatgtctcgaagacctggtttcctttattatagaggaaccgccgcaggacatggacgaaaaaatcaggtacaagtacccgaatatatcttgcgagctcctaacaagcgatgtgtcacagatgaatgatcgcctcggggaagacgagtcgctgctgatgaagctgtactcttttttattaaacgatagcccgttgaatccattgttggcgtctttcttttccaaagtattaagcattctcatctcgcgcaaaccagaacagatcgttgattttctgaaaaaaaagcacgacttcgtcgatctgataatcaaacacattggtacctctgctatcatggacctgcttctccggctgttgacgtgcattgagcctcctcagccgcggcaggacgtgctgaattggctgaacgaagaaaaaatcattcagcggttggttgagattgtacaccctagtcaggaagaggatagacattcgaacgcgagccaaagcctgtgcgagattgtaagattgtccagggatcagatgctacagatccagaattccaccgagcccgatcctctcctggccactttagaaaagcaagaaatcattgaacagttacttagcaacatctttcacaaagaaaagaatgagtcagcgatagtgagtgccatccagatactccttaccctgctggaaacacgacggcccacatttgaggggcacatagagatctgcccgccagggatgagccattccgcttgtagcgtcaacaaatcagttctggaggccattcgggggcgcctgggctcgttccatgagctcctcctcgagccgcctaagaagtccgtaatgaagactacatggggcgtgctggaccctcctgttggaaacaccagactcaacgtgatccgtctcatctcttctttattgcagacgaataccagctctatcaatggggatctcatggaacttaactctattggcgtgatcctgaatatgtttttcaagtacacttggaacaactttctgcatacccaggtggagatatgcatagcattgatcctggcttccccgttcgaaaacaccgagaacgctaccattaccgaccaggactctaccggtgataatctgttgttaaagcacctgttccagaagtgtcagctaatcgaaagaatcctagaggcttgggagatgaacgagaaaaaacaagctgagggtggccggaggcacggatatatgggccaccttactagaatagctaactgcattgttcacagcaccgacaagggccccaacagcgccctggtgcagcagctgataaaagatctcccggatgaagtccgcgagcgctgggaaacattttgtacgtctagtttgggcgaaacaaataaaagaaacactgttgaccttgttaccacgtgtcacatccatagctctagcgatgacgagattgattttaaagagactggatttagccaggactcctcactacagcaggcattctccgactatcagatgcagcagatgacatctaatttcatcgatcagttcgggttcaacgacgaaaaattcgcagaccaggatgacatcgggaacgtttcttttgatcgcgtttcagacattaatttcaccctaaacacaaacgaatcaggcaatatagccttgtttgaggcctgctgtaaagaacgcattcagcagttcgacgacggcggatctgatgaggaagacatttgggaagaaaagcacattgcattcacaccggagtcccagaggcgcagtagctcaggaagcactgactctgaggaaagtactgactcggaggaagaggatggggcgaagcaagacctgtttgagccttctagtgctaacacagaggataaaatggaggtcgacctctccgagcccccaaactggtctgcgaatttcgacgtgccaatggaaacgacccatggcgcacctttggactcggtgggcagtgatgtgtggtccactgaggagccaatgccgactaaggaaaccggctgggctagctttagcgagtttacgagttccttgagcactaaggattccctgcgcagcaacagccccgtggaaatggagacgtcaaccgaaccgatggatccactgaccccctccgccgcagctctcgctgtccagcccgaagcagccggatctgtcgccatggaagcatccagcgatggggaagaggatgcagagtcaactgacaaggtcaccgagactgtgatgaacggagggatgaaagagacactatcccttacagtagatgctaaaaccgagaccgctgtgtttaaacgcctcctggggggttgcagtgaagaaggcaagttgagcacttcacaagatgccgcctgcaaggatgccgaagagtgcccagaaactgccgaggcaaaatgtgccgccccgcggcctccctctagttctccagagcagaggaccggccagccaagcgctcccggcgatacatctgttaacggcccagtctag

SEQ ID NO: 15862 - DNA, 2622 bp, synthetic construct
  source 1..2622: mol_type = other DNA; note = Synthetic coding sequence
atgttttggaaattcgacctgcacagctcatcacacatagacaccctcttagagcgggaagatgttacattgaaagagttgatggacgaagaggacgtgctgcaggaatgcaaagctcaaaaccgcaaactgatcgagtttctactgaaagccgaatgtttggaggatctggtgtcatttattatagaggagcccccgcaggatatggatgaaaagatccgttacaaatatcctaacatctcctgcgagctgctgacctctgacgtgtctcagatgaacgacaggttaggggaagatgagagtcttcttatgaagctttatagcttcctgttgaatgactccccgttgaatcctctgttggcaagcttcttttctaaggtgttgtctattctcatctcgcgcaaacccgaacagatagtagacttcctgaagaagaagcatgacttcgttgacttgatcatcaagcatattggcacctctgctatcatggatctgctgctgcggctcctaacatgtatcgagcccccgcagcctaggcaggacgtcctgaactggctgaatgaggaaaaaattatacagcgcctggtggagatcgtccacccgagccaggaagaagatcgccacagcaacgcctcacagtcactttgcgaaatagttcgtcttagccgcgaccagatgctccagattcagaactctactgaacccgaccctctcctcgcgacactcgaaaaacaggagataattgagcaactcctcagcaacatctttcacaaggagaaaaatgaaagcgccatagtgtcagcaattcagattcttttgactctcctggaaactcgccgccctacattcgagggccacatcgagatttgtcccccaggtatgagccatagtgcatgctccgttaacaagtcagtgctcgaagccattagggggcgcctcggctcctttcacgaactgctgttggaacctccaaagaaatctgtgatgaaaactacatggggcgtccttgatcctcctgtcggtaacacacgactgaatgtgatcagacttatctcctctctgctacagactaacacctctagcatcaacggtgatttaatggaactgaatagcattggcgtcatcctcaatatgtttttcaaatatacctggaataattttcttcacacgcaggtagaaatatgcatcgccctcatactggcttcccccttcgagaacacagagaacgccactatcaccgaccaagatagtactggagacaatctgcttctcaaacacctctttcaaaagtgccagctcatcgagagaattctggaagcctgggaaatgaatgagaaaaaacaggcagagggaggcagacgacatggatacatgggtcaccttactcgtatagcaaattgcatcgtccactctaccgacaagggaccgaactcagctcttgtgcagcagctcataaaggacttgcccgatgaagtacgggagcgctgggaaacgttctgtacctcgagtctgggagaaactaataaaagaaatacagtggacctggtaaccacctgccacatacattcaagctcagacgacgaaattgatttcaaggagacaggcttctcacaagatagcagcctgcagcaggctttctcagattaccaaatgcagcagatgaccagcaacttcatcgaccaatttggatttaacgatgagaaattcgccgaccaagacgacatcgggaacgtgagttttgatcgggtttcagatataaactttacactcaacaccaatgaatctgggaacatcgccctcttcgaggcctgctgcaaggagagaatacagcagttcgatgatggaggttctgatgaagaggacatatgggaggaaaagcacattgcttttaccccagagagccagcggaggagcagctccggttccactgactctgaggagtccaccgattccgaagaggaagacggtgccaaacaggacctttttgaaccatccagcgccaacactgaggacaaaatggaagtggacctgagtgagccaccgaattggagtgccaacttcgacgttcccatggaaacaacccacggggcaccactggattcagtggggtccgacgtctggagcactgaagagcctatgccaaccaaggagactggatgggcaagcttcagtgaatttacatcttctctatcaaccaaagattcccttagaagcaactcccctgtcgagatggaaacctctacagaaccaatggaccctttgacaccatcagccgccgcgctggctgtgcagccggaggccgctgggtctgttgcaatggaggccagctcagacggtgaagaagacgctgagtctacggataaagtgaccgaaactgtgatgaacggaggtatgaaggaaacattgtccctgacagtggatgccaagacagaaacagccgttttcaagtcagaagaaggcaagctctccacatcccaagacgccgcctgtaaagacgcggaggagtgtccggaaaccgccgaagctaaatgtgctgcacctcgccccccttcatccagccctgagcaaaggacggggcagccctcagccccaggtgacacctccgtgaacggacccgtctag

SEQ ID NO: 15863 - DNA, 2640 bp, synthetic construct
  source 1..2640: mol_type = other DNA; note = Synthetic coding sequence
atgttctggaaattcgatttgcattcaagctcccacatcgatacccttctggagcgggaggacgtaaccctcaaagagcttatggatgaggaagacgtccttcaggaatgcaaggctcagaacagaaaactgatagagttccttctgaaggctgagtgccttgaagacctggtgtcctttatcatcgaagagcccccccaggatatggacgagaaaatacgttataagtaccccaacatttcttgcgaactactgacgagcgatgtgtcacaaatgaatgaccgcttgggggaggacgagagcctcctcatgaagctttattctttcctgctgaatgattcccccctgaatcccttgctggcctcattctttagtaaagtgctgtcaatactcatcagtcggaaaccagagcaaatagtggacttcctaaagaaaaaacacgattttgtggacctcatcattaaacatatcgggacctccgcaatcatggacttgctcctgagactgttaacttgtattgagcccccccaaccacgccaggacgtgctcaactggctcaacgaagaaaaaattatacagcggctggttgagatcgtacatccatcgcaggaggaagacaggcactccaacgcctctcaatccttgtgtgaaattgtgcgcctgagccgcgatcaaatgttgcaaattcaaaactcaactgaacccgacccattacttgccacattggagaagcaagaaattatcgaacagctgctgtctaacatttttcataaagaaaaaaatgagagcgcaattgtttccgctattcagattctgctgaccctgctcgaaacccgcaggcccacctttgaaggccacatcgagatctgtccccccggaatgagtcactccgcctgttcagtgaacaaaagcgttttagaggccatccgcggtcgcctaggatcttttcatgagttgctgctggaaccccccaaaaagagtgtcatgaagacgacatggggggtcctcgatccaccggtgggtaatacccggctgaacgtgattcggctaatcagcagcctgttgcagactaacacatcaagcatcaacggggatctcatggaactgaactctattggagttatcctgaatatgtttttcaagtacacatggaacaattttctgcacacccaggtcgaaatttgcatcgctctcattctggcatccccatttgagaacaccgagaatgctactataacggaccaggactctacgggagacaatcttctacttaagcacctgtttcagaagtgtcagctcattgagagaatccttgaagcctgggaaatgaacgaaaagaaacaagcagaggggggcagaagacacgggtacatgggccatctcaccagaatagctaactgtattgtccactctacggataaaggaccaaacagcgcactcgtccagcagctcataaaagacctgcccgacgaggttagggagcggtgggagacattctgcacaagctcgctgggtgaaacaaataagagaaacaccgtggatctggtcaccacttgtcatatacacagctcctctgacgatgaaattgatttcaaagagactggattctcacaagactcatctcttcagcaggccttctccgactaccagatgcagcagatgacaagcaacttcatcgatcagttcggatttaacgacgaaaagtttgcagaccaggacgacatcgggaacgtgtctttcgatcgggttagcgacatcaattttaccctcaacactaatgagtccggcaatatagcattgtttgaagcatgttgtaaagagaggatccagcagttcgacgacggcggctccgacgaggaggatatttgggaagaaaagcacatcgccttcactcccgagtctcagcggcgaagctcgtcaggttctacagatagcgaagagtccacagactccgaggaggaggacggcgcgaagcaggacttgtttgaacctagcagcgccaataccgaggacaagatggaggttgatttatcagagccccctaactggtctgcaaactttgatgtgccaatggagacaacacacggagctccactagacagcgtggggagcgatgtgtggtcaaccgaggagcctatgcctacaaaggagaccggctgggccagctttagcgagtttacttccagtctgtccacgaaggactctctgagaagcaatagtccagtggaaatggagacgtccactgaaccaatggacccccttacccccagcgcagccgcactcgccgtgcaacctgaggctgcagggtctgtggccatggaagcaagcagtgatggggaagaggatgcagagtctacagacaaggtgactgagactgtgatgaacggcggaatgaaagagaccttgagtcttaccgtcgacgcaaagacggaaaccgccgtgtttaaacgcgtgctgaaaagctatagagaagaaggaaaactctccacatcacaagacgcagcttgcaaggacgccgaggaatgcccggagactgctgaagccaagtgcgccgctccccgtcctcccagctccagtcccgagcagagaacaggacaaccatctgcaccaggcgatacaagcgtgaacggcccggtgtag

SEQ ID NO: 15864 - DNA, 1134 bp, synthetic construct
  source 1..1134: mol_type = other DNA; note = Synthetic coding sequence
atgtccgacgaagtgttctcaacaactttagcctacacaaaaagccccaaagtgactaagcgcacgacttttcaggacgaactaatcagagctatcactgctcgaagcgcccggcagcgcagctctgagtactccgacgactttgacagtgatgaaatcgtcagccttggggatttcagcgacacatccgcagacgagaattctgttaacaagaagatgaatgatttccacatcagcgatgatgaggagaaaaacccctccaaactgttattcctaaagacgaacaaatctaacggcaatataacgaaggacgagcctgtttgcgccatcaaaaatgaggaggagatggccccagatggctgcgaagatatcgtcgtaaagagtttctcagagtctcagaataaagacgaggaattcgagaaagacaagattaagatgaaaccaaagccaaggatcctttcaatcaagagtacatccagcgctgagaacaattccctggacacagacgaccacttcaaaccttcccctcgcccacggagcatgctaaagaaaaagtcccatatggaggaaaaggacggtctcgaggacaaggagacggcccttagcgaagaactagaactccacagcgcccccagttcattgcctacgccaaacggaatccagctggaggctgaaaaaaaagcattctcagagaaccttgatccagaagatagctgcctgaccagcttagcatcttcctccttgaagcaaatactcggcgactcgttttctcctggaagcgagggaaacgcctctggcaaggacccaaatgaggagatcaccgagaaccacaattccctcaagtctgatgaaaacaaggagaatagtttttcagccgaccatgtcactactgccgtggagaagtcaaaggaatcccaggtcaccgccgatgacctggaggaagaaaaggccaaggcagagctcattatggacgacgataggactgttgaccctctgctgtcaaaatcccagtctattctgatatctactagcgccaccgcatctagtaaaaaaacaattgaggatcggaacatcaagaacaagaagagtacaaataacagggcctcatcggcctcagcttcaaaggcaagctag

SEQ ID NO: 15865 - DNA, 576 bp, synthetic construct
  source 1..576: mol_type = other DNA; note = Synthetic coding sequence
atggggaagagttgcaaagtcgtggtctgtggccaggccagcgtcggtaagacttccattctggagcagctgttatatggcaatcacgtcgtaggatccgaaatgatcgaaactcaggaggatatctacgtggggagtatcgagaccgatcgcggcgtacgagaacaggtaaggttttatgataccagaggactcagggacggcgctgaactgcccaggcattgcttttcgtgtacagacgggtatgttctcgtttacagcacggactctcgggagagcttccagagggtggaactccttaaaaaggagatcgacaagagcaaagacaagaaagaagtgaccattgtcgtccttggcaataaatgtgacctgcaggaacagcggagagtggatccagacgtggcccagcactgggcaaagagtgagaaggtgaaactatgggaggtcagtgtagccgacagaaggagtttgcttgaaccatttgtctatctggccagcaagatgacccagccccagtctaaatccgcatttccgctctctcgcaagaataagggaagtggttccctcgacggctag

SEQ ID NO: 15866 - DNA, 576 bp, synthetic construct
  source 1..576: mol_type = other DNA; note = Synthetic coding sequence
atgggcaaatcctgtaaagttgtggtgtgcgggcaggcgagcgtcggaaaaacatctatcctcgaacaacttctgtacgggaatcatgtggtgggctcagaaatgatagagactcaggaagacatttatgttggaagcattgagactgaccgcggagtgagagagcaggtacgtttctatgacacccgcggcttaagggatggcgccgaactgcccaggcattgcttctcctgcaccgacggctacgttcttgtttactcaactgattccagggaaagttttcagcgggtcgaactgctgaagaaagagatcgataagagtaaagataaaaaagaagtgaccatcgtggtgctggggaacaaatgcgacctccaagagcagaggcgggtggatccagacgtcgcacagcattgggccaagagcgaaaaggtcaaattgtgggaggtatctgtagctgatcggcgatccctgctcgagccttttgtgtacctagcctccaagatgacccagccccagtcaaaatccgcattccccctaagccgcaagaataaaggctcaggcagtctggatgggtag

SEQ ID NO: 15867 - DNA, 570 bp, synthetic construct
  source 1..570: mol_type = other DNA; note = Synthetic coding sequence
atgggcaaaagctgcaaggtagtggtatgcggacaagctagcgtcgggaaaacatccatcctggaacagttgctgtatggaaaccacgttgtggctatgatagagacccaggaggatatttacgtgggctcgattgaaacggaccgcggtgtccgggagcaggtgaggttttatgatacgaggggcttgagggacggggcagagctgccccggcattgtttttcgtgcacggatggctacgtccttgtctactccacggattcacgcgagtcatttcaacgagttgagttgcttaaaaaggaaattgacaagtctaaggataagaaggaggttaccattgtcgtgctcggcaataagtgcgatcttcaggagcagaggagggtagaccctgacgtcgcccaacattgggccaaaagtgagaaggtgaaactgtgggaggtatctgtggcggataggcgatctctcctcgagccctttgtgtacctcgcttctaaaatgactcagccccagtccaagagtgcctttccgttgtcaaggaaaaataaaggctcaggctccctagacggctag

SEQ ID NO: 15868 - DNA, 576 bp, synthetic construct
  source 1..576: mol_type = other DNA; note = Synthetic coding sequence
atggggaagtcgtgcaaggttgtcgtgtgtggacaggcctccgtcggcaagacctcaatcttagagcagctgctgtatggtaatcacgtggttggttctgaaatgatcgaaactcaggaagatatttacgtagggagcatcgagacagaccgtggcgtgcgggagcaggtgagattttacgacacaaggggcctgcgtgacggcgccgagcttccccgccattgtttctcttgcacggatggctatgtactggtgtattctactgattcacgtgaatcttttcagagagtggagttgctcaagaaggagattgataaatccaaggataagaaggaagtaaccatcgtggtacttgggaacaaatgtgatctgcaggagcaaagacgtgtggaccccgatgtggcccagcactgggctaagtccgaaaaggtcaagctctgggaggtttcagtcgcagacaggcggagtctgcttgaaccatttgtatacctggctagtaaaatgacacagccccagtcgaagagcgcatttccactcagccggaagaacaagggaagcggctctctggacgggtag

SEQ ID NO: 15869 - DNA, 1005 bp, synthetic construct
  source 1..1005: mol_type = other DNA; note = Synthetic coding sequence
atggcagaagaggtacgtagagaggaggcctcaggcgtcgggcgggcgaggacacctacacccggtgcgctgcgtgctccccaattagtgacagaggcccctccactgcatcccggacatactctaatgaaggctactgtcctgatgaggcagcccgggagagttcaagagatcgtcggcgccctgcgtaagggggggggagatagactgcaggtgatcagcgacttcgacatgaccttgtccaggttcgcttacaacgggaaaagatgcccctcatcctacaatatcctggataactccaaaattatatctgaagaatgccggaaggaactcacggcccttctccaccactactatcctattgaaatagatccacaccggacagtgaaggaaaagcttccacatatggtcgagtggtggactaaggcacacaacctgctgtgtcagcagaaaatccaaaaattccagatcgctcaagtggtgcgcgagtctaatgctatgctaagagaagggtacaagacattctttaataccctgtaccacaataacataccccttttcatcttctccgcaggtatcggcgacatcctagaggagattatccgacagatgaaggtgttccatcctaacattcacatcgtctctaattatatggattttaatgaggatggttttttgcagggtttcaaagggcagctcattcacacctacaacaagaatagctccgcctgtgagaacagcggctattttcagcagctggagggaaaaactaatgtcatactgctcggcgactccataggggatttaaccatggcagatggcgtaccgggggtgcagaatattctgaaaattggctttcttaatgacaaggtcgaggagcgtagggagagatacatggattcctatgacatagttcttgagaaagatgagactttggatgtggtcaacgggctccttcagcacatactgtgccagggtgtgcagctggaaatgcagggcccatag

SEQ ID NO: 15870 - DNA, 531 bp, synthetic construct
  source 1..531: mol_type = other DNA; note = Synthetic coding sequence
atggccgcatctactgatatggccggcctcgaggaatcatttcgcaagttcgccatccatggtgaccctaaggcgagtgggcaagagatgaacggaaagaactgggcaaagctctgtaaagattgcaaggtggcagacggcaaaagtgtgacaggcaccgatgtcgatatagtgttcagtaaggtgaagggtaaaagcgcacgggtcataaactatgaagagttcaagaaggctctcgaggagttagctactaagcgctttaaaggcaaaagtaaagaggaggccttcgacgcgatatgtcagctggtggcagggaaagaaccagcgaacgttggcgtcactaaagctaagacagggggagctgtggacagacttacagacacctccagatatacaggatcacataaggaacgctttgacgagtcgggcaagggtaagggtattgcgggacggcaggacattctggacgactccggttatgtgtcagcatacaaaaatgcaggtacttacgacgccaaagtgaaaaagtag

SEQ ID NO: 15871 - DNA, 912 bp, synthetic construct
  source 1..912: mol_type = other DNA; note = Synthetic coding sequence
atggatagcttgcccgatgaatttttcgtgcggcaccctgctgtcgaggatcagagaaaagaagagactgaaaacaagttggagaagagttccggccagttgaataaacaagagaacgacatcccaacggatcttgttccggtgaaccttttattagaagtgaagaaattgctcaacgcgattaacactctgcctaagggtgtcgttccacacatcaagaaatttctccaagaggacttcagtttccagactatgcagagggaggttgccgctaactcacagaacggcgaagaaatcgtgcctgccctgacactgagattcctgatcactcaactggaagcagccctaaggaacattcaggccggtaattatacagctcatcaaattaacattggatactacctgactctgctgtttctgtacggagttgcccttaccgaaagaggaaagaaagaagactacactgaagcagagaataaatttctggtgatgaaaatgatgatccaggaaaatgagatttgtgagaactttatgagtctagtctacttcggacgaggcttgctacggtgtgcccagaagcggtataatggcggtttgttggagtttcataagagtctgcaggagatcggagataaaaatgaccactggttcgatatcgacccaaccgaggacgaagatctgcccaccacttttaaggatctcctcaataacttcattaaaacaacagagtctaacatcatgaagcagacaatctgttcctatctggattgcgagcgtagttgcgaggcagatattctgaaaaatactagctataagggttttttccagctcatgtgcagcaaaagctgttgtgtatatttccataagatctgttggaagaagttcaagaacttgaaatatccaggcttctag

SEQ ID NO: 15872 - DNA, 1869 bp, synthetic construct
  source 1..1869: mol_type = other DNA; note = Synthetic coding sequence
atggatttactaacaagggagaatgtagcgctcaaggtagaatctgctcagcagcccaagcaggtgctcaaaatggaggtggcagtattgaagaagcttcagggcaaggaccacgtttgccggttcatcggatgcggccggaatgagaaattcaattacgtggtgatgcagctgcaagggcgaaatctggcagacttgcggcgcagccaacctaggggtacattcactctctcaactacactcaggctaggcaagcaaattctggaatcaatagaagctatccatagcgtcgggtttcttcatcgcgacatcaaaccctccaactttgcaatgggcaggctgccctcaacttacaggaaatgttacatgctggactttggattggcccggcaatacactaacaccaccggagacgtgcgcccgcctcgtaacgtggccggcttcagaggaaccgtgagatatgcttctgttaacgcacataagaatagagagatgggccgtcacgatgacctgtggtcactgttctacatgctggtagagttcgcggttggacaactcccctggcgtaagatcaaagacaaggaacaggtgggcatgattaaagagaagtatgaacaccggatgctgctgaaacacatgcccagtgagttccacctgttcctcgaccacattgcgtccctagactactttacgaaaccagactatcagctgattatgagcgtgtttgagaattccatgaaggaacgcggaatcgccgagaatgaagccttcgactgggagaaggcggggactgacgccctgctttcaactagtaccagcacacccccacaacagaatacgcgtcaaactgccgctatgtttggcgtggtgaacgtgacacccgtacctggcgatctccttcgcgaaaatacagaagatgtgctgcagggcgaacacctcagcgatcaggaaaacgctccccccatactcccaggaagaccttccgagggccttggacctagcccacatctggtgccacacccgggcggtccagaggccgaagtgtgggaggagacagacgtcaatagaaataaactgcgcatcaatattggtaagagtccctgtgtcgaggaagaacagtccagaggaatgggtgttccatctagcccggtcagggcacctcccgatagtcccaccacgccagtccgctctcttcgttatcggcgcgtgaactctcctgaaagtgaacgcctgtctacagctgatgggcgggtcgagctgcctgagcggaggtcccggatggatctccccggatcaccttctaggcaggcttgctcatcccagcccgcccagatgttgtcggttgataccgggcatgccgaccgtcaggcttcagggaggatggacgtgtccgcctcagtggagcaggaggcattgagcaacgccttccggagcgtccctctcgccgaggaagaggactttgattccaaagagtgggtcataattgataaagagactgagctcaaggatttccccccgggcgctgaaccatccacgtctgggacgaccgacgaggagcctgaggaactgcggcctttaccggaggagggcgaggaacggcggcgcttaggtgctgaaccaccattcccactgactcccgctcttggtaccccacccagtactgaacgcgtgggaccccaccgcccaaccgagacagtgggcgggggccagaccctgggtgccttgcccccagctgtccagcccccggccactacaggggtactccgcgtgctgctactgcacgcgggggacggggctctgccaagtccaagacggcgacggttgctggggctgcttcggtttccccacagcgcccagccccttgggtag

SEQ ID NO: 15873 - DNA, 447 bp, synthetic construct
  source 1..447: mol_type = other DNA; note = Synthetic coding sequence
atggctgccgcgatggtgcctgggcgatccgaaagctgggagaggggagaaccaggccgaccagccttgtacttctgtggatccatcagggggggccgcgaggacaggaccctttatgaaagaatcgtcagtcgactgcggcgtttcggtactgtcctgacagagcacgtcgcagctgctgaacttggggcgagaggggaagaggctgcaggtggagataggctcatccacgaacaggaccttgagtggctccagcaagccgatgtagtcgttgctgaggtgacccagccttccttaggggttgggtatgagctcggcagagctgtggcctttaataagcgcatcttatgtttattccgcccccaaagtggccgcggtgagcaccctaaaccgccgagttggctatctatggatcccgccctgtccagtttccccggtgggctgtag

SEQ ID NO: 15874 - DNA, 606 bp, synthetic construct
  source 1..606: mol_type = other DNA; note = Synthetic coding sequence
atggtgaatagctgttgtggaagcgtgtgttcggatcagggctgcgggctggagaactgttgtagaccatcatgctgccagacaacttgttgccgtaccacatgctgtaggcccagctgttgcgtgagctcatgttgccgcccacagtgttgtcagtccgtttgttgccagccaacttgctgtagaccaagctgctgccaaacaacatgttgtagaactacctgctgcaggcctagttgctgcgtttcatcctgctgcaggcctcaatgctgccaaagtgtgtgttgccaacctacatgctgccgcccgtcttgctgtcaaaccacatgttgccggactacatgctgtcgcccaagctgttgtgtgtcgtcctgttgtcgtccccaatgttgtcagtccgtgtgctgtcaaccaacctgttgtcggccgtcctgttgtatcagcagctcatgttgcccgtcatgttgtgaatcttcctgttgtagaccatgttgttgccttcggcccgtgtgtgggagggtgtcttgtcacacaacctgctaccgtccgacctgcgtcatctccacatgtcccagaccattgtgctgtgcatcaagttgctgctag

SEQ ID NO: 15875 - DNA, 387 bp, synthetic construct
  source 1..387: mol_type = other DNA; note = Synthetic coding sequence
atgacaggctcttgctgtggcagcacactctcgagcctttcctacggcggaggttgttgccagccctgctgctgtcgtgacccctgttgttgtcgcccagtgacgtgccaaactaccgtgtgcagaccggtgacctgtgttccccgttgtacgcggcctatttgcgagccatgtagaaggcctgtctgctgtgacccatgttcccttcaagaaggatgctgtaggcccattacttgttgcccttctagctgtacagccgtagtgtgcagaccatgctgctgggccaccacctgttgtcagcccgtttccgttcaatcaccatgctgtcggcccccctgcggacagcccacaccatgttcaaccacatgccgcacctctagctgttag

SEQ ID NO: 15876 - DNA, 1140 bp, synthetic construct
  source 1..1140: mol_type = other DNA; note = Synthetic coding sequence
atgtcactgcggcttagcagtgcaagccggcgaagctgtccaagacctactacagggtcactgaggctgtatgggggcgggacctctttcgggaccggcaattcctgtggcataagcggaatcggaagcggctttagctctgcctttgggggtagttcaagtggagggaacacaggtggaggaaatccctgcgccggcttcacagtaaatgaaagggggcttctttccgggaacgagaaggtgactatgcaaaacctaaacgaccgcctagcctcgtatctggattctgtccacgctctggaggaagccaacgccgatttggagcagaagattaagggttggtatgaaaagttcggacctggctcatgcagaggtctcgatcatgactattcacggtactttcccattatcgatgacttaaaaaatcagatcatcgcttccactacgagcaatgccaatgcggtgctgcaaatcgataatgcaaggttgacagcggatgactttagactgaagtacgagaacgagctggctctgcaccagagtgtcgaagccgatgtcaatggcctgcgccgtgtgcttgacgagatcacgctgtgcagaaccgacctggagatccagtacgagacactctccgaggaaatgacatacctaaagaagaaccacaaagaggagatgcaggtcctgcagtgtgcagctggtggcaatgtgaacgtagaaattgagctgcagtcactgctggccactaagcactctctggaatgctcactaaccgaaacagaatcaaattactgtgcacagctggcccagatacaggcacagattggcgctttggaggagcagttgcatcaagttcggactgagactgaaggccagaaactggagtatgagcaactgcttgatattaaactgcatctggaaaaggaaattgagacgtattgcctgctgatcggtggggacgatggcgcctgcaagtctgggggttacaagagcaaggactatgggtccggaaacgtaggcagccaggtcaaggacccagcaaaagctatcgtcgtgaaaaaagtccttgaggaagtcgatcagaggtcaaaaatcctgactactaggctccatagcctggaagagaaatcgcaaagtaactag

SEQ ID NO: 15877 - DNA, 768 bp, synthetic construct
  source 1..768: mol_type = other DNA; note = Synthetic coding sequence
atggataaggatgaagaggcgttgaaggcagcacaagccgaattaaaagaggccagaagacagtggcaccacctccaggtcgaaattgaatcccttcacgctgtggagcggggactggagaattccctccatgccagtgaacagcattaccaaatgcaactgcaggatctggagactgtgattgaaggcctcgagaaagaattgcaggaggtccgcagaggcatcgagaagcaattgcaggagcatgaaatgctgctcaacacaaaaatgaggctggaacaggagatcgctacctaccggcatctgctggagaaggaggagattcggtactatggttgtatacagggtggcaaaaaggacaaaaagcccaccacaagtcgcgttggttttgtcctcccaagcgcaatcattaatgaaattagcttcactaccaaagtcccacagaagtatgagaacgagaatgtcgagactgtgactaaacaggccatccttaatggctccatagtcaaggagagcactgaggcacacggcacaatccagactgagaaggtcgacgaggttatcaaagaatgggaaggtagtttctttaaagataatcctcgcctgaggaaaaagtctgtgtcacttcgtttcgacctgcatctagctgccacagacgaaggctgcctggagacaaagcaagataatctgcctgatattgaggtcagattgataatgagaaggagctgttctatccctagcattaagcccccctccacggctaactag

SEQ ID NO: 15878 - DNA, 888 bp, synthetic construct
  source 1..888: mol_type = other DNA; note = Synthetic coding sequence
atggaactgtctcagcttctgaatgaaatacgagctaattacgagaagatactgacaagaaaccagatcgagactgtgctcagcaccagaattcaactggaggaggatatcagtaagaagatggacaaggacgaagaggccctcaaggccgcacaggccgaactgaaggaagcgagacgacagtggcatcatctgcaggtcgagattgagagcctccatgcagttgaaagaggcctggagaactccctgcacgccagtgagcagcactaccaaatgcagctccaggacttggagaccgtgattgaaggcctcgagaaagaattacaagaggtcagacgaggaatcgagaagcaacttcaggagcacgaaatgctgctgaacacaaagatgcggctcgaacaggaaatcgcaacttaccggcatcttctggagaaagaagagattcgttactacggatgcatccaaggaggtaaaaaggacaaaaagccaaccacatcccgtgtcggttttgtgttaccctcagcaatcattaatgaaatctcctttaccactaaggttcctcagaaatacgagaacgaaaacgtcgagactgtcactaaacaggccatactgaacggttctatcgtcaaggaaagcactgaggcacatgggacaattcaaactgagaaagtggacgaggtgatcaaggaatgggagggatcctttttcaaagataaccctcgcctgaggaagaaatctgtctccctccggttcgacctgcacctggccgcaaccgatgaagggtgcttagagacaaagcaggacaaccttccagacatcgaggtgcgattgattatgagaaggagctgttccattccttctatcaagcctccaagtacagccaattag

SEQ ID NO: 15879 - DNA, 1860 bp, synthetic construct
  source 1..1860: mol_type = other DNA; note = Synthetic coding sequence
atgtctggcttggtgcttgggcagagggatgagccagcaggacatcgtttgtcccaggaagaaatcctcggaagcaccaggctggtgagccaggggctcgaggccctcaggtctgagcaccaggctgttctccaaagcctctctcagaccatcgaatgcctgcagcagggcggccacgaggagggtctggtccacgaaaaagcccgccagctgagacgcagcatggaaaatattgagcttggactgagcgaggctcaggtgatgttggccctcgcttcacatctcagcacggtcgagtcagaaaaacagaaattacgagcccaggtgagacggctctgccaggagaaccagtggttgcgtgacgaattggcaggcacacagcagaggttgcaaagatcggaacaggctgtggctcagctggaagaggaaaagaaacacctggaattcctcgggcagctgaggcagtatgacgaagacggacacacatccgaagaaaaggagggagacgcaaccaaggactccctggacgacctgtttcccaatgaggaggaagaagacccttctaacgggcttagccgcggtcagggcgcaaccgccgctcagcagggcgggtacgagattcctgctagattgagaaccctccataatctcgtgattcagtacgcagcccagggaagatacgaagtggcagttcctctctgtaagcaggccctggaagatctcgagaggacatccgggagagggcaccctgatgttgccaccatgctgaatatcctggccttggtctacagagaccagaacaagtacaaagaggcagcccatcttctgaatgacgctttaagcatcagggagagtactctcggcccagaccatcctgccgtcgcggctactctcaacaacctcgcagttctctatggcaaacgagggaaatataaggaagctgaacccttgtgtcaaagggctctcgaaatcagggaaaaagtgctcggcactaaccatcctgatgtggccaaacagttgaataacctcgccctcctgtgtcagaatcaagggaagtatgaggctgtcgaacgttactatcagcgagccttggctatttacgaggggcagttgggacccgacaaccccaacgtagctaggactaaaaacaatctggccagttgctatcttaaacaagggaaatacgcagaggcagagacattgtacaaggagatactgactagagcacacgtgcaggagttcgggtctgtagacgatgaccataagcccatttggatgcatgcagaagaacgggaagagatgtccaagtccagacaccatgaggggggcaccccgtacgcagaatatgggggttggtataaagcctgtaaggtgtccagccccaccgtgaataccactttaagaaatctcggtgccttatatcggcgtcagggtaaattagaggccgccgagacgttggaggaatgcgcactgcggtcaaggaggcagggcaccgatccaatcagccagactaaggtggctgagctgttgggcgagagcgacgggaggcggacttcccaggagggccccggggattcagttaagttcgaaggtggtgaggacgcctccgtcgccgtggagtggagtggagacggctccgggacactgcaaagatctggtagcctgggcaaaatcagagacgttctacggcggtcaagtgagttgctggtgaggaagctccagggtactgaacctcgcccgtcctccagtaacatgaaacgcgctgccagtctcaattatttaaaccagccctctgccgcaccccttcaggtgagcaggggtctgtccgcctcaaccatggatctcagctcctcctcatag

SEQ ID NO: 15880 - DNA, 1860 bp, synthetic construct
  source 1..1860: mol_type = other DNA; note = Synthetic coding sequence
atgtctggcctagtcctcggccagagagatgaacctgcgggccatcgcctttctcaggaagaaattctgggtagcacgaggcttgtgagtcaaggtctggaggctctgcgctctgaacaccaggccgtcttacaaagcttgtcccagaccattgagtgtctgcagcagggcggtcacgaggagggcctggtgcacgagaaagctcgacaactccggcgttccatggagaacatcgaattggggctgtccgaagcacaggttatgctagccctcgcgtcacacctctctaccgttgaatccgaaaagcagaagctccgggcacaggtgcggcgcctgtgccaggaaaaccagtggttacgagacgagctcgcaggaacccagcagagattgcagcgcagcgagcaggcagtggcgcagttggaggaggagaagaagcaccttgaattcttgggtcagctccggcagtatgatgaggacgggcatacatccgaggagaaagagggagatgccactaaagatagccttgacgacctgttccctaacgaggaagaggaggacccctcgaacggcctctctagaggccagggcgcgaccgccgcccagcaaggaggatacgagattccagcaaggctccggacgcttcacaatctggtcattcagtacgctgcccagggacgttatgaggtagctgtcccgctctgcaagcaggccctagaggacttagaaagaacgtccgggcggggccaccccgacgtggccaccatgctgaatattctggctctagtttatcgggatcagaataagtacaaagaagccgctcacctgctgaacgatgctctgtctattcgggagagcaccttgggtccagaccatcctgccgttgcagctaccctcaataatctggcagtgctctatgggaagcgcggcaaatataaagaagccgagcctctgtgtcaacgagcccttgagatcagagagaaggttttagggactaatcatccagacgtggcaaagcaactcaacaatctggctcttctttgtcagaatcaggggaagtacgaagccgtcgaacggtactaccagcgagccttagcaatctacgaggggcagcttggcccagacaatccgaatgtcgcgaggactaaaaacaacctggcctcctgttacctgaagcaggggaaatacgccgaggcagagaccctttacaaagagatcttgaccagagcccacgtgcaggagttcggcagcgtcgacgatgaccacaaacccatatggatgcacgcggaggagagggaagaaatgagcaagagcagacatcacgaaggagggactccctacgctgaatacggcgggtggtacaaggcctgcaaggtatcgtcacccaccgtgaacacaactctgaggaacttgggcgccctatacagacgtcagggtaaactcgaggccgccgaaacattggaagaatgcgccctcaggtcccggaggcaaggcactgaccccattagtcagactaaggtggctgagctcctgggtgagagcgatgggcggagaacctcacaggaagggcctggtgattccgtgaagttcgagggaggggaagacgccagcgttgccgtggaatggtccggagacgggagcggaacactccagcgctcgggatctctggggaaaatccgggatgtgctccgcagaagcagcgaactgttagtcaggaaactgcaaggcactgagcccagacccagttccagcaacatgaaacgtgccgcctctctgaactacttgaaccagcccagcgcggctcctctccaggtatcacggggcctgagtgcctccacaatggacttgtccagctcctcctag

SEQ ID NO: 15881 - DNA, 1170 bp, synthetic construct
  source 1..1170: mol_type = other DNA; note = Synthetic coding sequence
atgcttcgttggaccgtgcacttagagggcgggccacgtagggtgaaccacgccgcagtggcagtcgggcatcgggtgtattcctttggagggtattgtagcggggaagactacgaaacgctgagacagatcgatgtacatattttcaacgccgtctctctgaggtggacaaaattgccacctgtgaagtcagccatacgaggacaggcaccagtggtaccatatatgcgctacggccactcaacagtgctcatcgacgacacagtacttctgtggggcggaagaaatgacaccgaaggagcgtgcaatgtcctgtacgcttttgacgtgaacactcataagtggttcacacctcgcgtttctggtacagtgcctggggctcgagatggccattcggcttgtgttcttggcaagatcatgtatattttcgggggctacgaacagcaggccgattgctttagcaacgacatacacaagctggacacgtctaccatgacttggaccctgatctgtaccaagggctctccagccagatggcgtgacttccattctgcaaccatgcttggcagtcatatgtatgtctttgggggaagagctgaccggttcggccctttccactctaacaatgaaatctactgtaaccgcatccgggtctttgacactagaacggaggcctggctcgactgccccccaactccagtgctcccagagggccggaggtctcacagcgcattcggatacaacggcgagctttatatatttggaggttataatgcccggttgaatcggcacttccatgacctttggaaattcaatcccgtaagcttcacctggaagaaaatagagcctaaagggaaggggccatgtccccgccgcagacagtgctgctgcatcgtgggagacaagatcgtcctcttcggtgggacctcaccatctcccgaagagggtctaggagacgaatttgacctcattgatcacagtgacctacacatcctggactttagcccaagcttaaaaactctgtgtaagctggccgttatccagtataatctcgaccagtcttgcctgccccatgacataagatgggagctgaacgccatgacgacaaattcgaacatatctagaccgatcgtctcttcaccgtttgcttatcctcttccaagtgcgtag

SEQ ID NO: 15882 - DNA, 549 bp, synthetic construct
  source 1..549: mol_type = other DNA; note = Synthetic coding sequence
atgcctatcccacctcccccgcccccgccccccggcccccctcctcccccaacgtttcatcaagccaataccgagcagccaaaactctcccgcgatgaacaacggggacgaggagccctcctgcaggacatctgcaaggggacaaagctgaaaaaggtaaccaacataaacgataggagcgctccaatactggagactccgcctcctccaccccccgtcatcaggaatggcgccagagacgccccccctccaccccctccatatcgcatgcacggctctgaacctccgtctcgaggaaaacctcccccgcctcctagccgaactcctgccggccctcctccaccgccaccacctccgctgcggaatggacaccgggactccataacgacggtgagatcatttctagacgactttgagtccaagtacagctttcaccccgtggaggattttcctgcaccggaagaatacaaacattttcaaagaatataccccagtaagacaaatcgggcagcccgtggcgccccacccctcccgccaatcttgaggtag

SEQ ID NO: 15883 - DNA, 831 bp, synthetic construct
  source 1..831: mol_type = other DNA; note = Synthetic coding sequence
atgacctcttttcgattggccctgatccagcttcaaatatctagcatcaagagcgacaatgtgaccagggcctgctcttttattagggaagcggctactcaaggcgcaaaaatcgtcagcttgcctgaatgtttcaatagtccctacggcgcgaagtacttcccagaatacgctgaaaaaattccgggtgagtccacacagaagcttagtgaagtcgcgaaggaatgctccatctatttgattggggggagtatcccggaggaagacgcaggtaaactctacaacacgtgcgctgtgttcgggccggatggtaccctgttagcaaagtatcgtaaaatccacctcttcgacatagatgtcccaggaaagatcactttccaggagtctaagaccctcagccccggagatagcttcagcactttcgacacgccctactgcagggtggggctcggtatttgctacgacatgcggtttgccgaactcgcccagatctatgcccaaagggggtgtcagctgctggtctaccccggggcattcaatcttactaccggcccagcccactgggagttactacagaggtcccgggccgtcgataatcaggtgtatgtcgcaactgcatcacctgccagggacgacaaagcctcttacgtagcttggggtcattccacagtcgtgaatccttggggcgaagtcttagccaaagccggtacagaggaggctatagtttactcggacattgacctgaagaagttggccgagatccgacagcaaatacccgtattccggcagaaacggtccgacctatacgcagtggaaatgaaaaagccgtag

SEQ ID NO: 15884 - DNA, 1476 bp, synthetic construct
  source 1..1476: mol_type = other DNA; note = Synthetic coding sequence
atggaggaaatccccgcgcaggaagccgccgggtccccaagggtgcagttccagtctctggagacccagagtgagtgtctcagtccagagccccagttcgtgcaggataccgatatggaacaaggcttgaccggcgatggagagacccgagaggagaacaagctgctgattcccaaacagaaaatctcagaggaggtgcactcttacaaggtccgtgttggacgccttaagcatgatataactcaggtccccgaaacccgggaagtttacaagagcgaggaccgcctagagcggctgcaggagatcctgaggaagttcttgtacctcgagcgtgaattccgccagatcaccatatccaaggagactttcacaagcgagaaaaataacgagtgtcacgaaccggagaagagcttttcgctcgatagcactattgatgccgatcagcgggtgctacgcatccaaaacacggacgacaacgacaaatacgacatgagctttaaccaaaattctgcctctggaaagcatgaacacttaaatcttaccgaggatttccagtcatccgagtgcaaggagagtttgatggacctatctcacctcaataagtgggaaagcatcccaaacaccgagaagtcctacaagtgtgacgtgtgcggaaagattttccatcagtcctccgctcttactcggcaccagcgcatccatacccgggagaagccatacaaatgtaaggagtgcgaaaaaagcttctctcagtctagctccctctcccggcacaagagaatccacacacgagaaaaaccatacaagtgtgaggcctccgataagtcctgtgaagcttccgataaaagctgttctcctagctcagggattattcagcataagaagatccatacacgggctaaatcctacaaatgctccagttgtgagagagtcttttctcggtctgtacatctgacgcagcatcagaagatccataaagagatgccatgcaagtgtacagtgtgcgggtcggacttctgccataccagctacttgctggaacatcagcgggtgcatcacgaagaaaaagcatacgaatatgacgaatacgggctggcctatatcaaacagcagggcatacactttcgcgaaaagccttatacctgttctgagtgtggcaaagatttcaggttaaattcccatctcattcaacatcagcggattcacacaggagagaaagctcatgagtgtaatgagtgtggtaaagccttctcacagacctcctgtctgattcagcatcataagatgcaccgaaaggagaaatcctatgagtgtaatgaatatgagggatccttcagccattcctccgacctaatactgcaacaagaagtcttgacccgtcagaaagcattcgactgcgatgtctgggagaagaatagttctcaaagggcgcatctggtgcagcaccaatcaattcataccaaagagaacagttag

SEQ ID NO: 15885 - DNA, 1089 bp, synthetic construct
  source 1..1089: mol_type = other DNA; note = Synthetic coding sequence
atggcacacagcagcttctttccagatgagtacttcacctgctctagcctgtgcctgtcctgtggtgtcgggtgcaaaaaatctatgaatcacgggaaggagggcgtcccacatgaggccaagtcccgttgtagatattcacatcagtatgataacagagtatatacctgcaaagcctgttacgagcggggagaggaagtcagcgtggtccccaagacgtctgcctccacggactcgccctggatggggctcgcaaaatatgcttggtcaggatatgtgatcgagtgccccaactgcggcgtcgtctaccgcagccgccagtactggtttggcaatcaggatccagtagacaccgtggttaggactgagatcgtgcatgtttggcccggcactgatggcttcttgaaggacaacaataatgccgcacagagactgctggacgggatgaatttcatggcccagtccgtctcagaattgtccttgggcccaaccaaggcagtgacctcctggcttaccgaccagatagcgcctgcatattggaggcctaattcgcaaattctatcctgcaacaagtgcgcgacctcctttaaagacaacgatactaagcatcactgcagagcctgtggagaggggttctgcgatagctgctctagcaaaacaagaccagtcccggagagaggctggggccccgcccccgtcagggtatgtgataactgctatgaggcccgcaacgttcagctggcagtaactgaggcccaggtggatgacgagggcgggacactaatagcccgcaaggtcggtgaagctgtgcagaacacccttggcgcagttgtaaccgcaatcgatattcctctcggactcgttaaggatgccgctcgcccagcttattgggttcctgatcacgagattctacactgccacaattgccgtaaagagttcagcatcaaattgtctaagcatcactgcagagcatgtggacaagggttttgcgatgagtgttcacatgacaggcgggcagtcccaagtagaggttgggaccatccggtaagagtgtgcttcaattgtaacaaaaaacctggggacctgtag

SEQ ID NO: 15886 - DNA, 348 bp, synthetic construct
  source 1..348: mol_type = other DNA; note = Synthetic coding sequence
atgagcggagagcccggtcagaccagcgtggccccaccaccagaggaagtcgagcctggctccggggtcaggatagttgtcgagtattgtgagccatgtggcttcgaggccacctatctggaattagctagtgccgtgaaagagcagtaccctggcatagaaattgagtctagactaggcggcactggtgcttttgagatcgaaattaacgggcagctggtcttctctaaactggaaaatggcggattcccctatgaaaaagacctcattgaggccattcggcgcgcgagcaacggcgagacgctagagaagatcactaacagcagacccccatgtgtgattctgtag

SEQ ID NO: 15887 - DNA, 507 bp, synthetic construct
  source 1..507: mol_type = other DNA; note = Synthetic coding sequence
atgctgttccgcctctccgaacactccagtcctgaagaagaggcatcacctcatcagcgcgcctcaggtgaaggtcatcacttaaagtccaagcgccccaacccttgcgcgtatacaccaccttccttgaaagccgtccaacgtatcgcagagagccacctgcagtctatttcaaacctcaatgaaaaccaggcatcagaggaggaggacgaactcggtgaattaagggaactcggatatccgcgagaggaggacgaggaggaggaagaagacgacgaggaagaagaagaggaggaagatagccaggctgaagttctcaaggtgatccggcagagcgccggccagaaaaccacctgcggccaaggcctagagggcccttgggagaggcctccccctctggacgagtctgagagagacggcggcagtgaagaccaagtcgaggatcctgcattgtctgagcccggtgaagaaccgcagcgcccctccccctccgaaccagggacttag

SEQ ID NO: 15888 - DNA, 507 bp, synthetic construct
  source 1..507: mol_type = other DNA; note = Synthetic coding sequence
atgctgttccgtctgtcggagcattcctcccctgaggaagaggcatcaccacaccagcgcgcctctggggagggacatcaccttaagtcaaagaggcccaatccctgcgcctatacaccaccttcattgaaggccgtacaaaggatcgccgagtctcatcttcagagcattagtaacctgaatgagaaccaagcatcagaagaggaggatgaattgggcgaactgagggaactcggttatcctcgggaggaagacgaggaggaggaggaagatgacgaagaggaggaggaagaggaagattcccaggccgaagtcctaaaagtcattagacaatcagccggccagaaaacgacatgtggccaaggccttgaggggccctgggagcgccccccccctcttgacgagtctgaaagggacggagggtcagaggatcaggtggaagacccagctctgtccgagccgggtgaagagccacagagacctagcccgagcgagcccggcacctag

SEQ ID NO: 15889 - DNA, 648 bp, synthetic construct
  source 1..648: mol_type = other DNA; note = Synthetic coding sequence
atggatccgaaggatagaaagaagatccagttctcggttccagcgccaccttctcagctggatccgagacaagtggagatgattcgccgtcggcgcccgaccccagctatgctattcaggctgagcgagcacagttcacctgaagaagaggcctctcctcaccaggtgaccccactgacttggcatttcccctggcagcgcgcctctggtgaggggcaccacctcaagtctaagagacctaatccgtgtgcttacacgcctccctcattgaaggccgtccaaaggattgcggagtcacacctccagtctatctcaaacctcaacgagaaccaggccagtgaggaggaagatgaattgggcgaacttcgggaactgggatatccacgcgaggaagacgaggaagaagaggaggatgacgaagaggaggaagaagaggaagactctcaagcagaagtgctgaaagtgattcgtcaaagcgctggtcagaagacgacatgcggccagggcctggaggggccttgggaaaggcctccgcctttagacgaaagtgagagggacggagggagcgaggatcaggtggaagaccccgctctttctgagccaggagaggagccacagcggccctcaccatcggaacccggaacgtag

SEQ ID NO: 15890 - DNA, 5169 bp, synthetic construct
  source 1..5169: mol_type = other DNA; note = Synthetic coding sequence
atggagtctaatttcaaccaggaaggagttccccggccatcttacgtattcagtgccgatcctatcgccagacccagcgagatcaacttcgacggcattaagctagacctctcccacgagttctctcttgtagcgccaaatactgaagctaatagtttcgagtccaaagactacctgcaggtctgcctcaggataaggccttttactcagtccgaaaaggagctcgagtctgagggatgtgtgcacatattggattcacagactgtcgtgctcaaagaaccacaatgtatactgggacgcttgtctgaaaaatcctccggtcagatggcccagaaattttcctttagcaaagtgttcggacccgcaacgacccaaaaggaattttttcagggctgtataatgcagcctgtgaaggatctgctgaaaggacagtcccgattaatcttcacctacggcctgacaaacagtggtaagacttacactttccaggggaccgaggagaacattggcattctgccgaggacgcttaatgtgttgttcgatagtctccaggaaaggctttacaccaaaatgaacctgaaaccacaccgaagcagggaatatctgagactaagctcggagcaggagaaggaggaaattgccagcaagtcagctctactgagacaaataaaagaggttaccgtgcataacgactcggatgacaccctgtatggctctctgactaattccctgaacatttctgagtttgaagaatcaataaaggactacgaacaggccaacctgaatatggcaaacagcatcaagttcagtgtgtgggtgtctttttttgagatatacaacgaatacatatatgacctgttcgtaccggtgtcatcgaaattccagaagcgaaaaatgttaaggctgagtcaagatgttaaaggatacagttttattaaggatcttcaatggattcaggtttccgattccaaagaggcttaccgattgttgaaacttggcatcaagcatcagagcgtggcgtttacaaaactgaataatgcctcaagtcgcagccattctattttcaccgtgaagatactgcagatcgaggattccgagatgtctcgggttattcgagtttccgaacttagcctctgcgacttggctgggagtgaacggaccatgaagacccagaacgaaggcgaacggctcagggagactgggaacattaatacgagtctccttacacttgggaaatgtattaatgtcctaaagaattcagagaaatctaaattccagcagcacgtgcctttcagagagtctaagctgacccactactttcagagcttctttaacggaaagggaaaaatctgcatgattgttaatatctctcagtgctatctcgcctacgatgagaccctgaacgtcctaaaattttctgcgatagcgcagaaagtctgcgtgccggacaccctgaactcatcccaggagaagcttttcggccccgtcaagtcaagccaagatgtcagtttagactctaatagtaatagtaagattttaaacgtcaagcgggccaccatatcatgggaaaattcactcgaagatttgatggaggatgaagatctcgtggaagagctagagaatgccgaggagacacaaaatgtcgagaccaaactactggacgaggacttggataagacactcgaagagaacaaggcattcattagtcacgaagaaaaaaggaagcttctggacctgattgaggatctgaaaaagaagttgattaatgagaagaaggagaaattgactttagagttcaagatccgggaagaggtgacgcaggaatttacgcagtactgggcccagagagaggccgacttcaaggagacattgctccaggaaagagagattctggaagaaaacgccgaacggaggcttgccatcttcaaggacctggtgggaaaatgtgacactcgagaggaagccgctaaggatatttgcgcaacgaaggtggagactgaggaaacccacaactacgtcggttttgaagacatcattgattccttgcaggataatgtggcagatattaagaagcaggccgagattgcacacttatacattgctagcctgcccgatccacaggaagcaacagcatgtttggaattaaagtttaaccagattaaggccgagctagctaagactaaaggtgaactcattaaaaccaaggaagaattaaaaaagagagagaacgaaagcgacagcctcatccaggagcttgagaccagcaataaaaagattattacccaaaaccagagaatcaaagagttgattaacatcattgaccagaaggaagacactattaatgaattccagaacctcaaatcccacatggaaaacacctttaagtgtaacgacaaagcagacactagctccctgatcatcaataacaaactgatatgcaatgagacagtggaggtgccaaaagactccaaatcgaaaatctgcagtgaacgtaagcgtgtgaacgagaatgaattacagcaagacgaacctcccgccaagaagggcagtattcacgtgtcctctgccatcactgaagatcaaaagaagtccgaggaggtgcgtcccaatatcgcggagatagaagacattagggtcctgcaagagaataatgagggactgcgagccttccttttaaccatagaaaatgagctcaagaatgagaaagaagaaaaggcagagctcaacaaacagatcgtacactttcagcaggagctctcgttatcagagaaaaaaaacctgacactttcaaaagaagtgcagcagatccagtcaaactatgacattgcgatcgccgagttgcacgtgcaaaaatctaagaatcaggaacaagaggagaaaatcatgaaactctcgaatgagatcgagaccgcaaccagatcaattacaaacaacgtatcccagatcaaattgatgcacactaagattgacgagctgagaacactggactctgtctcccagatctcaaatatcgacctcctaaaccttcgagatcttagtaacggcagcgaggaagacaaccttcccaacacccagcttgacttgctcggaaatgactatttagtatctaaacaggttaaggagtatcgaatccaagaacctaaccgcgagaattcgttccattcatctattgaagctatctgggaggagtgcaaagaaatagtgaaggcaagctcaaagaagtcgcaccagatcgaagaactcgaacagcagatagaaaagttgcaggccgaggtcaaaggctataaggatgagaacaaccggctcaaagagaaggaacacaaaaatcaggatgacttgctgaaggaaaaggaaaccctgatccaacaacttaaggaggagctgcaggagaagaacgtgactctagacgtacaaatccagcacgtcgtcgaaggaaaacgcgccttatctgagctcacacaaggggtcacatgttacaaggccaagatcaaagagctggagaccatactggagacccaaaaagttgagtgctctcatagcgctaagcttgaacaggatattctggagaaagagagcatcattctgaagctggagcgcaacctgaaggaatttcaggagcaccttcaggacagcgtgaaaaacaccaaggacctgaacgtcaaagagcttaagctcaaggaagagatcactcagctaactaacaatctccaggacatgaagcatctgctacaattgaaagaggaagaagaagagacaaacagacaagaaacggagaaactgaaagaggaattgagcgcttcctctgcaagaacccaaaacctgaaggccgatttacaacggaaggaggaggactatgctgacctcaaagaaaagctgacagatgcgaagaagcagataaaacaggtccagaaggaagtgtccgttatgcgggatgaggataaactgctccggatcaagattaacgagttggagaagaaaaaaaatcaatgtagccaggagctggacatgaagcagcgcactattcagcagctgaaggagcagctgaacaaccagaaagtggaagaagcaattcagcagtatgagcgagcttgcaaagatctaaatgtaaaagaaaaaatcattgaggatatgcgcatgacactggaggagcaagagcagactcaggtggaacaggaccaagtcctggaggctaagttagaggaggtggagagactggccacggaattagaaaagtggaaggagaagtgcaatgacttagagactaagaataaccagcgttccaacaaagaacatgagaataatacggatgtgttggggaagctgaccaatctgcaggatgaactgcaggaaagcgaacagaaatacaatgctgaccgtaagaaatggttggaagaaaaaatgatgttaatcacccaagccaaggaagcagaaaatattcgcaataaggaaatgaaaaagtatgcggaggaccgggagcggttttttaagcagcagaacgagatggagatcctgacggcacagctcaccgaaaaggacagtgacctccagaagtggcgggaagaacgggaccaactggttgctgccctggagatacagctgaaagccctgatctcttccaacgtgcagaaggacaacgagatcgagcaacttaaacgcatcatcagcgagacttcaaagattgagacacaaatcatggacatcaaaccaaagagaatctcttccgcggaccccgataagctccagaccgaaccactgtccacctcctttgagatttctagaaacaagatcgaggacggtagcgtggtattggattcctgcgaagtgtccaccgaaaacgatcagtcaacaaggttccctaagcctgagttagagatacagtttactccactacagcccaacaagatggcagtcaagcacccagggtgcactactccagttactgtcaagatcccaaaagctcgcaagagaaaatctaatgaaatggaggagtctgcaagtcccccgcctaaagagtgctcatcgtcgcctgccatggagcagagctggaaagagaatgattttgacaagctacgcgaagagggctttaggcggtctaattactcggagttgcaagaggaaatacagacaaagggcaaagaagttgagaacttcgagaagaatcttgactag

SEQ ID NO: 15891 - DNA, 1215 bp, synthetic construct
  source 1..1215: mol_type = other DNA; note = Synthetic coding sequence
atgagacgcgacgtgaacggcgtgacaaagagccggtttgaaatgttcagtaattcagacgaagcagtaatcaataagaaactccccaaagagctgctacttagaatcttttcatttcttgacgttgtcactctctgtagatgcgctcaggtatcgagggcatggaacgtgctggcactggatggatctaactggcaaagaatcgatctttttgattttcagcgcgacattgagggtcgtgtcgttgagaatatttccaagagatgtggtggtttcttgagaaaacttagtcttcggggttgcctcggggtgggggacaatgccttgcgaacttttgcacagaactgcagaaacatcgaggtacttaatctgaacgggtgcacaaaaactacggacgcggaaggctgtcctttacttgaacagctgaacatcagctggtgcgaccaggtcacaaaagatggcatacaggcactggttcgcgggtgtggcggccttaaagcgttgtttctgaagggatgcacccaactagaggacgaggcgctgaagtatattggcgcacattgtcctgagctggtgacgttgaacctgcagacctgcctacaaattacagacgagggtctgatcactatctgtagagggtgtcacaaactccagagtctgtgtgcctcagggtgcagcaatatcacagatgcaattcttaacgctttagggcagaattgcccacgactgaggatactggaagtcgcccggtgtagccaattgacggacgttgggtttactacactggcgcggaattgccatgagctcgaaaagatggatctggaggaatgtgtgcagattaccgacagcactctgatccaacttagcatccactgccctaggcttcaggtgctgagtctcagtcactgcgaactcatcactgacgatggcatacgccacctgggcaacggggcttgcgctcacgaccaattggaggttatcgaactagataattgtcccctcattacagacgccagtcttgagcacctcaaaagttgccactcccttgaacgcatcgaattgtacgactgccagcaaatcactcgagccggcattaagcggttgcggacccatctgccaaatatcaaagtccatgcgtatttcgcccccgtcaccccccctccttccgtcgggggaagccggcagcgtttttgccgctgctgcatcatactgtag

SEQ ID NO: 15892 - DNA, 1251 bp, synthetic construct
  source 1..1251: mol_type = other DNA; note = Synthetic coding sequence
atggcccactctcccgtcgcagtgcaggtccccggcatgcagaacaacattgccgaccccgaagagttgttcacaaagctcgagcgcattggcaaaggcagctttggggaagtgtttaagggcatcgataaccggacacaacaggttgttgcgattaagatcatcgacctggaagaagctgaagatgagattgaagacatacagcaggaaattactgttctgtcccagtgtgactcttcttatgtgaccaaatactacggctcatacctcaaaggctcaaaactgtggatcataatggagtacctgggcgggggatcagccctagatctcctcagggccgggccatttgatgagtttcagatcgcgacgatgttgaaagagatccttaaaggattggattatcttcacagcgagaaaaaaattcatcgagatattaaagcagctaacgtgttactgagcgagcaaggagacgtgaaactcgccgacttcggggtggcagggcaattgactgacacacagatcaagcggaacacgttcgttggaacgcccttctggatggccccggaggtcatccagcagagcgcctacgactccaaagcagatatatggtccctcggaataacagctatcgaacttgctaagggggagcctccaaacagcgatatgcatcctatgagagtcctgtttttgattcctaaaaataatcctcctacgttggtcggagacttcacaaaaagtttcaaggaatttatagacgcctgcctgaataaagatcccagcttcagaccaacagccaaggaactcctgaagcataaattcatcgttaagaactctaagaaaactagctatctcaccgagttgatcgacaggtttaaacgctggaaggccgaagggcactcagatgacgagtcggactccgaaggatcggactcagagagcacgtcaagggagaataacacgcacccagaatggtctttcacaaccgtgcgtaagaaacccgaccctaagaaggtccagaacggggccgagcaggacctcgtgcagacactcagttgcctgagcatgataatcactcctgctttcgccgagctgaaacagcaagatgagaataatgcttctcgcaatcaggccatagaggagctggagaaatcaattgccgtggctgaggcagcatgtccggggatcacggataagatggtgaagaagctcattgaaaagtttcagaagtgctctgcggacgagagcccttag

SEQ ID NO: 15893 - DNA, 1020 bp, synthetic construct
  source 1..1020: mol_type = other DNA; note = Synthetic coding sequence
atggcccattctccggtcgccgtccaggtgccagggatgcagggtagtaagctgtggataataatggagtaccttggcggcgggtccgcgttggatctgctcagagctggccccttcgacgaatttcagatcgctaccatgcttaaggaaatactgaaaggccttgactacctgcactctgagaaaaagatccacagggacattaaagctgctaacgtgctgttatccgagcagggggatgtaaaattggcagatttcggggtcgccgggcagctcaccgacacgcagatcaaaagaaacaccttcgtcgggacacctttctggatggctcctgaggtcatccaacagtccgcctacgattctaaagcagatatttggagtttgggtatcacagccatcgagctagccaagggagaacctcctaacagcgacatgcacccaatgagggtgctctttctgattcccaaaaataatcctccaacccttgtaggcgacttcactaaaagctttaaggagttcatagacgcctgccttaacaaggatccttcatttcgcccgacggccaaagaattgctcaagcataagttcatcgtgaaaaatagcaagaaaacttcttaccttacggaactcatcgatcgatttaagcgctggaaagcggaaggacattccgatgatgagagtgacagcgaggggagcgacagcgagagcacaagccgcgaaaacaacacacatccagagtggtcttttacaacagtccgcaaaaagccagacccaaagaaagtacagaatggtgcagagcaggacctcgttcagacgctgtcctgcctgtctatgatcatcacacccgcatttgccgaacttaagcaacaggacgagaacaacgcatctcgcaaccaggccattgaggagctggagaagtccattgctgtggcggaggccgcgtgtcccgggatcaccgacaaaatggtcaagaaacttatcgagaagttccagaaatgttctgcggacgaatcaccgtag

SEQ ID NO: 15894 - DNA, 2625 bp, synthetic construct
  source 1..2625: mol_type = other DNA; note = Synthetic coding sequence
atggaggtcttacgggagaaagttgaggaggaggaagaagcggaacgcgaggaggcggccgaatgggctgaatgggctcggatggagaaaatgatgaggccggtcgaagtgcgcaaggaggagattacactgaagcaggaaactcttagagatctcgaaaagaagctgagtgaaatacagattaccgtttcagccgagctgcccgcctttacaaaagacaccatagatatatcaaaactgccgatttcctacaaaaccaatactccaaaggaggagcatctactgcaagtagcagataatttttctcggcagtatagccacctgtgtcccgaccgggtgccattgtttctgcatcccctgaatgagtgtgaggtgccgaagtttgtatcaactactctgcggccaaccctgatgccatacccagaattgtacaactgggacagctgtgctcagttcgtcagcgattttttgaccatggtgcctctgcctgaccccctgaaacccccatcccatttatattcgagcacaaccgtcctgaaatatcagaaaggtaactgcttcgacttctccacactgctgtgctctatgctgatcggtagcggctacgatgcatattgcgttaatggctacgggtctttggacttgtgtcatatggacctgacccgggaggtgtgccctttgactgttaagcccaaagaaaccataaaaaaagaagagaaggtgttgcccaagaaatacacaatcaagcctcccagggacctgtgttcccgtttcgagcaggagcaggaggtgaaaaaacaacaggaaattagggcacaggagaagaagcggctcagggaagaagaggagaggcttatggaggcagagaaggctaaacccgacgccctccacgggctacgtgtccactcatgggttctcgtcctttctggcaagcgggaggtgcccgaaaattttttcatagatccatttacgggacacagctactcaacccaggatgagcactttctaggtatcgagtccttgtggaaccacaaaaattattggattaatatgcaggactgctggaactgctgcaaagacctaatatttgatctgggggacccagtgcgctgggaatatatgcttcttggcaccgacaagtctcagctaagcctgacagaagaggacgattccggaatcaacgacgaggacgacgtcgaaaaccttggaaaagaggacgaagataaaagctttgatatgccacacagctgggtagaacagattgagatttcccccgaagcattcgagactagatgtcctaacggcaaaaaagtgatccaatacaagcgcgccaaactagaaaagtgggcaccttacctgaacagcaacggtttggtgagcagattgaccacgtacgaagacttacagtgcaccaacatcctggagataaaggaatggtaccaaaaccgggaagacatgttagaattaaagcatataaacaaaactactgatctgaaaacagactactttaagccgggccacccgcaggcgctgagggtgcacagctacaagtcgatgcaacccgagatggatcgtgtcattgagttttatgagactgcccgtgtggacggactaatgaaaagggaggagacgccgagaacaatgactgagtattaccagggacggccagattttctgagctaccgccacgcttcatttggcccgcgtgtaaagaaacttacactctctagcgccgagagtaaccctaggcccattgtgaaaattacagagcgtttttttagaaatccggccaaaccagccgaggaggatgtggccgaacgggtattccttgttgccgaggaacggattcaactgaggtaccactgtcgagaggatcacattacggcatcgaagcgagagttcctgaggcgaacggaagttgactccaaggggaacaaaatcatcatgaccccggacatgtgtatatcgtttgaagtggaaccaatggagcacacgaagaaattactgtatcagtacgaggctatgatgcacctgaagcgggaagaaaagctgtcccggcatcaagtgtgggagagtgagctagaagtgctcgagatactgaagctaagagaggaggaggaggctgcacataccctaactatttccatttacgataccaagagaaacgaaaagagtaaggagtaccgggaagcaatggagagaatgatgcatgaagagcatttgaggcaggtggaaacacagcttgattacctggcgccgtttctggcacaattaccaccaggggagaaactgacatgctggcaggccgtaaggctcaaagacgaatgcttgagtgattttaagcagagactcatcaacaaggctaatctcatccaggctcgtttcgaaaaggaaacacaggagctgcagaaaaaacagcaatggtaccaggaaaaccaggtgactctcacaccggaagacgaggacttgtacctgagctattgtagtcaggctatgtttcggatccgcattctggagcagcggttgaatcgccacaaggaactggctcctctaaagtatttggccctcgaggaaaagttatataaggacccacgtcttggcgaactgcagaaaatattcgcctag

SEQ ID NO: 15895 - DNA, 1449 bp, synthetic construct
  source 1..1449: mol_type = other DNA; note = Synthetic coding sequence
atggagcagagcaacttagagaagctcgagctaaacgttaggaaactgcagcaggagctcgaccaactgaatagagataaactgtctttgcataatgatatctcggcaatgcagcagcagctgcaggagaagagagaggccgtcaactcacttcaggaagagctggccaatgttcaggaccacctgaatctggccaagcaggacctactacataccactaagcaccaagacgtgctgctctcagagcagacccggctgcaaaaggacatcagcgagtgggctaacagattcgaagattgccaaaaggaagaggagaccaagcaacagcagctacaggtgctgcagaatgaaatcgaggaaaacaagctgaagctggttcagcaggagatgatgtttcagcggttgcaaaaagagcgcgagagtgaaaagtctaaactggatcaagtactgagtaaagttctcgctgccgaggagagggtacggacattgcaggaagaggagcggtggtgtgaatcccttgagaagaccctctcccaaacgaagcgccagttgagcgaacgcgagcagcagcttgttgaaaagagtggcgagctcttagcacttcaaaaggaagctgattctatgagggccgatttctctttattaagaaatcaatttctgactgagcgaaagaaagcagagaagcaagtggcatctctcaaagaagcccttaagatccagcgcagtcagttagaaaagaatttacttgagcagaagcaggagaactcttgcattcagaaagagatggccacaattgaacttgtcgcacaggataaccacgagcgagctagaaggctcatgaaggaacttaaccagatgcaatatgagtataccgagttaaagaagcagatggctaaccagaaggacctcgaacgcaggcagatggaaatttcggatgccatgcgcacactcaagagcgaggttaaggacgagatcagaacctcacttaagaatctgaaccagttcttgcctgagctccctgctgacctggaggcaatcctggaaaggaatgaaaatctggagggagaactcgaatctcttaaggagaatctacctttcactatgaatgaaggaccttttgaggagaagctgaatttttcccaggttcatataatggacgaacattggagaggagaagccctacgtgagaaactgaggcatagagaggatcggctgaaagctcagctgaggcactgtatgagcaagcaggctgaagtgctgattaaaggcaaacgtcagacagagggtactcttcacagcctgaggagacaggtcgacgctttaggagagctagtgacgagcaccagcgcggactcagcttcctccccatcactgtcccaattggaatcatccctgactgaagactcacagctgggccaaaatcaggaaaaaaatgccagcgcgcgctag

SEQ ID NO: 15896 - DNA, 3780 bp, synthetic construct
  source 1..3780: mol_type = other DNA; note = Synthetic coding sequence
atggcactccgaccaggggccggcagtgggggcggaggggccgctggagccggcgctggttctgccggggggggaggctttatgtttccagtggccgggggcattcgcccaccccaagctggtctgatgcctatgcaacagcaggggtttcccatggtgtccgtgatgcaacctaatatgcagggtatcatgggcatgaattactccagccagatgtctcagggcccgatcgccatgcaggctggaatccctatggggcccatgcccgccgccggcatgccttatcttgggcaagcccctttcttgggtatgcgaccccctgggccacagtacacaccagacatgcagaagcaattcgccgaggaacaacagaagaggttcgaacagcagcaaaaactgttggaagaggagaggaagcgccgccagtttgaagagcagaagcagaagctacgtctgctgtccagcgttaagcccaagacaggggagaaatctcgcgacgatgccctggaagcaattaagggaaatcttgacggattctcacgggacgctaagatgcatccaacaccagcttctcacccaaaaaaacccggggtcggcgtcttcccttcacaggatcctgcgcagccccgcatgccaccgtggatttacaacgaatccctggtccctgacgcttacaagaaaatactggagactacgatgacccccaccggaattgataccgccaagctctatccaattctgatgtctagtggccttcctagagagactctcggccaaatttgggctctagccaatcggaccacacccggtaagctgaccaaggaagagctgtacacggtgctggctatgatcgcggttacccagaggggcgttcctgcaatgtcacctgacgccctgaatcagttccctgcagcaccaatccccacattgagcggtttcagtatgacgctgcccacccctgtatcccagccaaccgttatcccgagcggcccagctggctccatgcccctcagtctgggtcagcccgttatgggcatcaatctggtgggccccgtgggcggagccgctgcccaagctagtagcggcttcatacctacttaccctgccaaccaggtggtcaaaccagaagaggacgatttccaggacttccaggatgctagtaaatccggctctcttgacgattctttcagcgacttccaagagctccctgcctccagcaaaacatccaactcacagcacggaaactcagctccttccctcctgatgcccctgccggggaccaaagcactgcccagcatggataagtatgccgtattcaaaggtattgcagccgacaagagctcggagaacacggtccctcctggcgacccaggcgataaatactccgctttcagagaactagagcagacagcagaaaataaaccgctcggagagagcttcgcagagttcaggagcgctggaaccgacgatgggtttacagacttcaagacggccgacagtgttagtcccttagaacccccaaccaaggataagactttccctcccagttttccatccggaaccattcaacagaagcagcagacgcaggtgaaaaaccctctcaacttggcagatctggacatgtttagctctgtgaattgtagttctgaaaagccactgagttttagcgccgtgttttctaccagtaagtccgtgtcaactcctcaaagtacggggagtgccgctaccatgaccgcattggcagcaactaaaacaagtagtttggccgatgactttggggaatttagtcttttcggcgaatatagcgggctcgcacctgttggcgagcaagacgactttgcagactttatggccttttcaaattctagtattagctctgagcaaaaaccagacgacaagtatgacgcactgaaggaggaagcatcaccggtcccacttacttctaatgtgggtagcaccgtgaagggcgggcagaactcaactgctgcatcaacgaaatacgacgttttccgccaacttagcttggaagggagtggtttaggcgtggaggatttgaaggataatacgccttccggcaagagtgatgatgatttcgccgatttccacagtagcaagtttagttcaatcaattcggacaaatctctcggcgaaaaagctgtggcctttagacatactaaagaagacagcgcttcggtgaagtcactagatctaccttcaattggaggctcctcggtgggcaaggaagactctgaggatgcactgagcgttcagttcgacatgaagctcgccgatgttggcggcgatttaaagcacgttatgtctgactcctcactagacttgccaacagtatcaggccagcatccccctgccgctgatatcgaggatctgaagtacgctgcgttcgggtcatacagctctaattttgcagtgtctacgctgacctcctatgattggagcgatagagacgatgcaacccaggggaggaaacttagccctttcgtactgtccgcaggtagcggctcaccatctgccaccagcatcctgcaaaagaaggaaacctctttcgggtctagtgagaacattaccatgaccagcctcagtaaggtgactaccttcgtttcggaggacgctctgcccgagacgacattccctgcattggcatcttttaaggacacaattcctcaaaccagcgaacaaaaggaatatgaaaacagagattacaaagacttcacgaagcaggatctcccaactgcagagaggtcgcaagaagccacttgtccaagcccagcaagttccggcgcctcccaggagactccaaatgagtgctctgatgacttcggagagtttcaatccgagaagcctaagatcagcaaatttgattttctggttgccacaagccagtcaaagatgaagagctcagaagagatgatcaagtcggaactggccactttcgatctctccgttcaggggtcacataaaaggtccttgagcttaggggacaaagagatcagccgatcaagccccagtccagctcttgagcaaccttttcgggaccgaagtaatacactgaacgagaaaccagctcttcctgtgattcgagacaaatataaggacctgactggagaggtggaggagaatgaaagatacgcgtacgagtggcagcgctgtcttggcagtgccctcaatgtgataaaaaaggccaacgatactctgaatgggatcagcagctccagcgtgtgcacagaagtgatccaatccgcacaagggatggagtacttgctgggtgtggtcgaagtctaccgcgtgacaaaaagggttgagctgggcataaaggccaccgccgtgtgttcagagaagctccagcagctcctgaaggacatagataaagtgtggaataaccttattgggttcatgagtctcgcgactctaacatgctgctgggagaagatgacggtgatcacaaagcacctctcaccctaccatgaattacttgaggagaaacccgacgagaactctttggatttcagcagctgcatgctgagacctggcatcaaaaacgcccaggaactcgcatgcggcgtatgtctcctgaacgtggactcccggtctcgcaaggaagaaaagccagccgaggagcaccccaaaaaggctttcaacagtgaaaccgactctttcaaactggcctacgggggacatcagtatcacgcaagctgtgccaacttctggattaattgcgtcgaacctaagcctccagggctggtactcccagatttgctctag

SEQ ID NO: 15897 - DNA, 1158 bp, synthetic construct
  source 1..1158: mol_type = other DNA; note = Synthetic coding sequence
atggccctccgtcccggggctggatcaggcgggggcggggccgccggcgccggtgctggcagcgccggcggcggcggattcatgttcccagtagccggcgggattcgtcctccgcaggcaggactgatgcctatgcagcagcaaggattccccatggtgagcgtgatgcaacccaacatgcaagggattatgggaatgaattattcctcccagatgtctcagggccccatcgcaatgcaggccggcatcccaatgggacccatgccggctgctgggatgccttacctgggacaagcacccttcctggggatgcggccccccggaccccaatacactccggacatgcagaagcagttcgctgaggagcagcagaagcgatttgaacaacagcaaaagctattagaagaagagcgtaagaggcgtcagtttgaggagcagaagcaaaaactgcgtctgctaagctccgttaagcccaaaactggcgaaaaatccagggacgacgccctcgaagctataaaaggcaatctggacggattttctagggatgccaagatgcatcctactcctgcctctcaccctaagaagcctgactgccccacctcttcccactcgaccaagacggttagcccctcaccggccttcctcgacgaagaggaattttccgatttcatgcagggcccggtcgaggtgcctccatgtggcccgagctccacctctcagccattccagagctttcacccttcgactccactggggcagctccacacgcagaaggccggtacccaacccctccccccttctcagtctcccgtccccttcgccctgcacggtgtgccaggccagattccttatttctctacggcatccgcttctcacagtgtccctgaggcaggtccttccctggaggagaaatttttggtgagctgcgacatcagcaccagcgggcaggagcagatcaaattaaacacgtcggaggtaggacataaagctctcggccccggcagcagtaagaaatatccatccctcatggcctcgaacggcgtcgcggtggacggatgcgtatgggagtattttccccaccgcatcttactctcccccgaatgcttgctcggcttcactatgcgagtctggttccagatgcctatccgaaagtcttag

SEQ ID NO: 15898 - DNA, 939 bp, synthetic construct
  source 1..939: mol_type = other DNA; note = Synthetic coding sequence
atggccgactttggtataagcgccggtcagtttgttgccgtggtctgggacaaatccagccctgtggaagccctgaagggtctggtggacaagttacaggctctgacaggcaatgagggtcgggtctcagtcgagaacattaaacaacttttacagtcggcgcacaaggagtccagctttgacatcatcctgtcgggattagttcctgggtctaccactctccacagcgccgaaatcctcgctgaaatcgctagaattttgaggccaggcggatgcctcttcctgaaagagccagtggagaccgcagtagataacaacagcaaggtcaaaaccgcctcgaagttatgttctgcccttactctgtctggactggtggaagtgaaggagttgcaaagggaacccctgacaccagaggaggttcagagcgtgagagagcatctaggacacgaatccgacaatcttttgtttgttcagatcacaggaaaaaagcctaactttgaggtggggagctctcgacagctgaagctgtcaataactaaaaagtcttctccctcagtgaaacctgctgtggatcccgctgcagccaaactgtggactctctccgcgaatgacatggaagacgactctatggatctcatagacagtgacgaactgctggatcctgaagacctcaagaagccagatccagcctcactgcgggcagctagctgtggggagggaaagaagcggaaggcatgtaagaattgcacctgtggcctcgctgaagagctggaaaaggagaagtctagagaacaaatgtcgtcacagcccaaatcagcatgtggaaattgctatctcggagacgccttccgctgtgcaagttgcccatacctcggaatgccagccttcaagccaggagagaaggtgctcttgtccgatagcaatctccacgacgcctag

SEQ ID NO: 15899 - DNA, 1056 bp, synthetic construct
  source 1..1056: mol_type = other DNA; note = Synthetic coding sequence
atgaatgagtcaaatgactcaaccaattatgacatggctccatattacgaggcactgtgtaagtcactcgactggcaaatcgacgtggatctcttaaacaagatgaaaaaggccaacgaagatgagttgaagaggctcgacgaggaactagaagacgctgaaaagaacctcggagaatctgaaattagggacgctatgatggcaaaggctgagtatttatgcagaatcggagacaaggagggggctcttaccgcatttcgaaaaacatacgataaaaccgtggccttaggacaccgcttggatatcgtgttctacctcctgcgaattggcctgttttatatggataacgacctcatcactaggaatacggagaaagcaaagtcactgatcgaagagggcggcgattgggacagaagaaatcgattgaaggtgtatcagggcctgtattgcgtagcgatcagagacttcaaacaggccgcagagctgtttctcgataccgtgtctacatttacttcctatgagctgatggattacaaaacctttgtcacctacactgtatatgtgtctatgatcgcgcttgaacgtccagacctgagagaaaaggttattaaaggcgctgagattctggaagtcttacattccctgcccgcagtacgccaatacctcttctccttatatgagtgcagatatagtgtgttctttcagtcactggccgtcgtcgaacaagaaatgaagaaagactggctgttcgcaccccactatcggtactacgtccgagagatgaggattcacgcttattcccagcttctggaatcttacagatctctgaccctggggtacatggccgaagcttttggggtgggagtggaatttatagatcaggagttgtctcggtttattgccgcagggcgcctccactgtaagatcgacaaggtcaatgaaatcgtcgagaccaatcgccctgattctaaaaattggcagtatcaggagactattaagaagggcgacttgctccttaatcgggtccagaagctgagtagagtgatcaatatgtag

SEQ ID NO: 15900 - DNA, 414 bp, synthetic construct
  source 1..414: mol_type = other DNA; note = Synthetic coding sequence
atgattttgcctactaaggccatggcaactcaagaactgactgttaaaaggaagttgtcaggaaatacactgcaggtgcaggcatcatctcccgttgccctaggtgtaagaatcccaaccgtagccttacacatgatggaacttttcgataccactgtggagcaactctattctattttcaccgtcaaggaactcaccaataaaaaaatcattatgaagtggcgttgtggcaattggccagaagaacactatgcgatggtcgctctgaatttcgtacctaccctgggccagactgaacttcagctgaaggaatttctctccatctgcaaggaagagaatatgaaattctgctggcagaagcagcatttcgaagagattaagggcagcctccaactcacaccgctcaatggctag

SEQ ID NO: 15901 - DNA, 2796 bp, synthetic construct
  source 1..2796: mol_type = other DNA; note = Synthetic coding sequence
atggcggaggtggaggccgtccagttgaaggaggaaggcaatcgccattttcaattgcaggattacaaagccgcgacaaactcctactctcaggccctgaagctgacaaaggacaaagccttactggccaccttgtaccggaacagggccgcttgtggcctgaagaccgaatcctacgtgcaagctgcctcagatgcgagtagggcaatagatatcaatagctccgacattaaggccctttatcgtagatgccaggcgctggagcatctgggcaaactggaccaggccttcaaggatgttcagaggtgcgctaccctggaacctcggaatcagaacttccaagaaatgctgcgtcgactgaataccagcattcaagagaaactgcgggtgcagttctccactgactcgagagtacagaagatgttcgaaatccttctcgacgagaactcagaagctgacaaaagagagaaagccgccaataacctgatcgtgctgggacgagaagaagcaggggcagaaaagatttttcagaacaatggcgttgccctgctgctccagctgctagatacgaagaagcccgaactggttctcgcagccgtgagaactctctctggcatgtgctcaggccaccaagcaagggcgactgtcattcttcacgccgtgagaattgataggatctgcagtctgatggccgtggaaaacgaagaaatgtcactagccgtctgtaacctcttgcaggccatcatcgattcgctgtccggagaagataaacgagaacacagggggaaagaagaggctttagtcttagacactaagaaggacctcaagcaaatcacgagccacttattggatatgcttgtcagcaaaaaagtttccggccagggaagagaccaggctctgaacctgcttaataagaacgtgcctaggaaggatcttgcgatccacgacaacagcagaacaatttacgttgtcgacaacggactgagaaaaatcttgaaggtggttggccaagtgcctgacctaccaagttgcctgcccctcactgataacacacgcatgttggcgtccatccttatcaacaagctctacgatgacctgagatgtgacccagagcgtgatcattttaggaaaatttgcgaagagtacatcactgggaagttcgacccccaagatatggacaagaacctaaacgctattcagacggtttcaggaattcttcagggcccttttgatctcgggaatcaactgttgggcctgaaaggggtaatggaaatgatggtggccctctgcggatcagaacgagaaacggaccagttagtcgcagtcgaagctttaatacatgcttcaaccaaactgtcccgtgcaacgttcattatcactaacggagtgagcctgcttaaacagatttataagactactaagaacgaaaagattaagatccgtacgctggtggggctctgcaagttaggctctgcaggcgggacagattatggattgcggcagttcgccgaaggatctacggaaaaacttgcaaagcagtgtagaaaatggctctgtaacatgtcgatcgacacccgcaccaggcgatgggcggtggaggggttagcgtatctgacactcgacgctgatgtcaaagatgatttcgtgcaggacgtgccagctctccaggccatgttcgaacttgccaaagccggcacgtctgataaaacaatactgtacagtgtggccaccactcttgtcaactgcacgaattcgtatgatgtgaaagaggtgattccggagcttgtgcaactggcaaaattcagcaaacaacacgtccctgaggagcaccctaaggacaaaaaggatttcatagatatgagagtgaagagattgctgaaggccggcgttatctcggcgttggcctgtatggtgaaagctgattctgcaatcctaacagaccaaacaaaagaactgctggcccgggtcttcctggccctgtgcgataacccgaaggatagaggaactattgtggcgcagggaggcgggaaagcattgatccctctagccttggagggaactgacgtggggaaagtgaaggcggcccacgccctggcgaaaatcgccgccgtgtcaaacccagatatcgcatttccaggggagagagtgtatgaggttgtgcggcctctcgtgcggctgctggacactcagcgcgacgggctccagaattacgaggctctgctaggattgacaaacctctccggcagatctgacaaacttcggcagaaaatattcaaggaaagggctttaccagacatcgagaattatatgttcgaaaatcacgatcagttaagacaagccgcaacggagtgcatgtgtaatatggtgctgcacaaggaggtgcaggaacgattcctagccgacggcaacgaccgcttaaaactggttgtgctgctctgtggcgaagacgatgacaaagtgcagaatgccgccgccggcgccctggcgatgctgacagctgctcacaagaagctctgtttaaagatgactcaggttaccacccagtggctggagatcctacagcgcctatgtcttcacgatcagctgagtgtgcagcatagaggcctggtcattgcctacaacctgctggcagcggatgccgaacttgccaagaaacttgtcgaatccgagctgctggaaatccttaccgtcgtgggaaagcaggagcccgacgagaaaaaggccgaggtggtgcagactgcccgggaatgcctgatcaagtgtatggactacggctttattaagccagttagctag

SEQ ID NO: 15902 - DNA, 318 bp, synthetic construct
  source 1..318: mol_type = other DNA; note = Synthetic coding sequence
atggccttacgctatcccatggctgttggactgaacaaaggacataaagtgacaaagaatgtgtcaaaacccagacattctagacggcgcggacgactcacaaaacatacgaaattcgtgcgtgatatgatccgcgaggtttgcgggtttgcgccatacgagcgtagagccatggaactgctgaaggtgtctaaagataaaagggcccttaaatttatcaagaagcgggtggggacacacatccgggccaaaagaaagcgggaagaattaagtaatgtcctggctgcaatgaggaaggccgcggcaaagaaggactag

SEQ ID NO: 15903 - DNA, 663 bp, synthetic construct
  source 1..663: mol_type = other DNA; note = Synthetic coding sequence
atgaatagcatggaccgtcacattcagcagactaatgacagactgcagtgtataaagcagcacctgcagaacccagctaatttccacaacgcggcaacggaactgttggactggtgcggggatccaagggctttccagcgcccttttgagcagtcgctgatggggtgtttaacagtggtatccagagtcgccgctcagcagggttttgatctggacctgggctaccggctgctcgcggtgtgcgccgcgaaccgcgacaagttcactcccaagtctgctgccctacttagctcttggtgtgaggagttgggccgactcttgttactgcggcaccagaaaagcagacaaagcgatcctcctgggaagcttcctatgcagcctcctctgtcctcaatgtcaagcatgaaacccaccctcagccactccgacggcagctttccatacgattcagttccttggctacctgcttaccccgcttgcacccctccaccttctcagagccatcccaacagctgttcactgaagcaaaagcaacctctggccttcccacctcctctatgttcaatctggctcacaacattgcaggggcttctgggttccctctcttgtgtgcattttgtttcagggtggtctgtcccacgggagccgcacggcctggggtag

SEQ ID NO: 15904 - DNA, 354 bp, synthetic construct
  source 1..354: mol_type = other DNA; note = Synthetic coding sequence
atggtgcagcgcctcacataccgtcggcgcctgagctacaatacagcttctaataaaacgcgattgtctcgcacaccgggcaatcggatcgtttacttatacacgaaaaaagtgggcaaggcacccaaaagcgcctgcggtgtatgccccggacgacttaggggggtgagagccgtccgccccaaggtattgatgcgcctctccaagaccaagaagcacgtgtctagagcctatggaggaagtatgtgcgcaaaatgcgttcgcgaccgcattaagcgagccttcttaattgaggaacagaagatagtcgtaaaggtcctgaaggcacaggcgcagtcccaaaaggccaaatag

SEQ ID NO: 15905 - DNA, 354 bp, synthetic construct
  source 1..354: mol_type = other DNA; note = Synthetic coding sequence
atggtacagcggctaacatatagaagaaggctgtcttacaatacagcctcaaataaaactcgcctgtccagaaccccaggcaatcgcattgtgtatttatacaccaagaaagtggggaaggcccctaagtcagcttgtggcgtgtgccctggtaggctgcggggcgtccgcgcagttaggccgaaggtacttatgcgactaagtaagactaagaagcacgttagtagggcttatggtggcagcatgtgcgctaaatgtgtgagagatcgcattaaaagagcctttctgatcgaggagcaaaagatcgtcgtgaaggtgctgaaggctcaggcacaaagccagaaggccaagtag

SEQ ID NO: 15906 - DNA, 354 bp, synthetic construct
  source 1..354: mol_type = other DNA; note = Synthetic coding sequence
atggtgcaaagactcacctatagaagacggcttagctataataccgctagcaacaaaaccagactctctcgaacgccaggcaatcggatcgtttacctatatacgaagaaggtcgggaaagcgcctaaatccgcttgtggcgtatgccctggcagactgaggggggtgcgtgcagtcagacccaaggtgttgatgcgattgagcaagaccaagaaacacgtttcaagggcatatggtggaagtatgtgtgccaagtgtgtgcgtgataggattaagcgcgctttcctgatcgaagagcagaagatcgtggttaaggtcctaaaggctcaagctcagtcccagaaagctaagtag

SEQ ID NO: 15907 - DNA, 1902 bp, synthetic construct
  source 1..1902: mol_type = other DNA; note = Synthetic coding sequence
atgaaagcgatcaagaagagtctgactgaagaagaatatctgtacctcgatttttcacatcagaccgagggatgtatttttcccctgcatacctcagtgacgctgtttttattatcatactgcgattgtaagattttcaagatctgtctcgtggtgaccaaggaagtttcgagggacagtagcctgcttcgcgatgaccttatccaggacgttgaaattcagattatttctaggcaggagcttccacccattgtgcaaaactgctgtctgccagccgtggtggagaggtctgataacttttgtagagctggtctcgcggtggtattacggcacatcattcagaagagctacgaagcagatccactgaagaaggagttactggagctgctgggtttcaagaaaacatgtcttaaggcttgcgccgaggtgtcccagtggactcggctctgtgagttgactattccattagcaattgagaactttctcagagaaagctccgaccagccacccactattcccgtcgagatcctgcagctggaaaaaaagctgtccgagccagttagagttcacaatgatgataagttaagacgccagaagctgaagcagcagaaggccgacggcgtaggacccccattaactaaaggcaaggccaagtctaaggttcacacgcaggagacaagcgaggggctggattcctccagtaagagcttggagctgaaggtggctttttcaaaactgactgttcaggaggagcccgcaaccacaaatagggagccctcgcatatccgtaaagccaaggcctctgatctccctccgcttgagcatgtgttcgccgaaggattgtacttcactctggccgacatcgtccttctgccatgcatacatcattttctggtgataataagccgcaaattcagcgaaaaacttgttgagtttccacttctggcatcttggtatcagagaatccaagaggtcccaggggtgaagaccgcggcatctaaatgcggcattcaattccttcacttacccaagctgttgactacttccaccgagcagcacccgaatctttgtgaagtaccaggcgtcgaagagcagagcgaccctctgttcatcggaggcccccgacccactatggctaagctgatggagaagggtattgaggtaatgttcagcccgcatccgtgccctacctggaccctagattggaatgtactgcccgccgctgtctcccccaaggagggcaagatgagctctgatagagccctgaggaagcagcagcaattgaataacctggtctacgtggttactaatcaggcaaagcccggggaccgtattgtggatttttgttccggcggtggccatgtgggcattgtgttagctcacatgttgccatcctgccaggtgactctcattgagaacaaagaactctctctgattagggctaagaaacgaagcgatgagctcgggctgtccaatatatggttcattcaagctaatatggaatacttcacgggaatgtttaacatcggagtggcactgcacgcatgcggagtcgccactgacatggtgattgagcattgtatcaagacacgtgcctctttcgtgacttgcccttgctgttatggctttatccagaatacctctaagttcaatttccccaagagcgaacagttcaaaaaaacactgtcttacaaagagcacatgatcctctgcaggtttgccgatcagaccgccgttcaactccctccacaacgacggcttataggcaagcagtgtatgtgtctggtcgatttggacagagccagggccgctgaggagtgtgggtactccgttcaggtcatatcaatggaacctgagtcttgcagtcctaaaaataatatgatcgtcggcgttcctatttag

SEQ ID NO: 15908 - DNA, 1641 bp, synthetic construct
  source 1..1641: mol_type = other DNA; note = Synthetic coding sequence
atgaaggctatcaagaagtccttgactgaagaggaatatctctacctcgacttttcacaccagactgagggatgcatcttccccttacacactagtgtaacgcttttcctgttaagctattgtgattgtaaaatttttaagatctgtctcgtcgttaccaaagaggtttctcagtggaccaggctgtgcgaacttaccatccctctggctatcgaaaacttcctgagggagagctccgatcagccgcccaccattcccgtcgaaattcttcaactggaaaagaagttgagtgagcctgtcagagtccacaacgatgacaagctgcgtaggcagaaactgaagcagcaaaaggccgatggcgtggggccaccactgactaaaggaaaagctaagtctaaagtacatacccaggaaacatcagaagggctcgactcctcgtcaaagagtctggaacttaaggtagcattctctaagttgactgtacaggaggagcccgcaacgacaaatcgtgaacctagccatattcgaaaggccaaagctagtgatttacctcctctggagcatgtctttgccgagggtctctatttcacactggccgacattgtgttgttgccctgcattcatcatttcctggtgatcatcagccgtaaatttagcgagaaacttgtggagtttcctcttcttgcgtcatggtaccagaggatacaggaagtccccggagttaagacagcagcctccaagtgtggcatccagttcttacacctgcctaagcttctcacaacatccacagagcagcaccccaacttgtgcgaagtccccggggtggaggagcagtcagaccctctctttatcggcggacctcgcccaacaatggctaaactcatggaaaaggggattgaagtcatgttttctcctcacccttgtcccacttggacccttgattggaacgtgctgcctgcggcagtgtccccgaaggagggtaaaatgtcctctgatagggctctgaggaagcagcagcagctcaataatctcgtctatgtcgtgactaatcaggctaagccaggagataggattgtggacttttgctcagggggcggccatgtcggaattgttctggctcacatgctgcccagctgccaggtcacgctcatcgagaacaaagaactctcgttgattcgcgctaagaagcgaagtgacgaactgggcttaagcaacatttggttcattcaagcaaacatggagtattttaccggcatgttcaacattggggtagcccttcatgcctgtggagtcgccactgacatggtgatcgagcattgcatcaagactcgcgccagctttgttacctgcccatgctgctatggctttattcagaacaccagtaaatttaatttccccaaaagcgaacagtttaagaagacccttagctacaaggaacatatgattctgtgccggttcgctgaccagaccgccgtacagctccccccgcagaggagactgatcggcaaacagtgcatgtgtctggtcgacctggatagggcaagagctgcagaggaatgcggctattcagtccaggtgatttccatggaaccagagagctgctcaccaaagaacaatatgatcgtgggtgtccccatttag

SEQ ID NO: 15909 - DNA, 1542 bp, synthetic construct
  source 1..1542: mol_type = other DNA; note = Synthetic coding sequence
atgctgttggagaacttgaccgacaacgagtccgaaaacacaaatctgaagaaaaaggtattcgaaaaggaagctcacatacaggaactctcctgcctttttcagagtgagaaagctaataccctcaaggccaatcgattttctcagtccgtaaaggtcgtccacgagagactccagatccagatccacaagagggaggcagagaatgataaactgaaagaatatgtaaaatctctggagacgaagatcgcaaagtggaacttacagtctaggatgaataaaaacgaagcaatcgttatgaaagaagcctctcgacaaaaaacagtggcgttaaagaaggcctcgaaagtttataaacagagacttgaccactttaccggcgctatcgagaagttaaccagtcagattcgggatcaggaggccaagctcagtgagacaatatccgcttccaatgcctggaagagccattatgagaaaatcgtcattgaaaagaccgaactggaggtccagattgagaccatgaagaaacagatcattaacctgcttgaggatttaaagaaaatggaggatcacgggaagaactcatgtgaggagattctccggaaggttcattcaattgagtatgagaacgaaactctgaatctcgaaaataccaaacttaagaccaccctagctgccttgaaagacgaggtggtctctgtagaaaacgagctcagcgagttacaggaagtagaaaaaaagcagaagacactgatcgagatgtataagacccaggtgcagaaactgcaggaggccgcagagatcgtgaagagcagatgcgagaacctacttcacaagaacaatcagatcacgaagaccaagaacaaaaacgtggaaaaaatgagaggacagatggaaagccacctgaaggagctggaacgcgtgtgcgattcgctaacagcagcagaacggcggctgcacgagtgccaggaatccctccagtgctgcaaggggaaatgtgccgatcaggagcacaccattcgggagctgcagggccaggttgacggtaatcacaacctcctaaccaagctgagccttgaggaagagaattgtcttatacaacttaagtgtgagaatctgcaacagaaactcgagcagatggacgctgagaacaaggagttagagaagaagcttgccaatcaggaagagtgccttaagcactccaacctgaagttcaaagagaaaagcgccgaatacaccgctttggctagacaattggaagccgccctggaagagggtaggcagaaagttgctgaggagatagaaaagatgtcttcacgggagagtgctctgcaaattaaaatactggatttggaaaccgaattaaggaagaagaacgaagagcagaatcagcttgtctgcaaaatgaatagtaaagcccaacatcaagaggtgtgcctgaaggaggtacagaatagcctggagaaatccgagaaccagaacgaaagtattaaaaattaccttcaatttctgaagaccagctatgtaactatgttcgagtag

SEQ ID NO: 15910 - DNA, 1167 bp, synthetic construct
  source 1..1167: mol_type = other DNA; note = Synthetic coding sequence
atggccgccgccgccgctctcgcacggcttgaacagaaacagtctcgtgcctggggtccgacctctcaggacactattcggaaccaggtgcgcaaagaactgcaggccgaagcaaccgtgtctgggtcaccagaggctcctgggaccaacgtagtgtcggagcctcgtgaggagggctctgctcatctggccgtccccggagtgtactttacatgtccattaaccggtgccacgctgaggaaagatcagcgtgacgcctgtatcaaagaggcaatcctgctgcatttcagcacggaccccgtcgccgctagtattatgaagatatacacatttaataaagatcaagaccgggtgaaattgggcgtagacacaatcgcaaagtatctcgacaatatacacctgcacccagaggaggaaaagtataggaagattaagctccagaacaaggtatttcaggagcgtatcaactgtctcgagggcactcatgagtttttcgaagctattggctttcagaaggttctgctgcctgcacaggatcaggaagacccagaggaattttacgtgctgtctgagaccacactcgcccagccgcaaagcttagagagacataaagagcagctgcttgccgcggagccagttcgggccaaactagaccggcaacgcagagtgtttcagccttcccctctcgccagccagtttgagctacccggtgactttttcaatctgaccgccgaggaaatcaaacgagagcagcggctcagaagtgaagccgttgagcggctctcagtcctgcggaccaaagccatgcgcgagaaagaagaacagcgcggccttcgcaagtacaactatacgctgcttcgcgtgaggctgccagatggctgcttattgcagggcaccttctatgcccgcgaacggctcggcgctgtatatgggttcgtgcgagaagcacttcagtcagactggctgccctttgagctgttggcctccggaggccagaagctttccgaggatgagaacctggccctaaatgaatgcggactagtcccctctgccctgttgaccttttcttgggacatggcggtgcttgaagacatcaaggctgcaggggcagagcctgatagcatcctaaagcctgagttactgtcggctattgagaagctgctatag

SEQ ID NO: 15911 - DNA, 2691 bp, synthetic construct
  source 1..2691: mol_type = other DNA; note = Synthetic coding sequence
atggacggagccgccggcccgggtgacggtcccgccagagaggctttacagtctttgtcgcaacgccttcgcgtacaggaacaggagatggaactggtcaaagcagcacttgccgaggccctgcgcctattaagattgcaagttcccccaagcagtctgcagggaagcgggacgcccgcaccccccggggatagtcttgcggccccccccgggctgccacccacatgcacgcccagtctagttagccgtggcacacagactgagacggaggttgagttaaaatcatcaccaggcccaccagggttgagtaacggtccccccgctccccagggggcctctgaggaaccgtccggtacccagagtgaagggggagggtcctcaagtagcggcgccggcagccccggaccccccggaattctgcgtcctcttcagcctccacagagagctgatacccccagaaggaatagcagttcctccagtagcccctccgagcgaccgcgacaaaagctgtctcgcaaagcaatatcatccgcgaatctgctggtcaggtctggctctaccgagagccggggcggaaaggaccctctgagcagcccaggcggccctgggagcaggcgatctaactataacctggagggcatctccgtgaagatgttcctgcggggacggcccatcacaatgtacatcccaagtgggatacgctcactagaagagctcccctcagggccacctcctgagaccctgtcattggattgggtctatgggtatcgggggcgggactctagatcaaacctgtttgtcctgcgtagtggcgaggtggtctattttatcgcctgcgtggtggtactatatagaccaggcggcggaccgggggggcctggggggggtggtcagcggcattaccggggccatacagattgcgtccgctgcctggccgtgcacccagacggcgtgcgagtggcttcaggccaaaccgccggcgttgataaggacggaaagcctctgcagcccgtggtacatatttgggatagtgaaactctcttaaaactacaggaaatcgggctgggcgcctttgagagaggcgttggggccctggccttcagtgccgccgaccagggagcgttcctttgtgttgtggacgacagcaacgaacatatgctcagcgtatgggactgcagcaggggcatgaaactggcagagatcaaatcaaccaacgattctgtgttagccgtcggcttcaatcctagagactctagttgtattgtgacatcgggcaagtcacatgtgcacttctggaattggagtggaggagtaggtgtccccgggaacgggaccctgacaagaaaacagggagtctttggaaagtataagaaaccgaaattcatcccatgttttgttttcctgccagatggagatatactaacaggtgattccgagggaaatattctaacctgggggagaagcccatccgactccaagacccctggccgaggtggggcaaaagaaacttacgggattgtagctcaagcccatgcccacgaaggcagtatcttcgccctgtgtttgcggcgggacggcactgtgctttcgggtggcggaagagacagacggttagtgcaatggggcccaggcctggttgccctccaggaggctgagatcccagaacacttcggcgcagtcagggcaatagctgaaggcctgggaagcgaactgctcgttggaacgactaaaaatgccctccttagaggcgatttggctcaggggttttccccggtgattcaaggccatactgatgaactgtggggcctctgcacgcacccatcccaaaaccgcttcctgacgtgtggacatgatcgccagttatgcctgtgggatggggagtctcacgccctggcatggagcattgatctcaaggagaccgggttatgcgcagactttcacccaagtggggccgttgtggcagtgggtctgaacaccggacgctggttggtcctggatactgagacccgggagatcgtctctgacgtaatcgatggaaatgaacagctctccgtggtgagatatagcccggacggcttgtatctcgcaatcggctcacatgataatgtgatatatatttactctgtgagttccgatggtgccaagagcagccggttcgggagatgcatggggcattcttccttcataacccacttagactggagcaaagatggcaatttcatcatgagtaattctggcgattatgaaattctgtactgggacgtggccggaggctgcaaacagctcaaaaaccgatatgaatctcgggaccgggagtgggctacctacacctgcgtgctcggattccatgtgtacggagtgtggcccgatggttccgatggaacggatatcaactccctctgcaggagccacaatgaacgggtggtggctgttgccgatgacttttgtaaagtccatctgtttcaatatccctgcgcgagagcaaaggcaccctctcgcatgtatggtgggcatggatcccatgtgacctccgtacgcttcacacatgatgatagccacctggtgagtctcggcggcaaagacgctagtatttttcaatggagagtcctcggtgcgggtggggccggccccgccccggccaccccctcacgtactcccagcctgagcccggccagctccctggacgtttag

SEQ ID NO: 15912 - DNA, 2934 bp, synthetic construct
  source 1..2934: mol_type = other DNA; note = Synthetic coding sequence
atgggggcagaggaagaagtgctggtgacattatcaggcggcgccccgtgggggtttcgcctgcacggcggggccgaacagcgtaaaccgctccaggtctcaaagataaggcgcaggagccaggccggaagggcggggctgagagagcgtgatcaactgttggccatcaatggagtatcgtgtaccaatttaagccacgcttcagcgatgtccctgattgatgccagtggaaatcagctggtgttgactgtgcagagattagccgatgaaggccctgtgcagagtccaagcccccatgagcttcaggtcttgtctccgctgagtccactgtccccagagcctcccggcgcccctgttccccagccactccagcctgggtcccttcggagtcctccagattctgaggcttactatggtgagacggactctgacgccgacggaccagccactcaggaaaagcccagaaggccaagacgaagggggcccacacgcccaactccgccgggtgctcctcccgatgaggtctatctgtccgattcaccggcggaacccgctccgacaatacctggccctcccagccagggcgattccagagtcagctccccgtcctgggaggatggggctgcccttcaaccccctcctgctgaggcactgctcctacctcatggccccttgagacctggtccacacttgattcctatggtcggccccgtcccccaccctgtggctgaggatctcacaaccacttacactcagaaggcaaagcaggctaaacttcaacgtgcggaatcactgcaagaaaagagcattaaggaggctaagaccaaatgtcgtaccattgcttccctgcttaccgctgcccctaatcctcactctaagggcgtcttgatgtttaaaaaacggagacagcgtgcgaagaagtatactctggtgtcattcggggctgccgccggaaccggcgcagaggaggaagacggcgtgccacccacctcagagtctgagctggatgaggaagccttctcagacgcaaggtccctcacaaatcagtctgattgggattccccataccttgatatggagctggcccgcgctggttcgcgagccagcgagggtcaggggtccgggttaggtggtcagctgagcgaagtgtctggcaggggtgtacagttgtttgagcagcaacggcagcgtgctgactcaagcactcaggaattggcacgtgtcgaacccgctgccatgctaaatggcgaagggctgcagtcacccccaagagctcagagcgctcccccagaagccgccgtgctgcccccctctccgctccccgccccagtcgccagtcctcgccctttccaacccgggggtggggctccaactccagcgccaagtatattcaacaggtctgcccgtccattcacgcccgggctccagggccagcgtcccaccacaacctctgtgatattccggcctctagccccaaagagggctaacgatagcttgggcggcctcagccccgcccccccaccgtttctttcttcccaggggccaacccctctgccttcttttacatcaggggtgccttctcacgcacccgttagcggcagcccaagtacaccacgtagctctgggccagtgacagctacctctagcctttatattcccgcgccctctcgtccagtgactccaggcggggcacccgaaccgccagcaccaccttccgccgctgccatgacatccactgccagcattttcctaagcgcccccctacgaccctcagcaaggcccgaagctccagcaccaggcccaggggcccccgagcctccatccgcgcgcgaacagcggatctccgtccccgctgctcggaccgggatactccaggaggctcggcggaggggtacccggaaacaaatgttcagacctgggaaggaggaaactaagaatagtccgaatccagaactgctgtctctcgtacaaaacctggatgagaagccccgggccggaggagctgaatcggggccagaggaggatgccttgagtcttggggcggaggcatgtaactttatgcagccggtgggagcccggagttataaaaccctgccacatgtcactccaaagacgccaccgcccatggctcctaagacaccgcctcctatgaccccgaagacaccgcccccggtagcacctaaaccgccgagtcggggcctgctcgatggtctcgtcaatggggccgcctcctctgcaggcatccctgaaccaccccgattacagggaaggggtggtgagctttttgctaagcgacagtcaagggccgatagatacgtggtagagggcaccccagggccaggactagggccccggccccgatctccatctccaactccaagtcttcctccttcttggaagtactctcccaacataagggcgccaccaccaatcgcttacaaccctctcttgtcacccttcttcccacaggctgctcggaccttaccaaaggctcagtcacaagggccccgcgcaacgccaaaacagggtataaaggcacttgatttcatgagacaccaaccataccagcttaaaaccgcaatgttctgctttgacgaagtcccacccactcccggccccatcgcgtccggatccccaaagacagccagagtgcaggaaattcgccgcttctctacccccgccccccagccaacagctgagccactggccccgaccgtgttagcaccacgtgccgcaaccaccctggatgagcctatttggcgcacagaacttgcctccgctcctgttccatcaccagcccctccgcccgaggctcctcgcggcctcggagcaagtccgagctcttgtggctttcaagtcgccagacccagattttctgctacaaggaccgggttacaggctcacgtgtggcggccaggggccgggcaccagtag

SEQ ID NO: 15913 - DNA, 2757 bp, synthetic construct
  source 1..2757: mol_type = other DNA; note = Synthetic coding sequence
atgggaaccacagcccctgggccaatccatctactcgaattatgtgaccagaaactgatggagttcctatgcaacatggacaataaagacttagtgtggctggaggaaatccaggaagaggctgagcgcatgttcacaagggaattctctaaggaacccgaactcatgcccaaaaccccctctcagaaaaataggaggaagaaaaggcggatctcttacgtgcaggatgagaacagagatccaattagacgaagattgtcccggagaaagagtagatcatcgcaattgtctagtaggcgcctcaggagtaaagattccgtggaaaaactggccacggtggttggcgaaaatggatctgtgttgaggcgcgttactagggcagccgcagcggctgcggcagcaacaatggcccttgctgccccttcctctccaaccccagaatcccctaccatgctgactaagaaaccggaggacaatcatacccagtgtcagctcgtccctgttgttgaaattggcatttccgaaaggcaaaacgcagagcaacatgtgactcagcttatgtcaaccgagcccctcccacggaccctcagtcctacgccagcatctgcaacagctccaactagtcagggcatccccacatctgatgaagagagcacacctaaaaagagtaaagccagaattctggaaagcatcacagtgtccagtctcatggcgacaccccaagaccctaagggacagggtgtggggaccggcaggtctgcatccaaactgagaatcgcacaggtcagccctgggccacgcgactcccctgcctttccagattccccatggcgagagcgagtattggctcccattttgcctgacaatttttcaacgccaaccgggtcgcggacggattcacagagtgtgcggcacagccctattgcaccaagcagcccttctccccaggtgctggcccagaagtactcgttggtcgcaaagcaggagtctgtggtccgccgtgcctctcggcggctcgcgaagaagaccgccgaagagccggcagcgtccggtagaattatctgccattcctatcttgagcggctgctgaatgtcgaagtgccacagaaagttgggtctgagcagaaggaaccccccgaggaggcggagccagtcgctgctgctgaacctgaggtgcccgaaaacaacggaaacaacagctggcctcataatgatacagagattgcgaattcaaccccaaacccaaaacctgctgccagctctccagagacccccagcgccggtcagcaagaagcaaaaacagaccaggcagacggccctagggaacccccccagagcgctcggaggaaaagatcctacaagcaggccgtttcggagctggatgaagagcagcatttagaggacgaggagttgcagccgcccaggagcaaaactccttcttctccttgtccagcctcaaaggtggtaagacctctccggacattcctccacaccgtgcaaagaaatcagatgctaatgactccaacgagcgctccccgcagcgtgatgaagagcttcattaagcgcaatacaccgctgcggatggatccaaaatgctcttttgtggagaaagagagacaaaggcttgagaatctgcgccggaaagaagaggctgaacagctgcgacggcaaaaagtcgaagaagacaaaagacgcaggctggaagaagtaaaactgaaacgggaggaacgactgcgaaaggtgttgcaagctagagagagggttgagcagatgaaagaggaaaagaaaaaacagattgaacagaaattcgcccaaatagatgaaaagactgagaaggccaaagaggagagattagccgaggaaaaggccaagaagaaagccgctgccaaaaagatggaggaagtggaggctagaagaaaacaggaagaggaggctcgcagactgcgctggctgcagcaggaagaagaagaaagaaggcatcaggagctcctccaaaaaaagaaggaagaggaacaggaacggttgaggaaagctgcagaggccaaaagactggcggagcagcgtgaacaggagaggcgggagcaggaacggcgagaacaagagcgtagggaacaggaaagaagagagcaggagcgacgagagcaggaaagacagctggctgagcaggagaggcggagggagcaggaacgattacaagctgagcgcgagttgcaagaaagggagaaagccttgaggctccagaaagagcagctgcagagagagttggaggagaagaaaaagaaagaggagcagcagcgtctggccgagcggcagctccaagaggagcaggagaagaaggccaaagaggcagccggggccagtaaagcgcttaacgttaccgtggatgtacaatctccggcctgtacctcctaccagatgacacctcagggccaccgtgctccaccaaagataaaccccgataattatgggatggacctcaattcagacgacagtaccgacgacgaggcacatccccgaaagccaatccccacctgggcacgcgggacccctctgtctcaagccattatacaccagtactatcatcccccaaacctgctggagctgtttggcaccatcttaccactcgacttggaggatatctttaaaaagagcaaaccaaggtaccacaagcggacatcttcagcggtttggaactctccaccactgcagggcgcgagagtgcctagttcattggcttactccctgaagaagcactag

SEQ ID NO: 15914 - DNA, 1728 bp, synthetic construct
  source 1..1728: mol_type = other DNA; note = Synthetic coding sequence
atgacaagtaagaaattagttaatagtgtggcagggtgcgccgatgacgctctcgctggactggtggcatgcaaccccaatttacaactgcttcaagggcatcgggtagcccttcgtagtgatctggattcacttaagggaagggtagcccttttatccgggggtggcagtgggcacgaaccagcccatgcaggctttatcggaaaagggatgctgactggtgtgattgccggggccgtatttaccagtccagccgtgggttccatccttgccgctatcagggctgtggcacaggctggcaccgtcggcaccctgctgatcgtgaagaattatacgggcgatcgcctgaactttggcctagccagagagcaggctagagccgaaggcatcccggttgagatggttgttatcggagacgacagcgccttcacagtgctgaaaaaagcagggaggagggggctgtgcggaactgtgttgatccataaggtggctggagccctagccgaggcaggagtgggcctagaggagatcgccaaacaggtgaatgtcgtggctaaggctatgggaactctgggtgtgtctttatcatcctgcagtgtacctggaagcaagccaacattcgaattgagtgccgatgaggtcgagcttggcctggggatacacggggaggccggtgttcgccgaattaaaatggcaaccgctgatgaaatcgtcaaactaatgttagaccacatgaccaatacaactaatgcatcacatgttcccgtacaacctggttccagcgtcgtgatgatggtcaacaatctcggggggctttcttttctagaactcgggatcatagctgatgcaaccgtgcgaagcctcgaggggcggggtgtgaaaatagctcgagcactggttggaacattcatgagcgcactcgaaatgcctggaatctcactcaccctgctgcttgttgacgagccccttttgaaactgattgacgctgaaacaacagcagccgcctggccgaatgtggcagctgttagtattactggacgcaaacgcagcagagtggcccccgctgagccacaagaggctcccgactcaacagctgctggtggcagcgcctctaaacgcatggctctggtgcttgaacgggtgtgtagtaccctgttgggccttgaagaacacctgaatgctcttgatcgggccgctggagacggggactgtggaactacgcactctcgcgcggcgcgagcaatacaggagtggctgaaagagggcccgccacccgcctcgcctgcccagctgctctccaaactctcggtacttttactcgagaaaatgggcggctcctcaggagctctgtacgggctctttttaaccgcggctgctcaaccactgaaagcaaagacaagtctgcccgcttggagcgccgccatggatgccggtctagaagccatgcagaagtacggtaaagcagctccaggggacaggacaatgttagattcgttgtgggctgctggtcaggagctccaagcctggaagagccctggcgcggatctgctccaggtcctcaccaaggccgtaaaatcagccgaggctgctgccgaagccaccaagaatatggaggctggtgcagggagagcgagttatatttcctctgcgcgcctggagcagcccgaccccggtgcagtggctgccgcggccattctcagagctattctcgaggtgttgcagtcatag

SEQ ID NO: 15915 - DNA, 1080 bp, synthetic construct
  source 1..1080: mol_type = other DNA; note = Synthetic coding sequence
atggccgcgccatgcgccgaagatccgtctctggaaagacactttaaaggtcacagagacgcggtgacctgcgttgatttcagtattaacactaaacagctcgcctctggttccatggacagttgtctgatggtgtggcacatgaagccgcagtcacgcgcttaccgttttacgggacataaggatgcagtgacttgcgtcaactttagcccaagcggtcatctgctagcatccgggagtcgcgacaaaaccgtgcgcatctgggtgcccaacgtgaaaggagagagcacagttttcagagcccatacagctacagtacggagtgttcacttctgcagtgatggacagagctttgtgaccgctagcgacgacaagaccgttaaagtttgggcaacccataggcagaagttcttgttctccctttcccagcacatcaactgggtgaggtgtgcaaagttcagtccggacggaagactcatcgtatccgcatccgacgataagaccgtaaagctgtgggacaagtctagtcgagaatgtgtgcacagttattgcgagcacggggggttcgtcacttacgtggacttccacccgagcggaacctgtattgcagccgccggtatggataacactgtgaaagtgtgggatgtccgcacacataggctattacagcactatcagctgcacagcgcggccgtcaatggactgtcctttcaccccagcggtaattatctgatcacggcctcctccgacagcaccttgaagatcttggacctcatggagggccgactgctgtatactctgcacgggcatcagggccccgcgaccacggtggcctttagtagaacaggcgaatactttgcgtccggcggcagtgatgagcaagtgatggtctggaaatcaaactttgacatcgtcgaccacggggaagttacaaaggtcccaaggcctcccgcaaccttagcttcctcaatggggaatctgactgtgtcaatactggaacagcggttaacgttgactgaggataagctgaagcaatgtctggagaaccagcagttgataatgcagagagctaccccctag

SEQ ID NO: 15916 - DNA, 633 bp, synthetic construct
  source 1..633: mol_type = other DNA; note = Synthetic coding sequence
atggctgcctctgtagagcaacgcgagggtaccatccaggtgcagggccaggctctgtttttcagggaggccctgcccgggagtggccaagcaagattttccgtgttactgctacacgggatcaggttctctagcgagacctggcagaatttgggcacccttcacaggctcgcccaggctggatatcgtgctgtcgccatcgatcttcctggactgggccactcgaaggaggcagccgcccctgccccaatcggagagctggctcctggatccttcctggccgctgtggtcgatgcactggagctgggtccccccgtcgtgattagcccaagcctgagtggtatgtactctttaccattcctgactgcccctggttcccaacttcctggatttgtgccggtggctcctatctgcactgacaagattaacgccgccaactatgccagcgtgaagaccccggcattgatcgtgtacggagatcaggaccccatggggcagacctcctttgagcatctgaaacagctgccaaatcatcgagtgctgatcatgaaaggagcaggccacccttgttatctcgacaagcccgaggaatggcacacaggcctcctggacttcttgcaaggactgcaatag

SEQ ID NO: 15917 - DNA, 1491 bp, synthetic construct
  source 1..1491: mol_type = other DNA; note = Synthetic coding sequence
atggaccaagactatgaaagaagattattgagacaaattgtgatccagaatgaaaacaccatgccccgggtgactgaaatgcgtcggaccttgaccccagcgtcttcccctgtgtcaagtccttccaagcacggcgacagattcattccatcccgcgccggagcaaactggtccgtgaattttcacagaatcaacgagaatgaaaagtcccctagtcagaataggaaggccaaggatgctacatcagataacgggaaggacggcctggcatattccgccttgttgaaaaatgagctacttggtgccgggattgaaaaggtccaggatccgcagaccgaagatcgaagattacagccgagcacacctgaaaaaaagggtttatttacttattccctgagcactaagcggagctcaccggacgatggcaacgacgtcagcccgtactccctgagtccagtcagtaacaagtcccagaagcttctcagatctccgcggaagcccaccagaaagatttctaagatcccctttaaggtacttgacgccccagagttacaggacgatttttacctgaatcttgttgattggtctagcctgaacgtactgtccgtcggcctgggaacgtgtgtgtacctgtggtctgcatgcacaagccaagtgaccaggctgtgcgacctgagtgtcgaaggggactctgtaaccagcgtaggctggtctgagcgcggtaatcttgtggccgtcggaacacacaagggattcgtccaaatctgggacgctgcagctggcaagaaactttccatgctcgaagggcatacagcacgggtgggagctctcgcctggaacgctgagcagctttcctccggttcacgagataggatgattctgcagagagatataagaacccccccactacagtccgaacgcagattacagggacacaggcaggaggtctgcgggctaaagtggagcactgaccaccaactcctcgctagtggcggaaacgataacaagttgctagtgtggaaccactcaagcctaagtccggtgcagcagtacactgaacatttagccgcggtgaaggcgatcgcttggtcaccacatcaacacgggctgctggcatccggaggcggaacagctgaccgttgcatccgcttctggaacacgctgaccggacagccactccaatgtattgatacagggtcccaggtatgcaacctggcctggtctaagcacgccaacgaactcgtgagcacccacggttacagtcaaaaccagatcctggtgtggaagtacccttccctgactcaggtggctaaactgacaggccactcgtatcgggtcctttatctggctatgagcccagacggcgaggctatagtgactggcgccggagatgagaccctgcgcttctggaacgtttttagtaaaacccgaagtacaaaggtcaaatgggagtccgtctctgtgttaaacctgttcactaggattcgttag

SEQ ID NO: 15918 - DNA, 390 bp, synthetic construct
  source 1..390: mol_type = other DNA; note = Synthetic coding sequence
atggcagagctgattcagaaaaagcttcagggcgaagtggagaagtaccagcaactgcagaaggacttgagtaagtccatgtctggacggcaaaaactcgaggcgcagctcacagagaataacattgtcaaagaggagcttgctctgttggatggtagcaatgttgtgtttaagcttctaggtcccgtgttggtaaaacaggaactgggcgaggcgcgtgcaacagtcggcaaacgactggattatattactgcagaaataaagcggtatgagtctcagctgagggatcttgagcgacagagcgagcagcagcgcgagactctagcacagcttcagcaggagtttcaaagagctcaggccgcaaaagctggcgccccagggaaagcttag

SEQ ID NO: 15919 - DNA, 888 bp, synthetic construct
  source 1..888: mol_type = other DNA; note = Synthetic coding sequence
atggaactgattcaggataccagccgccccccacttgagtacgtcaagggcgttccactgatcaaatattttgcagaagcccttgggccgctgcagagcttccaggcccgccccgacgaccttttgatcaacacgtatcctaagagtggcacgacatgggttagtcagatccttgatatgatctaccagggcggggacctcgagaagtgtaaccgcgcccctatctacgtgcgcgtgccgttcctagaagttaatgaccctggagagcccagcggcctggaaacgctgaaagacaccccaccccctcggttgatcaagtcgcacctgcctcttgcattactccctcagacactgctggaccaaaaggtgaaggtagtctacgtggctaggaaccctaaagatgtggcggtgagttattaccacttccacagaatggaaaaagcacacccggagcccggcacatgggactctttcctggaaaaattcatggcaggcgaagtaagttacgggtcttggtaccagcacgtgcaggaatggtgggagctcagcaggacacaccctgtgctgtatcttttttacgaagatatgaaagaaaaccctaagcgggaaatccaaaaaattctggagtttgtgggcagaagtctccctgaagagaccatggacttcatggtacagcacacttctttcaaggagatgaaaaaaaatcctatgacaaactatacaactgtaccgcaggagctcatggatcattccatctcgccatttatgaggaaagggatggccggcgactggaagacaacctttactgtagcccagaatgaacggttcgacgcagattacgctgaaaagatggccgggtgctccctgtcattccgcagtgaattgtag

SEQ ID NO: 15920 - DNA, 888 bp, synthetic construct
  source 1..888: mol_type = other DNA; note = Synthetic coding sequence
atggagctgattcaggatactagccgcccccccctggaatatgtgaaaggggtccccctgataaagtattttgctgaagccctgggcccactgcagtcatttcaggcaagaccagacgatctgctcatcaacacctatcccaagtctggcaccacttgggtctctcagatattggatatgatttatcaagggggagacctggagaaatgcaaccgcgccccaatatatgtccgggtgcccttcttagaagtgaatgatccgggggaaccatcagggctggagaccctgaaagatacaccccctcctcgcctcattaagtctcatctgccacttgcgctcctacctcagacattattggatcagaaggtaaaagtggtgtatgtagctcgaaatcccaaagacgtggctgtatcatattatcatttccacagaatggagaaggctcatccagagcctggtacctgggactctttcctcgagaagttcatggctggcgaggtgtcctacgggagttggtatcaacacgtgcaggaatggtgggaactctctaggactcatccagtgctctacctattctacgaggacatgaaggaaaatcctaaaagagagattcagaaaatcctggaattcgtagggagatcactgccagaagaaactatggattttatggtgcaacatacaagttttaaagaaatgaagaaaaaccctatgactaactatactacagtcccccaagaactgatggaccacagcatcagccctttcatgcgcaaaggcatggcaggtgactggaaaactacgtttacagtggcccagaacgagagatttgacgccgattatgccgagaaaatggccggctgttctctctcttttcgctccgaactgtag

SEQ ID NO: 15921 - DNA, 354 bp, synthetic construct
  source 1..354: mol_type = other DNA; note = Synthetic coding sequence
atgttatgttggggcaatgcctcatttgggcagcttggccttggcggaatcgatgaggaaatcgtactggagcccaggaaatctgatttcttcatcaataagcgggtacgagacgtgggttgcgggctccggcacacagtgtttgttttggatgatgggacagtgtacacatgtgggtgtaacgacctcggccagctgggtcacgaaaagtctagaaagaaacctgaaattctgaaggtctgtcagatttccaggctgtatcggctgttagtggtgaccatcattcatttgcactttttaaagcaggtgaagagctccgtcggtgaccgtattaatatggccaattgggtgtag

SEQ ID NO: 15922 - DNA, 3174 bp, synthetic construct
  source 1..3174: mol_type = other DNA; note = Synthetic coding sequence
atgctgtgttggggcaatgccagtttcggccagctgggtctgggcggaattgacgaggagatcgtgttagaacctcgtaaaagcgacttcttcatcaataaaagagtgagggacgtagggtgtgggctgagacacactgtgttcgtgctggacgatggcaccgtttatacgtgtgggtgtaatgacctgggccagctcggccacgaaaaaagtcgcaagaaacctgagcaagtagtggcactagacgctcaaaatatcgttgcagtttcatgcggggaagcgcacaccttggctctcaatgacaaggggcaggtgtacgcctggggactggatagcgacggtcagctggggcttgtcggttccgaggagtgtataagggtgcctaggaatattaagagccttagtgacatccagatcgtccaggttgcatgtgggtattaccatagcttggccctgtccaaggcctccgaagtcttctgttgggggcagaataaatacggtcagctggggttaggcaccgactgtaaaaagcagacaagcccacagctgctgaaatccctcctgggcatccctttcatgcaagttgcagctggcggggctcacagtttcgtgctcacgctgtctggggcaattttcgggtggggtcgcaacaagtttggacagctgggactgaatgacgaaaacgatcgatatgtcccgaacctgctaaaaagcctgaggtctcaaaaaattgtctatatctgctgcggcgaagatcataccgctgcgctcaccaaggaagggggtgtattcaccttcggagcgggaggatacggccagcttggacacaacagtacctctcatgagataaatcccaggaaggtattcgagcttatgggctctattgtcacggagattgcttgcgggcgccaacacacatccgcctttgtgccaagttccggacgaatttactcttttggattgggagggaacgggcaattaggaacaggttctactagcaaccggaagagcccattcacagtgaagggcaactggtacccctataacggacaatgtctgccagacattgatagcgaggagtacttctgcgttaaacggattttctccgggggtgatcagagcttctctcattattcatcacctcagaactgcggaccacctgacgattttcgctgtcctaatcctaccaagcagatctggacggtcaatgaggctcttatccagaagtggttgagctacccctccgggaggttccctgtggaaatcgcaaacgaaattgacgggacattctcaagttccggctgcctgaacggatctttcctcgccgttagtaatgatgaccactataggacaggcactcggttctccggagtggatatgaatgcggcccggctcctgtttcataaactgatccagccagatcacccccagatctcccagcaagtggccgcctccctggagaaaaatctgatcccgaagctgacctcgtctctgccagacgtggaggctctgcgcttttacctgacgcttcctgagtgccccttaatgtccgatagcaacaacttcactacgatagcaatacccttcggcaccgctctggtgaacctggagaaagcacccttgaaagtcctggaaaattggtggagtgtccttgagccacctctgttcctgaagattgttgaactgtttaaggaggtggttgtccacctcctgaagctctacaagattggaattccaccgtcagagcggagaatcttcaactcttttctccataccgctttgaaagtgctagagatactccacagagtgaacgaaaagatggggcagattattcagtacgacaagttctatattcacgaagttcaagagctgattgatattcgcaatgactacattaactgggtgcagcagcaggcttacgggatggacgttaatcatggcctgacggagctggctgacatccccgttactatatgcacttaccctttcgtttttgatgctcaggctaaaaccacccttctgcagacggacgctgtgttgcagatgcagatggctatagaccaggctcaccgacaaaatgtcagctccctgtttttgccagtgatcgagagcgtaaatccatgtctgatcctggtagttaggcgggagaacatagtaggcgatgctatggaggtcctgagaaagaccaaaaacatcgattataagaagccactgaaggtgatttttgtcggagaagatgcagtggatgctggtggagtgcggaaagagttctttctgcttataatgcgagagcttctggacccaaagtacggtatgttccgctactatgaagactcaaggctcatatggttctccgacaagacatttgaagacagtgatctgttccatcttattggggtgatctgtggactggccatttataactgcaccatagtcgatctccatttcccactcgccctctataagaagctcttgaagaagaaacctagcttagatgacctgaaggaattaatgccagacgttggtaggtcaatgcagcagcttcttgactaccccgaagatgatatcgaggagacattctgtctgaattttaccattacagtagagaattttggagccaccgaggtgaaagagcttgtcttgaacggggccgacaccgccgtgaataaacagaataggcaggagttcgtcgatgcctacgttgattatatcttcaataaatctgttgcctcccttttcgatgcttttcacgcaggattccataaagtctgcggggggaaggtactgttgctttttcagcccaacgaactacaagccatggtgatcggaaacaccaattatgattggaaagagttggagaagaacaccgagtacaagggcgaatactgggccgaacaccctactatcaagatcttctgggaagtgttccatgaactcccattagaaaagaaaaagcagtttctgcttttcctcacaggatctgacaggattcctatcctcggaatgaaatctctcaagctcgtgatccaaagtacaggtggaggcgaggaataccttcccgttagccatacttgcttcaacttgctcgacctccctaagtatacggagaaagaaactctgcggagcaaactgatccaagctattgatcacaacgaaggatttagtttgatttag

SEQ ID NO: 15923 - DNA, 1080 bp, synthetic construct
  source 1..1080: mol_type = other DNA; note = Synthetic coding sequence
atgagctacagacgtgaactggagaaatatcgggatctcgacgaggacgagattcttggtgctctaactgaagaggagttgcggaccctagagaatgagctggacgagttggaccccgacaatgcactccttcccgccggccttcggcaaaaggaccagacaacaaaagcccctactggtccgtttaaaagggaggaactgctggaccacttggagaaacaggccaaagaattcaaagaccgggaggaccttgtgccctataccggcgaaaaaagaggcaaagtgtgggttcctaaacagaagcccctggacccggtcttggaatctgtaactcttgaacccgaactggaggaggccctggcaaatgccagcgacgcagaattgtgcgatatagccgcaatcctgggcatgcacacgttaatgtcaaatcagcaatactatcaagcactgagctcaagctctattatgaataaagaaggtctaaactctgtgattaagcccacccagtataagccagttccggatgaagagccaaactccacggatgtggaggagaccctcgagagaattaaaaacaatgaccctaagctggaagaagtcaatctaaacaacattcggaacattcctataccaaccctcaaggcctacgctgaagcattgaaagaaaattcatatgttaaaaaattctctatcgtcggaactcggtccaacgatcccgtagcctatgccctggctgagatgctgaaggagaacaaagtactgaagactttaaacgtggagagcaatttcatctcaggtgcgggaatactgcgactcgtcgaagctctgccatataatactagtctcgttgagatgaaaatcgacaatcagtcgcagccactggggaacaaggtggaaatggagatcgtgagcatgctcgaaaaaaacgcaacactgctgaagtttggctatcattttacccaacaaggtcccagactgcgtgcatccaatgcgatgatgaataacaatgacctggtacggaagcggagactcgctgacctaaccggaccaattatcccaaagtgccgttccggcgtctag

SEQ ID NO: 15924 - DNA, 714 bp, synthetic construct
  source 1..714: mol_type = other DNA; note = Synthetic coding sequence
atggaggtgatggaaggtcccttgaatctggcccatcagcagtctagacgcgccgacagactgttagcagcgggtaaatatgaggaggcaatttcttgccataaaaaggccgccgcttatctttcggaggccatgaaactgactcagagtgagcaggcgcatctcagtctagagctacaacgagattctcatatgaaacagcttctgcttattcaagagcgctggaagcgtgctcagagagaagaacggctcaaggcccagcagaatacagtgctttatttgcttcaacagaagtctgaacccgccgagccctgcatcggaagtaaagctcctaaagatgacaaaaccattattgaggagcaggcaacgaagatcgcagacttgaagaggcacgtagagtttctggttgccgaaaatgaacgactgcgcaaggaaaacaaacagctgaaagccgaaaaggcaagattgctcaaaggacctattgagaaagagctggacgtcgatgccgacttcgttgagacctccgagctatggtccctgcctcctcacgcggaaacggcaacagcttcttcaacatggcagaaatttgcagccaataccggaaaagcaaaagacatcccgattcctaacctgccgccgctggatttcccaagtccagaactgccactcatggagttatcagaggacattctgaaggggttcatgaacaactag

SEQ ID NO: 15925 - DNA, 1458 bp, synthetic construct
  source 1..1458: mol_type = other DNA; note = Synthetic coding sequence
atgaatggaactctggatcatcccgatcagccagacttagacgctattaagatgtttgtcggtcaagttcctcggacgtggtcagagaaggacctacgcgagttgttcgagcaatatggcgccgtgtacgaaatcaatgttttgcgggaccggagccaaaatcccccacagtctaagggttgttgttttgttacgttttacacaaggaaagctgccctggaggctcagaatgccctccacaatatgaaggttctgcccggcatgcaccatcctatccagatgaagccagcggattccgaaaaaaacaacgtggaagatcggaagttgttcataggtatgattagtaagaagtgtactgaaaacgatatacgggtgatgttttcaagctttggtcaaatcgaagagtgcaggatactgcgaggccctgacggcctgtcacgcggctgtgcatttgtgacattcacgactagagccatggcgcagacagctataaaagccatgcatcaggctcagaccatggaggggtgctccagtccgatggttgtaaagtttgcagatacgcagaaggataaggagcagaaacgcatggcccagcagctgcagcagcaaatgcaacaaatctctgctgccagcgtgtggggaaatttagccggccttaatactcttggcccacagtatctcgcattgtatctacaactgctccaacagaccgcctcttctggcaacctgaacaccctctcaagtttgcacccaatgggaggactgaatgctatgcagctgcagaacttggccgccctggcagctgccgcgtccgctgctcagaatacaccgagtggcaccaatgctctgaccactagtagcagtcctctgtccgtcctgactagctccggctcttcgcctagctctagcagttcgaattccgtcaaccctatcgcttcattgggcgctctgcaaacactcgccggcgctacagcagggttaaacgtgggctccttggcaggcatggccgccttgaacggcggccttgggagctccggccttagcaatggcacagggagcaccatggaagctttgactcaggcttactctggcattcagcagtatgccgctgcagccctccccactttatacaatcaaaacttgcttacccagcagtctatcggcgccgctggctcccaaaaggagggtcccgaaggcgcaaacttgttcatttatcacctcccacaggagttcggtgatcaggacctccttcagatgttcatgccattcggaaacgttgtctccgccaaagttttcatcgacaagcagacaaacctcagtaagtgctttggtttcgtgtcatacgataatcctgtgagcgcccaggccgcaatccaaagtatgaatggatttcaaattgggatgaagcgtcttaaggtccaactaaagagatctaagaatgattctaagccctactag

SEQ ID NO: 15926 - DNA, 1452 bp, synthetic construct
  source 1..1452: mol_type = other DNA; note = Synthetic coding sequence
atgaatgggaccttggaccacccagaccagcccgatctcgacgctatcaagatgtttgtcggccaggttccgcgtacctggagtgagaaagacctgagagagctgttcgagcagtatggcgcagtatacgagatcaatgtgcttcgggacagaagtcagaaccccccccagtcaaaagggtgctgctttgtaacgttttacactcggaaggcagccctggaggcacagaacgcacttcataacatgaaggtcttgcccggaatgcaccaccctatccagatgaagcctgccgactctgagaagaataacgcggtggaagaccggaagctcttcattggcatgatttctaagaagtgtaccgagaatgatattcgcgtgatgttctccagctttggccagattgaggaatgtagaatccttaggggaccagatggcctgtctagaggttgcgcatttgtgacattcacaacccgagctatggctcaaaccgcaatcaaggctatgcaccaggcacagacaatggagggctgttccagtccaatggtagtgaagtttgccgacacacagaaagacaaagagcagaaacgcatggctcagcaactgcagcagcagatgcaacagatcagtgcagcctctgtttggggcaatcttgccgggttgaatacgttgggaccacagtatctggcacttttgcagcagacagcgtcctccggtaatctgaatacactctcgtctttacatccaatgggcggtctaaatgcgatgcagcttcaaaatctggccgcactggctgcggcagcaagcgccgctcagaacacaccttctggaactaatgccctgactacgagttcctcgccgctctccgtgctgacttccagcgctgggagtagccccagctccagctcaagtaacagtgttaacccaattgcatcactgggcgctcttcaaaccttggcaggagccacagccgggcttaacgtgggctcgctggctggtatggcagctctgaatggcggactaggcagttcgggcctcagcaatgggaccggctcaactatggaagcattgactcaggcctattctggtatccaacagtatgcagcagctgcgctgccaacgctgtataatcagaacttactgacacaacaatccattggggcggccggttcccaaaaggaaggccctgagggagccaatctatttatctaccacctgccacaagaatttggcgaccaggatctgctgcaaatgttcatgccctttggaaacgtggtgtctgcgaaggtgttcattgataaacagacaaatctgagcaaatgcttcggtttcgtgtcttatgataacccggtgtccgcgcaggccgcaatccaatccatgaatgggtttcagattggaatgaagaggcttaaagtgcaactgaaacgttctaagaatgatagtaagccgtactag

SEQ ID NO: 15927 - DNA, 3570 bp, synthetic construct
  source 1..3570: mol_type = other DNA; note = Synthetic coding sequence
atggatgataaaggcgatccatctaacgaggaggcacccaaggcaatcaagccaactagcaaagagttccgcaaaacgtggggctttagaagaacgacaattgctaagagggagggggctggggatgccgaagccgatcccctggaacctcccccacctcaacagcagttagggctaagtctgcgccgcagtggaaggcagcccaaacgcaccgagcgggttgagcagtttctcaccatagctcggcggagaggacggagaagcatgccggtttctctggaagattctggagaacctacctcgtgtccagctaccgatgccgagaccgcctccgaggggagtgtggaaagcgcctcggagacacgctccgggccccagtctgcttccacagctgttaaggaacgccccgctagctctgaaaaagtgaaaggcggtgacgaccatgatgatacctccgactccgattccgacgggctgaccttgaaagaactacagaaccgactgaggcggaagagggagcaggaaccgacagaacgccctctgaagggtatccagagtcgccttagaaaaaaacgcagggaagaggggcccgcagagaccgtggggagcgaagcatccgataccgttgagggcgtgcttccgtccaagcaagagccggaaaatgatcagggggtggtgagccaggcagggaaagatgatagggaatccaagcttgagggcaaggccgctcaagacatcaaagacgaagagcctggcgatctcggtagacccaagccagaatgtgaaggatacgacccaaacgcgttgtactgcatctgtaggcagcctcataacaatagattcatgatatgctgtgatcggtgcgaagaatggttccatggggattgcgtcggaatctctgaggcgagaggaagactccttgagcgtaatggtgaggactacatttgccccaactgcacgattttacaggtccaggacgaaacccattcggagacagcagatcagcaagaggccaagtggagacctggcgacgctgacggcactgactgcacatctatcgggaccatagaacaaaaatcgtctgaagaccaaggcattaaggggagaattgagaaagctgccaacccgtcgggcaaaaagaagttaaagatttttcagcccgttatcgaggccccgggagcaagcaagtgtatcggcccaggatgctgtcacgttgcacagcccgattcagtgtattgcagcaatgactgtatcttgaagcatgcagcggcaacaatgaaatttctaagctcaggcaaggagcagaaacctaaaccaaaagaaaagatgaagatgaagcccgaaaagccttccctccctaagtgtggcgcacaggctggcattaaaatcagtagcgtgcataagcgacctgccccagagaagaaagaaactaccgtgaagaaagcagtggtcgttcctgcaaggagcgaagcgcttggaaaggaggctgcttgcgagtccagcaccccatcttgggctagtgatcataactacaatgccgtgaaacccgagaaaacagctgccccgagcccttctctgttgtataagtccacaaaggaggacagacgatctgaagagaaggctgcagcgatggccgccagcaagaaaacggcacctcccggctcagctgttggaaaacagcctgccccccgaaacctggtacccaagaaatcctcctttgcaaatgtcgccgctgctactccagccataaaaaaacctcccagcggcttcaaagggactatccccaaaagaccttggctctcagccacaccctcctcaggcgcctctgccgctagacaagctgggccagcaccagcggccgccacagccgcatctaagaagtttccggggtctgctgccctagtcggggccgttcgaaaacccgttgtccctagtgttcccatggcctctcccgctcctggccgcctgggcgctatgagcgccgcacctagccaaccaaattcccagataaggcagaacataaggagaagtctaaaggagatcttatggaagagagttaacgactctgacgatcttattatgacagaaaacgaagtgggcaagatcgccttgcatatcgagaaggaaatgtttaatctcttccaggtgactgacaatcgctataagtcaaaatacagaagcattatgttcaacctgaaagatcctaagaatcagggtctttttcatagagttctcagggaggaaatctctttagctaaactcgtcaggctgaagccagaagaactcgtgtctaaagaactgtctacctggaaggagcgccctgcacggtcagtcatggagtctcgaactaagctgcacaatgagtcgaagaaaactgcgcccaggcaagaggctatcccagacttggaggattctcctcctgtgtccgatagcgaggagcagcaagagtccgcacgtgccgtcccagagaagtccaccgcccctttgctggacgtcttttcatccatgcttaaagatacaacaagccagcatagggctcatctcttcgatcttaattgtaagatatgtactggccaggttccgtcggctgaggacgagcccgctcccaagaaacagaagctttccgcctctgttaagaaggaggatctgaaatccaagcacgattcatcggcccccgatccagcacccgacagcgccgatgaggtgatgcccgaggccgtgccagaagtcgcttccgaaccagggctggagtccgccagccaccccaacgtagatcgcacatacttcccaggaccccccggcgacgggcaccctgaaccctcacctctggaagacctgtctccttgccccgcatcttgtgggtccggggtcgttaccactgttaccgtgtcaggtcgtgaccccagaacagccccatcgtcctcctgtaccgccgtggccagtgctgcgagccgacccgactctacacacatggtggaagcacggcaggatgtccctaaaccggtcctgaccagtgtaatggtaccgaaaagtatcctcgcgaaaccaagctcttcccccgatcccagatacctttccgtcccccctagccctaatattagcaccagcgagtccaggagtccaccggagggagacaccacattgtttctgtctcgcctgagcactatctggaaaggctttattaacatgcagagcgtcgcaaaatttgttacaaaagcctacccagtgtcaggttgcttcgattacttgagtgaagatcttccagacactatccacatcggcggccgtatcgcccctaagacagtatgggactacgtggggaagttgaagtcaagcgtgtcaaaggaattgtgcctaattaggtttcaccctgccaccgaggaggaagaggttgcctatatatccctgtatagttacttttcaagtaggggcagattcggggtggtggctaataataacagacatgtcaaggacctgtacctcattccactgagcgcacaagatccagtcccttctaagctgctaccattcgagggccccggcaagagaaggctgtccggctggcggtag

SEQ ID NO: 15928 - DNA, 3570 bp, synthetic construct
  source 1..3570: mol_type = other DNA; note = Synthetic coding sequence
atggacgataagggcgatccttccaacgaagaggcccctaaggcgatcaagccaacctctaaggaattccgcaaaacttggggtttccggagaacgactatcgctaagagagagggggcaggagatgctgaggccgatcctctggagcctcctccccctcaacagcagctgggcctgtccctcaggaggtctggccgtcagccgaagaggactgaacgagttgagcaattcctgaccatagcccgccgacggggcagacggagcatgcctgtttccctcgaagactcaggggaacctactagttgcccagctacggatgctgagaccgcttctgaaggaagtgtagagtctgccagcgaaacccggtccgggccacagagcgctagcacagccgtgaaagaacgcccagcatcgtcagagaaggtgaagggcggggacgaccacgacgacacatcagattcagactctgacggcctcactctaaaggagctccagaataggctgaggaggaaaagggaacaagagcccactgagcggccacttaaaggcattcagagtaggttgcgaaaaaagagaagagaagaggggccagcggaaaccgtgggttcagaggcttccgatacggtggaaggggtacttcctagcaaacaggagccagaaaatgatcagggcgtggtgtcccaagccggtaaagatgatcgtgaatctaaactggagggtaaggccgcccaagatatcaaggatgaagagcctggtgatctaggtagaccaaaacctgaatgtgagggttatgatccaaacgcattgtactgcatatgtagacagccacacaacaaccgctttatgatctgctgcgaccgatgcgaggaatggtttcatggagactgtgtcggcatcagcgaggccaggggtcgccttcttgaacgtaacggagaggattatatctgccctaactgtacaatcctccaggtgcaggacgaaactcattccgaaacagcagaccaacaggaggccaaatggaggccaggcgatgccgatggcaccgattgtacaagcattggtactattgaacagaagtccagtgaagaccagggaatcaaaggaagaatcgaaaaggccgcgaacccgtcaggcaagaagaaacttaaaatatttcaacctgtcatcgaggcgcctggcgcctcaaaatgcatcgggcccgggtgttgccatgtggcccagccagatagtgtttattgttctaatgactgtatacttaagcacgcggcagcgaccatgaaattcctttcgagcgggaaagaacagaagccaaaacccaaagaaaagatgaagatgaaaccagagaaacccagcttgccaaagtgcggtgcccaggccggtatcaagatctccagcgtccataaacggcccgctcctgagaaaaaggagactacagtcaagaaagcggtcgtcgtccccgcacggtcagaggcccttgggaaagaagccgcctgtgagtcctccacaccttcttgggctagcgaccacaattataacgcagtgaagcccgagaagactgccgcgcctagcccatcgctcctgtataaaagcaccaaggaggatcggaggagcgaagaaaaagctgccgccatggccgccagcaagaagacagcaccaccagggtccgccgtcggcaaacaaccagccccgcgcaacttagtcccaaaaaagtcatcctttgccaacgtggcagccgccacccctgcaataaaaaaacccccgtctggatttaagggcaccattccaaagcggccatggctctctgccactccctcaagtggagccagtgccgcaagacaggccggtcctgcgcccgccgccgccaccgccgcctcaaaaaaattccccggaagcgccgccctcgtgggagccgtaagaaagcccgttgtgccttctgttcccatggcatcaccagctccaggccgactgggcgccatgtcagccgctccgagtcagcccaatagccagatccgtcaaaatataaggagatctctgaaggagattttgtggaaacgggtgaatgacagtgacgatttgatcatgaccgagaatgaggtgggaaagatcgccctccacattgagaaagagatgttcaacctgtttcaggttaccgataaccgatacaaatccaaataccggtccatcatgttcaatttgaaagatcccaagaaccaagggctgttccatagagttctgagagaggagatcagtctggctaagctagtgagactgaagcctgaggagctcgtgtctaaagaattatcaacatggaaggaaaggcctgctcgatcggttatggagagtcgcacaaagttgcacaacgagagtaagaagactgcccctagacaggaggccatccccgacttggaggactccccccctgtgtcagactcagaggaacagcaggaatccgctagggctgttcctgaaaaatcaactgcgccactgctagatgttttcagctcgatgctgaaagataccacaagccagcaccgcgcccacctgtttgatcttaactgcaagatatgtactggacaggtgcccagcgctgaggacgaacccgccccgaagaaacagaagctctcagcttctgtgaagaaggaagatctgaagtcaaaacacgactcctcagcacctgatcctgctcctgactcagccgatgaggtgatgccagaagccgttcctgaggtggccagcgaacccgggctggagagtgcatcccacccaaacgtcgatcggacctatttccctggaccacctggagacggacacccagaaccgagccccctggaggatctctcaccatgccctgcaagttgtgggtccggtgtagtgactacagtgacggtgtctggccgggaccctcggactgccccctcctcctcttgcacggccgtggcctcagccgcatccaggccagacagcactcacatggtggaagcaaggcaggacgtgcctaagcccgtcctcacatccgtcatggtccctaagtctattctggccaagccctctagttcccctgacccgcggtacctctctgtacctccaagtcctaatatcagcacatctgagtctcggtccccacctgagggggatacaaccctgtttctctcccggttgtcaaccatctggaagggatttattaatatgcagtctgttgccaagttcgtgactaaggcctatcctgtgagcgggtgctttgattatttatcggaagatctccccgataccatccatatcggaggcagaatcgctcctaagacagtatgggattatgtgggaaagctgaagtcttccgtaagcaaggagttatgcctgataaggtttcatccagccactgaggaggaagaagtggcttacatctcactctacagttacttttcatccaggggtcgattcggcgtagttgccaacaataaccggcatgtcaaagatctgtatctcattcctctgagtgctcaggacccagtgccctccaagctcctccctttcgaaggccctggaaagcgccggctcagtggctggcggtag

SEQ ID NO: 15929 - DNA, 6723 bp, synthetic construct
  source 1..6723: mol_type = other DNA; note = Synthetic coding sequence
atggatgacaagggtgatccttctaacgaggaagcgccgaaagccatcaagccaaccagcaaggaattccggaagacttggggctttagacggactacaatcgcaaagcgagagggcgcaggcgacgccgaggccgatcctctagaaccgcctcccccccaacagcagctcggtctctccctccgcagaagtggaagacagcccaaacgcaccgaacgcgtggaacagttcttgaccattgctcgtcgcagaggacgtagaagcatgccggtgagtctcgaggattctggggagccaaccagttgtcctgctaccgacgcagagaccgctagcgaaggctccgtcgaaagtgcatccgagacaagaagtggccctcagagtgcgtctaccgccgtgaaagaaagacctgcgagctccgaaaaggtgaagggcggggacgaccacgacgacacgtctgattccgactcggatgggctgactctgaaggaactgcagaatcggctgcgccggaagcgagagcaggaacccactgaaagacctctcaaagggattcagagcaggctgcgaaaaaaaaggcgcgaagagggacccgccgagacggtcgggtctgaagcctccgacactgtggagggcgtgctgccctccaagcaggagcccgaaaatgatcaaggcgtcgtttcccaggctggaaaagacgaccgagaaagtaagttagaaggcaaggctgcccaagatatcaaggacgaggagcctggggaccttgggcgacctaaaccagagtgtgaggggtacgaccccaacgctctctattgcatttgtaggcaaccccataacaatagattcatgatctgctgtgataggtgcgaggagtggtttcacggcgactgtgtgggaatctcagaggctaggggtcggctgttggagcggaacggagaagactacatctgcccgaattgcaccatactgcaggtgcaggacgagacacactctgaaacagcagaccagcaagaggcaaagtggaggcccggagatgctgatggtactgactgtaccagtatcggcactattgagcagaagtcgagtgaagatcagggaatcaagggaaggatcgagaaagccgctaacccatctggtaagaagaagctgaaaatatttcagcctgtgatcgaagcacccggggcaagcaagtgcattgggcctggttgctgtcatgttgctcagccagactccgtgtattgcagtaatgattgcattctgaaacatgccgcagccaccatgaaatttctatcttccggcaaagagcaaaagcccaaaccaaaggaaaagatgaaaatgaaacctgaaaaaccctccctgcctaaatgcggagcccaggccggtatcaagattagttctgtgcataagcggcccgctcctgaaaaaaaagaaactaccgttaagaaggccgtggtcgtcccggcccgaagcgaggcactgggaaaggaagccgcatgcgaatcctctaccccatcctgggcaagcgatcacaactacaacgcagtaaagcccgaaaagactgcagcgcccagccctagcctcctgtacaaaagcactaaagaggacagacggagtgaagaaaaggcggcagccatggccgcgtcaaagaagacagccccaccgggtagtgctgtggggaagcaaccggcaccccgaaatcttgtccctaaaaagtcgtctttcgccaatgttgcagccgcaactccagctataaagaaacctcctagcggcttcaaaggtaccatccccaagcgcccttggctgtcagcgacccccagcagtggtgcttccgccgcaaggcaggctggtcctgcaccagccgccgcaaccgccgcctctaaaaagttcccggggtcagctgccctggtcggcgctgtgcggaaacccgtagtcccgtctgtgccaatggcctcacctgcccctggccgcctcggggcaatgtctgctgctccaagtcagcctaacagtcagattcggcagaatattcgacgcagtctgaaagagattttatggaagcgggtcaatgattcagatgacctcataatgaccgagaatgaggtgggcaagattgcactgcacatcgagaaagagatgtttaatctgttccaggttacagataatagatataagagtaagtataggtccattatgtttaacctgaaggacccaaagaaccagggcctgtttcatcgcgtcttacgagaagagattagcttggctaagcttgttagactcaaacccgaggaactggtgtccaaagagttgagcacatggaaggagcgaccggcgaggagcgtgatggaatcaagaactaaactgcacaatgagtcaaaaaagaccgccccccggcaggaagctatccccgacctggaagattctcccccagtttctgactcagaggagcagcaggagtctgcaagagcagtacccgaaaaatccactgctcccctgctggatgtattctcgagcatgttgaaggatacaacgtctcagcacagggctcacttgtttgaccttaattgtaagatttgtacaggccaggttccaagcgctgaggacgagccagctcccaaaaagcaaaagctctctgcctctgtgaagaaggaggacctaaaaagcaagcacgattcaagtgcacctgaccctgctcccgattctgccgacgaagttatgcccgaggccgtccctgaagttgcctccgaacccgggctggaaagcgccagccaccccaatgtggatcgtacttatttccctggtcctcccggcgatgggcaccccgaacccagtcccttagaggatttgtctccttgcccagctagttgtggctccggggttgtcacgaccgtcaccgtgtctggccgcgatcctaggactgccccatcttctagttgcactgcagtggccagtgctgccagcagacctgacagtacccacatggtagaagctcgccaagacgtgcccaaacccgttctcaccagcgtgatggtgcctaaatcaatcctagccaaacctagctcaagcccagaccctcggtacctgtccgttccaccatctcccaacataagcacatctgagtcgcgatctcctcccgagggcgacaccaccttattcctgagtcggctctcgactatttggaaaggattcataaatatgcagagcgtggccaaatttgtgaccaaggcgtaccccgtgtccgggtgcttcgattatctcagcgaggatctgccagacaccatccacattgggggcagaatcgctcccaaaacagtgtgggactatgtcgggaaattaaaaagttctgtgagtaaggaactgtgcttgattcggtttcatcctgccactgaagaagaggaagtggcctacatcagcctttatagttatttctcatccagggggagatttggagtggtggccaacaataaccgccatgtcaaggatttgtatctgattcccctgagtgctcaggaccctgttccaagtaagttgctgccttttgaagggcccgggctcgaaagtccccgcccgaatataattttaggtctcgtaatttgtcaaaaaatcaaaagacccgcaaacagcggagaactcgataagatggatgaaaaaagaaccagactgcagccagaggaagccgacgtgccagcctaccccaaagttgcgactgtgccccagtccgagaagaaaccctcgaagtatcccctgtgttcagctgacgcagcagttagcacaactcccccaggctcaccacctccaccccccccgctcccagaaccgcctgtgctgaaggtcctgagctccctcaaaccagcagccccttctccagccacggcggcgacgaccgcggccgccgcctccaccgcagcctcatccaccgcaagctctgctagcaagacagccagtcccctggaacatattctgcaaactctctttggcaaaaaaaagtccttcgacccatccgctcgcgaacctccaggaagtaccgctgggttgccacaggagccaaaaaccactgccgaagatggcgttccagctcctcccctgcttgaccccatcgtgcagcagttcgggcagttctctaaagacaaagctctggaggaggaagaagacgatcggccttacgatccggaggaggagtatgatcccgaacgggcgttcgatactcaactggtggagaggggcaggcgacacgaggtggagagggctccagaagccgcggccgccgagagggaggaagtcgcgtatgatccagaggatgagaccatcttggaagaagcaaaggtaaccgtcgatgacctcccaaataggatgtgcgccgacgtacggcggaattccgtggaaagaccagccgagcctgtggctggtgccgcgaccccctctcttgtggaacagcaaaagatgttagaggagctgaacaagcagatcgaggaacagaaaaggcaactggaggagcaggaggaggccctccgccagcaacgggccgccgtgggagtcagtatggcccacttttcagtcagtgacgcacttatgagcccaccaccaaagtctagcttgcccaaggcagaattatttcaacaggaacagcaatccgcggacaaaccagcatctctgccccctgcttctcaagcaagtaaccatagggaccctcggcaggccagacgcctagctactgaaacaggagagggtgagggagaacccctgtcccgattatcagcccgcggcgcccagggtgccctgccagagcgggatgcatcacggggaggcctcgtggggcaggcccccatgccagtgccagaggaaaaagagcctgcttctagcccatgggcttccggagagaagcctcccgcaggttccgagcaggatggatggaaggccgaaccaggtgaaggcacacgtccagctacggtcggtgacagtagcgcgcgcccagccaggcgtgtcctgctgccaacccccccatgtggtgccttacaacctgggttccccctccaacatgacggggaaagggatcctttcacatgcccaggatttgccagtcaggacaaagcacttggcagcgcccagtacgaagacccacgcaacctgcacagtgcaggtcgaagttctagtcccgcgggagagaccgagggtgatcgagagccccaggcacggccaggagaggggaccgcccccttacctccacccggccagaaagtggggggctctcaaccgccttttcaagggcagcgagagcccgggccccatgcccttggtatgtcaggtctccatggccctaattttcccggaccccgaggaccagcgccaccatttccagaggaaaatatcgcgagtaacgatggaccgagaggaccacctccggccaggtttggagcacagaaaggcccaatccccagtctgttctcgggccaacatggacctcccccatatggcgatagcagaggcccctcacccagctacctcggggggccgcggggtgtcgcgcccagtcagtttgaagaaaggaaggaccctcacggcgaaaagcgggagttccaagatgctccctataacgaagtcactggagccccagcacagtttgaaggaacagagcaggctccattcctgggatcccggggtggagcccccttccagttcggtggccagaggagacccttgctgagccagcttaaaggacctcgcggcggcccccctccatctcagttcggcgggcagaggggccccccaccaggtcactttgtcggtcctagaggcccgcatcctagccaatttgaaactgctagagggccccacccgaaccagttcgaaggtcctcgaggccaggcgcccaactttatgcctggccctaggggaatccaacctcagcagtttgaagatcaaagggtgcactcgccaccacgattcaccaatcaacgtgcacccgcaccgttacagttcggcggcctgcgcgggagcgccccatttagtgaaaaaaacgaacagaccccttcgaggttccattttcagggacaagctcctcaggtgatgaaacccggcccccggcccctgctggaactgccgagtcatcctcctcagcaccggaaagatcgatgggaggaggccgggccaccttcggccctgagctcatccgctccaggccagggccccgaagccgacggacagtgggccagtgcggacttccgggagggaaaaggccatgagtatcgcaaccagactttcgagggacgccagcgcgagcgcttcgatgttggaccgaaggagaaaccactggaggaacctgacgcccagggtagagcatcagaggacaggcggcgcgagcgggaaaggggccgcaactggagccgcgaacgagattgggacaggccacgcgaatgggaccgccatcgggacaaggattcctctcgcgattgggaccgcaatagagaacgctctgccaatagggatagagaacgcgaggccgacagaggcaaggaatgggatagatccagagaaagatccagaaacagagagcgcgaacgcgatcgcaggcgagatcgcgacagaagccggtcacgcgagagggatcgcgataaggctcgagatcgagaaaggggacgagatagaaaagaccggtcaaagtctaaggagtctgcgagggatccgaaacccgaggcctcccgggcaagcgacgcagggaccgctagccaggcctag

SEQ ID NO: 15930 - DNA, 888 bp, synthetic construct
  source 1..888: mol_type = other DNA; note = Synthetic coding sequence
atggaattaatccaggacaccagccgcccccccctggaatacgtaaaaggggtgcccctgattaaatattttgctgaggccttaggccccctccagtcttttcaggctcggcctgatgacttactaataaacacttatccaaagtctggtactacttgggtgtcacagatactggacatgatttaccagggtggtgatctggagaaatgtaacagggcacctatttatgtgagagtgccctttctagaggtgaacgatccgggcgaaccgagcggtctggaaaccctgaaggatactcctccccccagactaatcaaaagccatctcccattagcgctgctgccacagacactgctggaccaaaaggttaaggtagtgtatgtggctcggaatcctaaggacgtggccgtgagctattaccattttcacaggatggagaaagctcatcccgaacccggtacctgggatagcttcttggagaaatttatggcgggcgaagtgagctatgggagttggtaccagcatgtacaggaatggtgggaactttctcgcactcatcccgtcctctacctcttttacgaagatatgaaagaaaaccctaagagggaaattcagaaaattctagagtttgtggggcgctcactgcccgaggaaaccatggatttcatggttcagcacacgagctttaaagaaatgaagaaaaacccaatgacaaattacaccaccgtcccccaggagctgatggaccacagcataagtccgtttatgcggaaggggatggccggggactggaaaaccacattcacagttgcccaaaacgaaaggtttgatgctgattatgccgaaaagatggccggatgtagcctctccttccgatctgagttgtag

SEQ ID NO: 15931 - DNA, 834 bp, synthetic construct
  source 1..834: mol_type = other DNA; note = Synthetic coding sequence
atggaggccgccgagacagaggcagaagcagccgccttagaggtgctagcggaagttgccggcattctggaacctgttggccttcaagaggaggcagagctgcctgccaaaattctcgtagagttcgtcgtggatagtcagaagaaggataaactgctgtgttcgcagcttcaggtcgcagattttttgcagaacattctcgctcaggaagatacagcaaagggcttagatcctctcgccagtgaggacacttctcgccagaaagcgatcgccgctaaagagcaatggaaagaactgaaagcaacttatcgcgagcacgttgaggctatcaagatcgggctcacgaaagctttaacccagatggaagaagcccagcggaaacgcacacagctgcgggaggcattcgagcagctgcaggccaaaaaacaaatggccatggagaaacgtagagcggtgcagaatcagtggcagctgcagcaggaaaaacatctacagcatctggccgaagtgtcagccgaggtgcgtgagcgaaagactggcacacaacaggagctggatagagtgtttcagaagctgggaaatctgaagcagcaggcagaacaggaaagggacaaactgcaaaggtatcagaccttcctgcaactcctgtatactctgcaagggaagctcctgttcccagaggccgaggcagaggctgaaaatctccccgatgacaagcctcagcaacccacccgcccccaggagcagagcacgggagatactatgggccgggaccccggagtgtcatttaaggccgtcggcctccagccagctggagacgtgaacctgccctag

SEQ ID NO: 15932 - DNA, 1245 bp, synthetic construct
  source 1..1245: mol_type = other DNA; note = Synthetic coding sequence
atgggaactgtaaccgaagacttgatccgcaggaacgccgagcacaacgactgtgtcatctttagtttggaggagctcagccttcaccagcaagagatcgaaaggctggagcacattgacaaatggtgcagagatctcaaaattctgtatctgcagaacaacctcatcggaaagattgagaatgtgtccaagcttaaaaaactggagtatctcaatctcgccttaaataatatcgaaaaaatcgagaatctcgagggttgtgaggaactggctaaactggacttgacggtgaatttcataggtgaactgagcagcattaaaaacctccagcacaatattcacttgaaagaattatttctgatgggaaatccttgcgcgtcattcgatcactatagggagttcgtagtggcaactctgcctcaactcaaatggcttgacgggaaagaaatcgaaccatctgagagaatcaaggcgcttcaggactacagcgtgatcgagcctcagattagggagcaggaaaaagatcattgcctcaaacgggcgaaattaaaggaagaggcccagaggaagcatcaggaggaggacaaaaacgaagacaagagaagtaacgcgggcttcgacggccggtggtatacggatattaacgccactctctcttcattggagagcaaagatcatctacaggctcccgatacagaggaacataatactaagaaacttgacaacagcgaggacgacctggagttctggaataagccctgcctgtttactcctgagagccggttagaaaccctgcggcacatggaaaagcagagaaagaagcaggaaaagctaagcgaaaaaaaaaaaaaagttaaacctccccgtacgctgattacggaggatggcaaggccttaaacgtgaatgaacctaagatcgatttttccctaaaggataacgagaagcagatcattctggacctcgctgtctatcgatatatggatacatccctcattgatgtggacgtgcagccaacctacgtccgggtcatgattaagggtaagccttttcagttggttcttcctgcagaggtgaagcccgattcaagcagcgcgaagcgcagccagactactggacatctggttatttgcatgccgaaagtgggcgaggtgattactggcggtcagcgcgcctttaaatctatgaagaccacatctgaccgctcacgtgagcagactaatacctcttattctaccggattttag

SEQ ID NO: 15933 - DNA, 2529 bp, synthetic construct
  source 1..2529: mol_type = other DNA; note = Synthetic coding sequence
atgtctagtagccattttgcgtctaggcaccgcaaagacattagcactgagatgattaggacaaagatagcacaccgcaagagcttgtcacaaaaagagaaccgccacaaagagtacgaacggaatcgccactttggcctgaaagatgttaacatcccaacacttgaaggaaggatcttggtggagctcgatgagacatctcagggactcgtgcctgagaaaacaaatgttaaacctcgagctatgaagactatcctgggtgaccaacgaaaacagatgctccagaagtacaaagaggaaaagcagctccagaaactgaaagaacagcgggagaaggccaagagaggcattttcaaagtcggacgctaccgccccgatatgccctgtttcctgctctcgaatcaaaacgcagtgaaggccgaacctaagaaagctataccatcatccgtgcgcatcacccgctcaaaggcgaaagaccagatggagcagactaaaattgataacgagagcgatgtgcgggctatccggcccggaccgcggcagacctccgagaaaaaggtctccgataaagaaaagaaggtggtgcagcccgtaatgcccacatcactgaggatgacacgaagtgccacccaggctgctaagcaggtcccccgcaccgtgtcctcaaccacggccaggaagccagtgacgcgcgccgcgaatgaaaacgaacctgaggggaaggtccccagcaagggtagaccagccaaaaatgtagaaacgaagccggataagggcatctcgtgcaaagtggatagcgaagaaaatacactcaatagccagactaacgcgacatcaggtatgaatccggacggtgtgttgtccaagatggagaacctgcccgaaatcaacactgcaaaaatcaaggggaagaacagtttcgcccccaaagactttatgttccagcccttggacggcttaaaaacgtaccaggtaacccctatgactccaaggtcagctaatgccttcctgacaccaagctatacatggacaccattaaagaccgaggtggacgagagccaggctacgaaggaaattttagctcagaagtgtaagacctactctactaagacaattcagcaagattcgaacaaactgccctgtccacttggacccctgaccgtttggcatgaggagcatgtcctcaataagaatgaggccactacaaaaaatctgaatggcctgcccattaaagaagtgccttcactggaacgcaatgaggggagaatcgcacagcctcatcatggcgttccatacttccgcaatatcctgcagtccgagacagagaagttgacaagccactgctttgagtgggatagaaaattagagctggatatccccgacgatgccaaggacttgatcagaaccgccgtagggcagaccaggctgctgatgaaagagcgcttcaagcagtttgagggtctggttgacgactgcgagtacaaacgggggatcaaggagaccacatgcacagatctcgatggcttctgggacatggtgagctttcagatcgaagatgtcatacataagttcaacaacttaatcaagcttgaagaaagtggatggcaggtgaacaacaacatgaatcacaacatgaacaagaacgtgttcaggaaaaaagtggtatctggtatcgcctcaaaacccaagcaggatgacgcagggaggattgccgcccgcaaccgcctggccgctatcaagaacgccatgcgggaacggatcaggcaggaggaatgcgcggaaaccgccgtctccgtgattccaaaggaggtcgacaagatcgtgtttgatgccgggttctttcgggtcgaatcaccagtgaaattgttttccggattgtccgtgagctccgagggcccatcgcagcgccttggaacccctaaatcagtaaacaaagctgtttcccagagccgcaacgaaatggggattcctcagcagaccacctcccctgaaaacgcaggaccgcagaacaccaagtctgaacacgtcaagaagactctattcttgagcatcccagaatcgcgctctagtatagaggacgctcagtgtcctggcttgccagacctaatcgaggagaaccacgttgttaacaaaactgatctgaaggtagattgcctgtcatccgagcgcatgtcactgcccctcttagcaggaggggtggcggatgacatcaatactaacaagaaggagggaatctcagatgtggtcgagggaatggaactgaacagttccattacgagccaagacgtgcttatgagttctcctgagaagaacactgccagccagaactccatccttgaggaaggagaaacaaagatcagccaatctgagctttttgataataagtctctcacaacagagtgtcacctccttgattctgtcgggagctgttacgttgccagagctggactggaagtactggggtcctcagatcccacgacgagtgccagtagagtcgctgggaccacggcccgttcaaaactacagtag

SEQ ID NO: 15934 - DNA, 1710 bp, synthetic construct
  source 1..1710: mol_type = other DNA; note = Synthetic coding sequence
atgttgtgctcgccctcgttctgcaaattgtgctggaagcggcagagagaaaacgggcagagaaagtacggcgggccccccccagggtgggacgctgccccacccgagcgcggttgtgaaatcttcattgggaaattgccaagagatctgtttgaagacgaacttatcccgctttgtgaaaaaattggaaagatctatgagatgcggatgatgatggatttcaacggaaacaatcgcggctacgccttcgttaccttctcgaacaaggttgaagccaaaaatgccataaaacagctgaataactatgagattaggaatggtagactgctgggggtgtgcgccagtgtggataactgtcgtctgttcgtcggcggcatcccgaagactaagaaacgcgaagagatcctcagcgagatgaagaaagtgacagagggagtggttgatgtgatcgtttatccgtctgcagcggataagacgaaaaacagaggttttgcctttgtcgaatatgaatcgcacagagcggctgcaatggctcgccggaagctcctgcctggccggatccagctgtgggggcatggtatcgcggtggactgggccgagccagaagtcgaagttgacgaggacactatgtcctctgtaaaaatactgtatgtgcgtaatcttatgctaagcaccagtgaagagatgatcgagaaggaatttaacaacatcaaaccgggtgccgtggagagggtaaagaaaattagggactacgcttttgtgcatttcagtaaccgagaggatgccgtggaagctatgaaggccttaaatggaaaggtgctggacggctcacccattgaggtaacactggccaagcctgtggataaggactcatatgtgaggtacaccaggggaactggcggacggggaaccatgctgcagggcgaatacacctacagcctcggccaggtctacgatccgactacaacctatttgggcgcccccgtgttttacgcacctcagacctacgctgcaatccctagcttgcactttccagccacgaagggtcacctgagtaatcgggcaatcatccgggccccatcggttaggggggccgccggcgtgcgcggtctgggaggacgcggttacctggcatatactggtctcggccgaggctaccaggtgaaaggggacaaacgagaagacaagctctatgacattctgcctggcatggaactgacacctatgaaccccgtcacactcaagccccagggcattaagctggcacctcaaatacttgaggaaatctgtcagaaaaataactgggggcaacccgtataccaattgcattccgctatagggcaagaccagcgacaacttttcctgtacaagatcaccattccagctctcgctagtcagaatcctgcaatccacccctttacacctcctaagctcagcgccttcgtggacgaggctaagacctacgccgccgagtacacacttcagaccttgggcataccaactgatggaggggatggcaccatggccacggccgctgctgccgctacagcctttcctggatacgccgttccgaacgcaacagcccctgtgagcgcagctcagctgaaacaggccgtaactttaggccaggacctcgctgcctataccacctatgaagtttatcccacattcgccgtgaccgcccgtggagacgggtacggcaccttctag

SEQ ID NO: 15935 - DNA, 1764 bp, synthetic construct
  source 1..1764: mol_type = other DNA; note = Synthetic coding sequence
atgtcaactgctatccccgggctcaagaaggggaataacgccctgcagtccatcatcctccaaacccttttagagaaggagaacggacagcgaaagtatggaggtcccccacccggctgggacgctgcaccacctgaacggggatgcgaaattttcataggcaaactcccccgggacctgttcgaggacgagctcattccgctgtgcgaaaaaatcggaaagatctatgaaatgcgtatgatgatggattttaacggtaacaataggggctacgccttcgtgacgtttagcaataaggttgaagccaagaacgctatcaaacagttgaataactacgagatccggaacggcaggctcctcggtgtttgcgccagcgtggataactgccgcctgtttgtgggtgggattccaaagacaaagaagcgcgaggagatactgtctgagatgaaaaaggtgaccgagggggtggttgacgttattgtttacccttcagctgctgacaaaacaaagaaccgtgggttcgcgtttgtcgagtacgaaagccaccgtgccgccgcaatggccagacggaaattgttaccgggccggatccagctttggggtcacgggattgccgtcgattgggcggagcccgaggtggaagtggacgaggataccatgagttcagtgaagatcctatatgtgcgtaatctcatgttaagtacatcagaagagatgattgaaaaggaattcaataatatcaaaccgggcgccgttgaacgagtaaagaaaatcagagattacgccttcgtgcacttttctaacagagaagacgcggtggaagcgatgaaggcattaaacgggaaggtgctggacgggtccccaatcgaggtcaccctggccaagcccgtcgataaggattcgtacgtgcgctatactcgcggaacaggtggaaggggaaccatgctgcaaggagaatacacctattctctcggccaggtctacgaccccactactacctacctgggcgcccctgtcttttacgctccccaaacttatgctgcgattccttcactccacttccctgcaactaaaggtcatttgtcaaaccgtgcaatcattcgcgcccccagtgtgagagagatctatatgaacgtacctgtgggagccgcaggcgtacgaggactgggaggccgaggatatctagcttacaccggacttggcagaggctatcaggttaaaggcgacaagcgagaggacaagctgtatgatattcttccaggcatggaattgactccaatgaaccctgttaccctcaaaccccagggaataaagctggcccctcagattctggaagaaatctgtcagaaaaataactgggggcagcctgtctaccagctgcatagtgctatcggtcaggatcaacggcaactctttttgtataaaattaccattccagccttggcctcccagaaccctgcgattcaccctttcactcccccaaagctctctgcctttgtcgacgaagctaagacgtacgccgcagaatacacgctgcaaactctagggatcccaaccgacggtggagacgggacaatggcaacagccgccgccgcggccacagcgttccctggctacgcagtgcctaacgcgactgctccagtttctgcggctcagcttaaacaggccgtgacactggggcaagaccttgcggcttataccacatacgaggtctatcctacattcgcagttaccgctagaggcgacgggtacggcacgttctag

SEQ ID NO: 15936 - DNA, 1620 bp, synthetic construct
  source 1..1620: mol_type = other DNA; note = Synthetic coding sequence
atggaaagcaatcacaagagtggggatggtctgtctggaacacaaaaggaagcagcactcagagcactcgtgcagcgcacagggtacagcttggtacaggaaaatggccagcggaagtacggggggccccctcccggatgggacgcggccccccccgaaagaggctgcgaaatcttcatcggcaagctccctagagacttgttcgaagatgaactgatccccctgtgcgagaagattggcaaaatctacgagatgcgaatgatgatggacttcaacggcaacaatcgtgggtacgcattcgttaccttctctaacaaggtggaggccaaaaacgctattaagcagcttaacaactatgaaatcaggaacgggcggctgcttggagtgtgtgcaagtgttgataattgtcgactcttcgttggtggcatcccaaaaacgaaaaaacgtgaggagatcctaagtgaaatgaaaaaggtaactgagggcgtggtcgatgtgatcgtctatccaagcgcggcagacaaaactaagaacagaggcttcgccttcgtggagtacgaatcacaccgggctgctgctatggccaggcggaagttgctgcctggcgcggtagagagggtgaagaaaatcagggattatgcctttgtgcatttcagcaacagggaggatgccgtggaagctatgaaggctttgaatgggaaggttctggacggcagccctattgaagtgaccctggccaagcccgtcgacaaagattcctatgtgcgatacacccgcggaaccggcggcaggggcaccatgcttcagggagaatatacctacagtcttgggcaggtttacgatcctaccactacataccttggggcccccgtgttttacgcgccacagacttatgctgcaatcccatcactgcattttccagccacgaagggccatctctccaaccgcgccataatccgagctcctagcgttcgggaaatctacatgaatgtgccagtgggcgcagcaggggttcgcggactcgggggccgtggatatctggcatacactggcttgggtaggggctatcaggtgaagggcgataaacgggaggataagctctatgacattctgccaggtatggaattaacccccatgaacccagtgacattaaagcctcaggggatcaaactggctccacagattctggaggagatttgccagaaaaacaattggggccaaccagtgtatcagttgcacagcgctatcggacaagaccagcggcagctcttcctgtataaaattacaatccctgcgctagcgtcccaaaaccctgcgattcatcctttcaccccacccaagctcagcgcatttgtagatgaggccaagacttacgccgccgagtatacactgcagaccctaggcattcctaccgatggcggagatggaaccatggctacagctgctgctgctgctactgcattcccgggctatgctgtcccaaacgcaaccgccccagtctcagcagcccagctcaagcaggccgtgactttgggccaggacttggccgcatatacaacgtacgaggtatatcctaccttcgccgttacagctcgcggcgatggctatgggactttttag

SEQ ID NO: 15937 - DNA, 1044 bp, synthetic construct
  source 1..1044: mol_type = other DNA; note = Synthetic coding sequence
ttttcgctcttccctgcagtcgacaacgaggaagccgcccttttgcatgaagaggctaccatgaccatagaggaattactgacaagatacggtcaaaattgccacaaaggcccaccccatagcaagtccggcgcctctgataagctgccgcgcgtcgctaagtctaagttctttgaagactcagaggatgaaagcgacgaggccgaagaggaggaggaggactctgaggaatgctctgaagaggaggacggctatagtagcgaggaggcagaaaatgaggaagatgaggacgacaccgaggaagcagaagaggatgacgaagaggaggaggaggagatgatggtaccaggtatggagggcaaagaggaaccaggatctgattccggaactaccgcagttgtggcccttatcagaggcaaacagctgatagtggcaaacgctggggacagccgttgcgtggttagcgaggctgggaaggctctcgatatgtcgtacgaccacaaacctgaggacgaggtagagcttgcccggattaaaaatgccggcggcaaagtcaccatggacggcagggtgaacggtggcctcaatctcagcagggcaatcggggaccacttctacaaacgcaataaaaatctgccacccgaagaacagatgattagtgccctcccagatatcaaggttctcactcttacggacgatcatgaattcatggtgattgcgtgtgacggcatctggaacgttatgtcttcccaggaagtcgtagacttcatccagagcaaaatctcccagagggatgagaatggcgaacttaggctgctgagtagcatagttgaagagctcctggaccagtgtctggctccggatacctctggggatggaactggttgcgacaatatgacttgcattatcatctgcttcaaacctcggaacaccgccgagcttcagcccgagtcgggaaaaaggaaattagaagaggttctgtccaccgaaggcgccgaggagaacggaaatagtgacaagaaaaaaaaggctaaacgagactag

SEQ ID NO: 15938 - DNA, 1218 bp, synthetic construct
  source 1..1218: mol_type = other DNA; note = Synthetic coding sequence
atggagacggatctgaacagtcaagacaggaaagacctcgataagtttattaaattctttgccctgaaaactgtgcaggtgatcgttcaggcccgactgggcgagaaaatttgtacgcgctccagctcttctcccacggggtcagactggttcaacctggcgattaaggacattcctgaggtgacccacgaggccaagaaggcgctagcgggccaactacccgctgtagggcgcagtatgtgcgtggagatcagcctgaagacctccgagggcgattctatggagctcgagatctggtgtctggagatgaatgagaaatgtgataaagaaatcaaagtgtcatacaccgtgtacaatcgactgagcctgctgctgaaatctctgctggctatcacgcgcgttactccagcataccggctctctcgcaagcagggacatgaatatgtgatcctgtatagaatttactttggcgaggtgcagttatccgggttgggcgagggatttcagactgtgagagtagggactgtgggaacccctgtcggcactataacacttagttgtgcctacaggatcaacttagcatttatgagcacgcgacagttcgagcggacccccccaataatgggtataataattgaccactttgtcgatcgcccttacccatcttctagtccaatgcatccatgtaactataggaccgctggcgaggatacgggagtgatctacccatccgtggaagacagccaagaggtgtgtacaacgtctttttcaacctctccaccgagccaactcatggttcctggcaaggagggcggtgtgccactcgccccgaaccagcccgtgcacggaacgcaggccgaccaggagcggctagccacatgtacaccctccgacagaacccactgcgcggccaccccctcatcctctgaggatacagagactgtatccaactcttccgaaggccgggctagtccccatgatgttctggaaacgatcttcgtcagaaaagtcggagcttttgttaacaaacccatcaaccaggtaaccctcacatctctcgatattcccttcgctatgttcgccccaaaaaatctcgaactggaggacacagatcctatggtcaatccccctgatagtcctgagaccgagtctccgctccagggtagccttccatgtagttggcccctaccttgtctgttgagccctagcacagtgtag

SEQ ID NO: 15939 - DNA, 2025 bp, synthetic construct
  source 1..2025: mol_type = other DNA; note = Synthetic coding sequence
atgcagacttctagctctagatccgtgcacttatccgagtggcagaagaactacttcgctattacttcaggcatttgtacgggtcctaaagctgacgcatacagggcccagatattgcgcatccagtatgcctgggccaatagtgaaattagccaggtgtgtgctacgaaactatttaaaaagtatgctgaaaaatactccgccatcatagatagcgacaatgtggagtctggcctgaacaactatgcagagaacatcctgacacttgccgggagtcaacagaccgacagcgataagtggcagtctgggttgagtatcaataatgtcttcaagatgtctagcgtgcagaagatgatgcaggctggcaaaaagtttaaagattcccttctcgaacccgccttggcgagtgtagtgatacataaggaagcaacagtgtttgatctgcccaaattctctgtgtgtggcagcagccaggagagcgacagcctccctaactcagctcacgaccgcgaccgcacccaggatttcccagaatctaacaggctcaagctattacagaacgcccagcctcccatggtcacaaatacagctaggacatgtcctactttctcagcacccgtaggagagagcgcgaccgccaaatttcacgtgacccccctgttcgggaacgtgaagaaggagaaccacagctcggctaaggagaacattggtttaaatgtatttctgagtaatcagtcctgttttcctgctgcatgtgagaatcctcagcgtaagtcattttacggctctggtactatcgacgctttgagcaaccctatcttgaacaaggcgtgttcaaagactgaagataatgggcctaaggaagacagctctcttccaacatttaaaactgctaaagagcagctttgggtggaccagcagaaaaaatatcaccagccacaacgggcttctggatcctcctatggcggagttaagaagtccctgggagctagccgcagtcgcggaattctcggaaaattcgtccctcccattcccaaacaggacgggggcgagcagaatggcggtatgcagtgcaaaccctacggggccggtccgacagagcctgcacacccagttgacgaaaggttgaagaacttagaacccaagatgatcgagttgatcatgaatgagatcatggatcatggccctcctgtgaactgggaggatatcgccggggtagaatttgccaaggctacaatcaaagagattgtggtatggccaatgttaagacctgacatctttactggccttagggggccacccaagggaatcctgctattcggacctcccggtactggcaagaccctcataggtaagtgtatcgcctcccaatctggcgctacatttttctctatctctgccagctcattgacatctaagtgggtcggggaaggggagaaaatggtccgcgctctgtttgctgtggccaggtgccagcagccagccgtgatttttattgatgagatcgactccctgctgtcacagcggggtgacggtgagcatgagtcatctcgtagaatcaaaacagagttcctggttcaacttgacggcgccacgacctcctcagaggataggattctagtggtgggtgccaccaatcgcccccaagagattgatgaggctgcacgacgccggcttgtgaaaagattatacatccccctcccggaagcttcagcacggaagcagattgtcattaatcttatgtcaaaagagcaatgctgcctgtccgaggaagagatcgaacagatcgtgcagcagagtgacgccttctccggggctgatatgacccagctgtgtcgggaggctagtctgggaccgatccgcagcctacaaactgccgacatcgctacgattacccctgaccaggtgcggccgatagcctatatcgactttgaaaacgcattccggacagtcaggccttccgtgtcacccaaagatctcgagttgtacgaaaactggaacaagactttcggttgtgggaagtag

SEQ ID NO: 15940 - DNA, 2640 bp, synthetic construct
  source 1..2640: mol_type = other DNA; note = Synthetic coding sequence
atgaactacccaggtaggggcagccctagatctccagaacacaatggacgggggggaggcggtggggcatgggaactggggtcagacgcccggcctgctttcggaggtggagtgtgctgctttgagcacttaccaggcggcgaccccgatgatggagacgtgccactcgccctgctacgaggtgagcctggactccatttagcgcccggcactgatgaccataaccatcacctcgcactggatccttgcctgtcggatgaaaattatgatttctcctctgcggagtcaggcagctccctccgatactatagtgaaggtgagtcaggtggtgggggaagttctttgagtctgcatccaccccagcagccacccttagtacctaccaactccgggggtggcggagctacagggggttctcccggcgaaagaaagaggacacggctgggcggtccagccgctaggcaccgatacgaagtggtgacagagcttggacctgaagaagtgaggtggttttacaaagaagataagaagacatggaaaccctttattgggtacgactccctcaggattgaactggcttttcggaccctccttcagacaacgggcgcaagacctcagggtggtgatagagacggagaccatgtttgtagccccaccggccccgctagctctagcggggaggacgatgatgaggacagagcttgcggcttttgtcagtcaactacaggtcacgagcccgagatggttgaactcgtcaacattgagcctgtgtgtgtgaggggaggtctctatgaagtcgacgtcacccagggagagtgttatcccgtgtattggaatcaggctgataaaatacctgttatgagagggcagtggtttattgatgggacctggcaaccattggaagaagaggagtctaatctgatcgaacaggaacatctgaactgtttccgcggccagcaaatgcaagagaacttcgacattgaggtttctaagtccatcgacgggaaggatggttcaggcatcaactacagcgccgtacatagttttaaactatctagaaaccatgtggattggcacagtgtggacgaagtttacttgtacagtgacgcaaccacaagtaagatcgctcgcaccgttactcagaaattgggattcagcaaggcttcctcaagcgggaccagactgcatcgcggctatgtggaagaggcaactctcgaagacaagccttcccaaactacccatatcgtgttcgtggttcacggtatcgggcaaaaaatggaccagggtcggatcattaaaaatacggccatgatgcgtgaggccgcccgtaagatagaggaaaggcacttctctaaccacgctacacatgtcgaatttttgccggtggagtggaggtccaagttaacacttgacggagacacagtggattccatcaccccggataaggttcgaggactgcgggatatgctgaatagtagtgcaatggacattatgtactatacatctcctttatatcgggatgagttagtcaaggggttgcaacaggagcttaatcgcctttatagccttttttgttcgagaaatcccgacttcgaggagaaaggtgggaaagtgagtatcgtttctcactcactgggatgtgtgattacttacgacatcatgaccggatggaatccggtcagactctatgagcaactcctccaaaaagaggaggaactgcccgatgaacggtggatgtcctatgaagaaaggcatttgctggatgagctctacattaccaagaggaggctgaaagagatagaggagaggctgcatggcctaaaggcatcttccatgacccagacaccggcgctgaagtttaaggttgagaatttcttctgtatgggctccccgctggccgttttcctggctcttcggggtatccgcccgggcaacaccggctcccaggaccatattctgcccagagaaatctgtaacaggctgttgaatatattccatcccactgatcccgtggcctatcggcttgagcccctgattctaaaacactactctaatatctctccggttcagattcattggtacaacacatcgaatccgctgccatatgagcacatgaagccctcctttctgaatccggctaaggagccgacctccgtctcagaaaacgaagggatctctaccatccctagtcctgtgacctctccagtgctgtcacgccgccactacggcgaatccatcacaaacatcggtaaggcaagcatactaggggccgccagcattggcaagggacttggtggaatgctattctcccgcttcgggcgcagctccacaacccagtccagtgaaacgtccaaagatagcatggaagacgagaaaaagccagtggcctccccatctgctacaactgtcgggacccagaccttgccccactcctcctcgggcttcctggacagcgctttggagctggaccatcggatcgacttcgagttgcgcgagggcctggtggagtcacggtactggtcggctgtgacctcccacaccgcatattggagcagtctggatgtggccctatttctactgacttttatgtataaacacgagcatgatgatgatgccaagcccaatctcgaccccatctag

SEQ ID NO: 15941 - DNA, 2316 bp, synthetic construct
  source 1..2316: mol_type = other DNA; note = Synthetic coding sequence
atgaactaccccggtagaggctcgcccagatcccctgagcacaacggtagggggggagggggtggcgcatgggagctagggtctgatgccagacccgcattcgggggcggagtttgttgcttcgaacatttaccgggtggggaccccgatgacggagacgtgcccttggctttgctccggggagagcctggactccacctagcaccaggcaccgatgaccacaaccatcatctcgctctcgatccctgtctcagcgatgaaaactacgacttttcatcagccgaaagcggctccagccttcggtactattccgaaggagaatcaggcggcggtggttcatctctcagtttgcatccacctcagcagccacctctggtgccaactaacagtggagggggcctctatgaagtagacgtaacgcagggagagtgctaccccgtgtattggaaccaggcagataaaatccctgtgatgagagggcagtggttcatcgatgggacttggcagccattagaagaggaggaatctaacttaatcgagcaggaacatttgaattgttttcgaggacagcagatgcaagaaaacttcgatattgaagtctcgaaatccatcgatgggaaggatgccgtccatagttttaaactgtccaggaaccatgtcgattggcactcagtcgatgaagtgtacctctatagcgacgccacgacttccaaaattgcaagaacagttacccagaagttaggctttagtaaagcatcatcgagcggaacacgtctccataggggatatgtagaagaagctaccttggaagacaagccaagccagaccacccacatcgtgtttgtcgttcatggtattggacagaaaatggatcaggggagaatcatcaagaacacagccatgatgagagaggctgcacgcaagatcgaggaaaggcattttagtaatcatgctacacatgtcgagttccttcccgtggagtggcgctcaaagttaacccttgacggggacactgtagatagtataaccccagataaggtgcgcgggctacgcgacatgctgaactcttccgcgatggatattatgtactatacttcaccactttatcgagacgaactcgtgaagggcctgcagcaggaacttaatagactctactcattgttttgttccaggaatcctgactttgaagagaagggaggcaaggtctctatcgtttctcacagcttggggtgcgtaattacatatgatattatgaccggatggaaccccgtgcggttatacgagcaattgctgcaaaaggaagaggagcttcccgacgagcggtggatgagttacgaggagcgccatttactagacgagctgtatatcacaaagagaagactgaaagagatcgaggagagactgcacggtctgaaagcatcgtcaatgacgcagacccccgctttgaaatttaaagtcgaaaatttcttctgtatgggctccccccttgctgttttcctcgcattgcgcggcatacggcctggtaacactgggtcgcaggaccacatcttgccaagagagatctgcaataggcttctcaatatcttccacccaaccgaccctgtggcatacaggttagagccactcatcttgaagcattacagcaacatctctccagtacagatccactggtataacaccagcaacccgctaccatacgaacacatgaaaccttcgtttctcaaccctgccaaagaacctaccagtgtcagcgaaaacgagggaattagcacaataccttctccggtgacaagcccagtactgtcccgacgacattacggagaatccataaccaacatcggcaaggcttcgatcctgggggccgccagtataggtaaaggcctggggggtatgctgttttcacgatttggcaggtcttccacaacccagagcagcgagactagcaaagattcaatggaagatgaaaagaagcccgtggcatctcctagtgccactacggtgggtactcagacactcccacacagtagctcagggttcctggactctgcctattttcggctgcaggagtctttttttaacttgccccagctcctcttcccggaaaacgtaatgcagaataaggacaatgctctcgtggaactggatcatagaattgattttgaactgcgggagggtctcgtcgaaagccgctactggtccgcagttacgtcccacacggcctactggagctccctggacgtagcgttgttcttgttaacctttatgtacaagcacgagcacgacgatgatgcgaaaccaaatctggaccctatttag

SEQ ID NO: 15942 - DNA, 1179 bp, synthetic construct
  source 1..1179: mol_type = other DNA; note = Synthetic coding sequence
atgggcacgacatgcctccacctgggcaccctagagcagtcactcgtctttgagaacaaagtcaactcagagaaagtcaaattgtccttgcgaaattttccccacaatgattatgaagacgtgtttgaagaaccaagcgaatcgggatcggatccaagcatgtggaccgcacgagggccatttagaagagacaggtggtccagtgaggacgaggaagccgctggaccgagccaagccctgagtcccttactgtctgacaccaggaaaatcgtgagcgagggggagctcgaccaacttgcgcaaatcaggccgctgatattcaacttccatgagcagaccgctattaaggactgccttaagatcctcgaggagaaaaccgccgcatacgatattatgcaagagttcatggccttagagttgaaaaacctccctggggaatttaatagtggcaaccagcccagcaatagagagaagaaccgctaccgtgacattttgccatacgatagcacccgcgtgccactgggaaagagtaaagattacataaacgcatcctacatacgcattgttaattgtggtgaggaatatttttacatcgcaacacagggccccctgcttagcacaatcgatgatttctggcagatggtgctcgagaataactccaatgtaattgccatgatcacacgagagatagaaggtggtatcatcaagtgttatcactactggccgatcagccttaaaaagccactagaactgaagcactttcgcgtgtttttggaaaactatcagatactgcagtattttattatccgcatgtttcaggtggtggaaaagagtaccggcacttctcactcagtgaaacaactgcagttcacgaagtggcccgatcatgggacacccgcgagcgcggactcctttatcaagtacattcggtacgctcgcaagtcccatttgacaggacccatggtggtccactgtagcgccggaatcggccgtaccggagtcttcctgtgcgttgacgtggtgttttgtgcgatagtgaaaaattgtagctttaatattatggatatagtggcccagatgagagaacagaggtctggaatggtgcagactaaagagcagtatcacttctgttacgatatcgtcctggaagtgctgaggaaattgctgacattggattag

SEQ ID NO: 15943 - DNA, 621 bp, synthetic construct
  source 1..621: mol_type = other DNA; note = Synthetic coding sequence
atgtcaagccctagggattttcgcgcggaacccgtgaacgattatgaaggcaatgactccgaagccgaggatttaaatttccgcgagacactccccagctccagtcaggagaatacaccacgaagcaaggtgttcgaaaataaagttaacagtgagaaggtgaagttgagtctccgtaatttcccccacaatgactacgaggatgttttcgaagagcctagcgaatctgggagcgaccctagcatgtggacagctcgcggtccatttcgcagggataggtggtcgagcgaggatgaagaggcggctggcccctctcaagcactgtcaccgttgctgtcagataccaggaagatcgtcagcgagggcgaactggaccagctagctcagattagaccacttatattcaacttccacgagcaaactgctatcaaggactgcctgaagatcctggaggaaaaaactgccgcctatgacatcatgcaggagtttatgttcaacataatggacatagttgcgcagatgagagagcagagatctggaatggtacagaccaaagagcaatatcatttctgctatgacatcgtgctggaggtgctgaggaagctcttgacactggactag

SEQ ID NO: 15944 - DNA, 438 bp, synthetic construct
  source 1..438: mol_type = other DNA; note = Synthetic coding sequence
atgtggaccgcccggggaccctttcgccgcgacaggtggagctcggaagacgaggaggccgctggaccaagccaggccttgtctcctctcctcagtgatacacggaagatcgtcagtgagggcgagctggaccagttagcccagattaggcccctgatctttaattttcacgagcagacagctatcaaagattgtctgaagattcttgaagaaaagaccgccgcctacgatataatgcaggaattcatggcccttgagctaaaaaatctaccgggcgaattcaactctgggaaccagccatccaatcgcgagaaaaatagatatcgggacatcctgcccttccagcatcacggctattccggacctaacgaacgcactaccttctggcacgggagcaatgaaggggctgtttccctccttctgaggtattgcgcgtag

SEQ ID NO: 15945 - DNA, 1020 bp, synthetic construct
  source 1..1020: mol_type = other DNA; note = Synthetic coding sequence
atgtggacagcccggggaccattcagacgcgatcgttggagttcagaggacgaagaggctgcgggcccttcccaggcactgagcccgctgctctccgatacccgcaagatcgtgtcagagggggagctggaccagctggcgcagattcgcccactgatctttaatttccacgagcagacagcaatcaaagattgtttaaaaattctggaggagaagacagccgcatacgacattatgcaggagttcatggctctggagcttaagaatctcccaggcgagtttaacagcggtaatcaaccttctaaccgcgagaaaaataggtacagagacattttaccttacgatagcactcgcgtacctttgggcaaaagcaaggattacattaatgcttcatacataaggatagtaaactgtggcgaagaatatttttatattgcgactcaggggcccctcctatccaccatagatgacttctggcagatggtcctggaaaacaattctaatgtgatcgccatgatcaccagggaaattgaggggggcataatcaagtgctaccactactggcctatcagtctgaagaagcctctggagctgaagcacttcagagtgtttctggagaactaccagatcctgcaatactttattattagaatgttccaagtggtggagaagagcactggcacctctcattccgtgaaacaactgcagtttactaagtggcctgatcatggcacaccagcctccgcggactctttcatcaaatatattcgctacgccagaaagagccatctgactggacccatggtggtgcattgttccgcaggtatcggcagaaccggagtgtttctgtgtgtggacgtggtattttgcgcaatcgttaaaaactgcagtttcaacattatggacatagtcgcacagatgagagagcagcgctccggtatggtccagaccaaagaacagtatcacttctgctacgacatcgttctggaggtcctcaggaaactcctgaccttggattag

SEQ ID NO: 15946 - DNA, 1047 bp, synthetic construct
  source 1..1047: mol_type = other DNA; note = Synthetic coding sequence
atgcaattcggcgagttgctggccgctgttcggaaggcgcaagcaaatgtgatgctgtttctcgaggaaaaagagcaggcagccttgagtcaggccaacggcattaaagctcacctggagtaccgctcagccgaaatggaaaagagcaagcaggaactggaaaccatggccgccatcagcaataccgttcaattcttggaagagtactgtaaattcaaaaacactgaggatatcacattcccatcagtgtacatcggactgaaagataagctgtcaggtattcgcaaggtaattacagaatccaccgtgcaccttattcagctgctcgaaaactacaagaaaaagctgcaggagttctcaaaggaagaagaatatgatatcagaacccaggtatctgccattgttcaacgtaaatactggaccagtaagccagagccctctacacgcgagcagttcttacaatatgtgcatgatattactttcgaccctgatactgctcacaagtacttacggctgcaagaagagaacagaaaagtgactaacacaaccccctgggagcatccctaccctgacctgcctagcagattcctgcactggaggcaggttctatcacagcagtcactctatctccatcggtactactttgaggtcgaaatctttggtgcagggacctacgttgggctaacatgtaaaggcatcgatcaaaagggcgaagaacggagttcatgcatcagcggcaataatttttcttggagcctacagtggaacggcaaagagttcaccgcctggtactcagatatggaaactccgctgaaggcgggaccgttctggcgcctgggggtatacattgacttccctgggggaattctctccttttatggggttgaatacgactcaatgaccctggtgcataaattcgcctgcaagttcagcgaaccagtctacgcagcattttggctctccaagaaggagaatgccatccgcatagtggacctcggggaggagccagaaaagccggcaccgagtctggtggggacggccccctag

SEQ ID NO: 15947 - DNA, 1047 bp, synthetic construct
  source 1..1047: mol_type = other DNA; note = Synthetic coding sequence
atgcagttcggtgagctgctcgcagcggttagaaaggcacaggccaacgtcatgttgtttctggaagagaaggaacaggctgcactgtcccaggccaacggcataaaggcccacctggagtatcggagtgctgagatggaaaagagcaagcaagaactggagaccatggcagctataagtaatactgttcaatttctcgaagagtactgcaaattcaagaataccgaagatattactttcccttctgtctatattgggcttaaagataaactgagcggaattcggaaggtgattaccgagagcactgtccatctgattcaactgttagaaaactataaaaaaaagctgcaggagttcagtaaggaagaggaatatgatatccgcacacaggtttcggcaatagtgcagagaaaatactggacctccaagcccgaaccatccacacgagagcagtttttacagtacgtgcatgacatcacctttgacccagacactgcccacaaataccttcggctgcaggaagagaacagaaaggtaaccaatacaactccatgggagcatccctatccagacctaccttcacgcttcctgcattggcgtcaggttctgagtcaacagtctctgtacctgcacagatactatttcgaagtggaaatatttggggctgggacttacgtaggtctgacatgtaaggggatcgatcagaaaggtgaggaaagatcctcttgcatatccggtaataacttctcttggtcacttcaatggaacggtaaagaattcaccgcctggtattctgacatggaaacccccttgaaagcaggtccattttggagactcggggtttatatcgattttcctggcgggattctgtccttttacggcgtggagtacgatagcatgactctggtgcataaatttgcttgtaagtttagcgagcccgtgtatgccgctttctggttgagcaagaaagagaacgcaattcggatcgtcgatctgggagaggagcccgagaagcccgccccctcactggtgggaacagccccttag

SEQ ID NO: 15948 - DNA, 687 bp, synthetic construct
  source 1..687: mol_type = other DNA; note = Synthetic coding sequence
atgatagatgactctaccagggtccctctcggaaagtccaaggactatatcaacgcaagctatatcagaatcgttaattgcggcgaagagtacttctacatcgcaactcagggtccactattgtccacgattgacgatttttggcagatggtgcttgagaacaatagtaatgtgattgcaatgatcacccgcgagattgaagggggaattattaaatgctaccactattggccgataagccttaagaagcctttggagttgaagcactttagggtgtttcttgagaactatcagattctccagtacttcatcatccgcatgttccaagttgttgagaaatccacgggaacaagtcactctgtgaaacagctacaattcactaaatggcctgaccatggtaccccagccagcgcggatagcttcatcaagtatatccgctacgcacggaaaagtcatctgaccggaccaatggtggtccactgcagcgctgggatcgggaggaccggcgtcttcctgtgtgtggatgttgtattctgcgccattgtaaagaactgcagctttaatattatggatatcgtcgctcagatgagagagcagaggtctggtatggtacagaccaaggagcagtaccatttttgttacgatattgtcttggaggtgttgcgcaaactgctcacgcttgattag

SEQ ID NO: 15949 - DNA, 1449 bp, synthetic construct
  source 1..1449: mol_type = other DNA; note = Synthetic coding sequence
atggtaatggagaagccaagccctctcctggtcggccgtgagttcgtgagacagtactatactttgttaaacaaagcacctgaatacctgcaccggttttacggcaggaattcttcatatgtgcacggaggggtggacgcgagcgggaaaccacaggaagctgtgtatggccagaacgatatccatcataaggttttgtccctaaatttcagtgagtgccacaccaagatccgtcatgtggacgctcacgccacactgtccgatggcgttgttgttcaggtcatgggtctcctgtccaatagtggccagccagagcgcaagtttatgcagacatttgtgttggcaccagagggctccgtcccgaataaattctacgttcacaacgatatgttccgctacgaagatgaggtgttcggggacagtgagcccgagctcgatgaagagtccgaagatgaggttgaggaggaacaggaagaacgacagccctctcccgaacctgttcaagaaaacgctaacagcggttactatgaggcccacccagttaccaatggcatcgaggagcccctcgaggagtcttcccacgagcccgagcctgagccagagtctgagaccaaaaccgaagagttgaaaccacaggtcgaagaaaaaaacttggaagagctcgaagaaaagagcactacacccccgcccgccgaacctgtaagccttccacaggaaccaccaaaggctttcagttgggcgagcgtcacctctaaaaatctcccgccttcgggaaccgtaagcagctcggggatcccgccgcatgtgaaagcgcccgtcagtcagccacgagtcgaagcaaagccagaagtgcagtcacagcctcctcgagtgcgcgagcagcggccaagggaaagaccagggttccctccccgtggacccagaccgggcagaggcgacatggagcagaatgatagtgacaatagaaggatcattcggtaccccgattcacaccagctcttcgtagggaatctgccgcacgatattgacgaaaacgagctgaaagagttttttatgtccttcggaaacgtggtggagctgaggattaataccaaaggagtaggtgggaagctccccaacttcggttttgtcgtgttcgacgattcagagcctgtacagcggatactgatcgccaaacccattatgttccggggagaagtacggttaaacgttgaggagaaaaaaactcgcgctgctagagaacgggaaaccaggggcggcggcgatgaccgccgggacatccgacgtaatgaccgaggcccaggcgggccccgcggaattgtgggaggagggatgatgcgggatcgggacggcagaggccccccgcctcggggagggatggctcaaaagctgggaagtggacgaggaaccggtcagatggaaggacgtttcaccgggcaacgcaggtag

SEQ ID NO: 15950 - DNA, 1020 bp, synthetic construct
  source 1..1020: mol_type = other DNA; note = Synthetic coding sequence
atgtggactgcacgcgggcctttcagacgcgatagatggtcttctgaggatgaggaagctgccggaccgagccaagcactgtcaccactgctcagtgacactagaaagatcgtcagtgaaggggagttggaccagctggcccagatccgacccttaatcttcaactttcatgagcaaacggccattaaggactgcctaaagatcctcgaagaaaagacggccgcctacgacattatgcaggagtttatggcactggagcttaaaaatctcccaggggaattcaacagtggtaatcagcccagtaatcgtgagaaaaatcggtacagagacattttgccgtacgattccacaagagtccctctgggaaaatccaaggattatattaatgcctcttacattcgcatcgtgaactgcggtgaagaatacttctatattgctacccaggggcctctcttgagcacaatcgacgatttctggcagatggttctggaaaataactcgaacgtgattgcgatgattactagggagattgagggaggcattattaagtgttaccactattggccgatcagcctgaagaagcctctggagctcaagcattttcgcgtgttcctagagaactatcagattctacagtacttcattatccggatgttccaggtggttgagaagtccaccggaacctcacactcagttaaacaacttcagtttacgaaatggcccgatcacggcacgcctgccagcgcagatagttttataaagtatatccgttacgctcgaaaatcacacctgacaggccccatggtggttcattgctccgctggcatcggcagaaccggcgtgttcctttgcgttgacgtcgttttctgtgcaatagtgaaaaactgttccttcaatataatggacattgtcgcccagatgagagagcaacgtagcggtatggtgcagactaaggaacaataccatttctgctacgacattgtgctggaggttctgcgcaaattactaacactggactag

SEQ ID NO: 15951 - DNA, 621 bp, synthetic construct
  source 1..621: mol_type = other DNA; note = Synthetic coding sequence
atgtcttcgcccagagacttccgcgccgagcccgttaacgattatgaggggaacgattccgaggccgaggatctgaatttcagggaaacattaccctcttcatcccaggagaatacgcctaggtctaaggtgtttgagaacaaggttaacagcgaaaaagtcaaactttcactgcgtaactttccacacaatgactacgaggatgtgttcgaggagccctctgagtctggaagcgaccccagtatgtggactgctcgcggccccttccgacgtgaccgatggtcttctgaagatgaggaggcggccggtcctagccaggctctgtcacccctgctttcagatacccgcaagatagtatctgagggcgagctcgatcagctggcccagattcgacctctgattttcaatttccatgagcagacggccatcaaagattgcctgaaaatcctggaggagaaaacagcggcgtacgatattatgcaggagtttatgttcaacatcatggacattgtggctcagatgcgcgaacagcgctccggcatggtacagacaaaggaacaataccacttctgttacgacatcgtcctggaggtgcttagaaagttactgacactcgattag

SEQ ID NO: 15952 - DNA, 438 bp, synthetic construct
  source 1..438: mol_type = other DNA; note = Synthetic coding sequence
atgtggactgcacgaggtccatttagacgggaccgatggtcctccgaggacgaagaagccgcaggcccttcccaagctctctcacctctactttccgacactcgcaagatcgttagtgaaggggagttagatcagctggcacagataagacctctgattttcaattttcacgaacagaccgccattaaggactgcctgaagatactcgaggagaaaaccgccgcctacgacatcatgcaggagtttatggccttggaacttaagaaccttcctggcgaattcaattctggtaaccaaccttccaacagagagaagaaccgttatcgagacatattgccttttcagcaccacggctactctggtccaaatgagaggacaactttctggcacgggagtaatgaaggggccgtgtcactgctgctgcggtactgcgcttag

SEQ ID NO: 15953 - DNA, 687 bp, synthetic construct
  source 1..687: mol_type = other DNA; note = Synthetic coding sequence
atgatcgatgactcaactcgggtacccctaggaaaatcaaaagattatatcaatgcttcttatattcgaatcgtgaactgcggtgaggagtacttttacatcgctacccagggacccttgctcagcacaatcgatgatttttggcaaatggtgctcgaaaataattccaatgtcatcgctatgatcacgagagaaatcgaaggcggaataattaagtgttatcattactggcctattagtttgaagaaacccctggagctgaaacatttcagagtgttccttgaaaattaccagatcctccagtatttcattattagaatgttccaagtggtggagaaatctactggcacatcgcactccgtgaaacagctccagtttaccaaatggccagaccatggcacacctgcttctgcagattccttcataaagtatatcagatatgcccgcaagtcacacctcaccgggcctatggtggttcattgctcagccggtatcggcagaactggtgtattcctctgcgttgatgtcgtgttttgtgctatcgtaaaaaactgttcattcaatattatggacatcgtcgctcaaatgagggaacaacgatccggaatggttcagaccaaggagcagtatcacttttgctatgatatcgtactagaagtcctcaggaaactgcttaccttggattag

SEQ ID NO: 15954 - DNA, 2802 bp, synthetic construct
  source 1..2802: mol_type = other DNA; note = Synthetic coding sequence
atgttttggaaatttgacctcaacaccacttcgcatgtggataagcttctcgataaagagcatgtgaccctgcaggagctgatggacgaagacgacatcttgcaggagtgtaaggcccaaaatcagaagctgcttgactttctgtgccgacagcagtgcatggaagaactggtgtcccttataacccaggacccaccacttgacatggaggaaaaagtcaggtttaaataccctaacacagcctgcgagcttctgacatgtgatgtgccccagattagcgatcgactggggggagacgagagcctgctctccctgctgtacgattttctggaccacgagcctccgcttaatcccttactagctagtttctttagtaagacaatcggtaatttaatagctcgaaagacagaacaagtaattacgttcctaaagaaaaaggataagtttataagtcttgtgttaaagcacatcgggacttctgccctgatggatcttttgctcaggttggtctcctgtgtcgagcccgccggcctgcggcaggacgtgctacactggctgaacgaggagaaggtcattcaacgtctagtggagctgatccatccgtcacaagacgaagatcgtcagtccaacgcgtctcagacactgtgtgatatcgtgcggttgggcagagaccaaggcagccagttacaggaggccctcgagcctgaccctcttcttactgctctcgagagccgccaagactgcgtggagcaattactaaagaatatgttcgacggagacaggacagagtcctgtctggtgtctgggactcaggtgcttttgactctcttagaaactcggagagtaggtactgagggactggtcgatagcttctcccaaggactggagcgctcttatgcggtgtcatcctcagtgttgcatggcattgaacccagactcaaagattttcatcagctcctgctcaaccctcccaagaagaaggccattctgacaacaattggggtcctggaagaaccattaggaaacgcgcgcctgcatggcgcccgcctaatggctgccctcttacacactaacaccccatctatcaaccaggagttgtgcaggctgaacacaatggacctgctgttggatctgttctttaagtatacatggaataattttctgcacttccaggtcgaactgtgcattgcagcaatcttgtcacacgctgctagggaagaacggaccgaggctagcggcagcgaatctagagtggagcctccacacgagaatggtaaccgctctctggaaactccacagcctgccgcgagtctccccgacaatacaatggttactcacctctttcagaaatgctgtctggtccagcggatcctggaggcttgggaggccaatgatcatacccaggctgcaggagggatgagacgaggcaatatggggcacctgactcggatcgctaatgctgtcgtgcagaatcttgagaggggcccagtgcagacacacatctccgaggttattagaggcctcccagccgattgtcgaggccgatgggagagttttgtggaggaaactcttactgagaccaatcgacggaacacagtggacctggccttcagcgattatcagatacagcaaatgacagcgaatttcgtcgaccaattcgggtttaacgacgaagagtttgcagatcaagacgataatatcaacgccccattcgaccggattgctgagattaattttaacattgacgctgacgaagactctccaagtgccgctctgtttgaagcttgctgtagcgaccgcatccagccctttgacgatgacgaggatgaggatatatgggaggacagcgacaccaggtgcgcagcgagggtgatggcccgcccacgatttggagcaccgcacgcctcagagtcttgcagtaaaaacggcccagaacgtggtggccaggacggaaaggcctcactagaagcccatcgcgacgctccaggtgcgggcgcgccgcctgccccgggaaagaaagaagctccccccgtggaaggtgactctgagggcgctatgtggacagccgtattcgacgagccagctaatagcactcccaccgcgcctggagtggtgcgcgacgtgggctcgagtgtatgggcagcgggcacgtcggccccagaagagaagggctgggcaaaatttacagacttccagccattctgttgctcggaatcgggcccccgttgctcttcgcctgtggacacggaatgcagccacgcagaaggcagtaggtcacagggacctgagaaagcattcagccctgccagcccatgtgcatggaacgtttgtgtgacccgcaaggcgccactcctggcctccgactcgagctcgtccggagggtctcactccgaagacggggaccagaaggcggcctctgccatggacgctgtgtctcggggtccaggccgggaagctccacctcttccgactgtagcgcgcaccgaagaggctgttggcagggttggctgtgcggactcaaggttgctgtcacccgcctgccccgcccctaaagaggtgaccgcggcccccgcagttgctgtgccccctgaggccactgtggcaataacaacagccctctcaaaggctggacccgcgataccaactcccgccgtgtcatcagccttagccgtggccgtgccccttggtcctattatggcagttactgccgcgcctgccatggtcgcaaccctcggaacggttactaaggatggcaagacggatgcacctcccgagggcgccgcactgaatggcccggtgtag

SEQ ID NO: 15955 - DNA, 2799 bp, synthetic construct
  source 1..2799: mol_type = other DNA; note = Synthetic coding sequence
atgttctggaagttcgatctcaatactaccagccacgtggataaactcctggacaaagagcacgtgacacttcaggagctcatggatgaggacgatatactgcaggagtgcaaggcccaaaaccagaagctcctggacttcctgtgtcgacagcaatgtatggaggagctcgtcagtttgattacccaggaccctcctcttgatatggaggagaaggtccgcttcaagtaccccaacaccgcatgcgaactcctgacatgcgatgtgccgcagatctctgatcgactcggcggagatgaatccctcctcagcctgttatacgactttctggatcatgagccaccactgaaccctttacttgcatctttcttttctaagacaattggcaacctgatcgccagaaagaccgagcaggtgatcacattcttgaagaaaaaggataagtttataagcctcgtcctcaaacacatcggtacctcagccctgatggatcttctgctgcgcctcgtgtcttgtgtggagccagccgggttgcgtcaggatgtgttgcattggttgaacgaagagaaagtgatccagagattggtggagttaattcaccctagccaggacgaggaccggcagagcaatgccagtcagaccctgtgcgatatcgttcgcctgggtagagaccagggcagccaattacaagaggccttggaacctgaccctttgctcaccgctctagagtctcaggactgcgtcgaacaactccttaagaatatgttcgatggcgacaggacggaaagctgcctcgtttcagggacccaggtgcttctaacgctgctggagacgaggcgggtgggcactgaggggctagtagactcattctcccaggggctggaacgctcatatgctgtcagctctagcgtgctccatggcattgagccaaggcttaaggactttcaccaactcctcctcaatcctccaaagaaaaaggccattttgaccactattggcgttctggaagagcctcttggcaacgccagacttcacggcgccaggctgatggccgccctcctgcatactaacactccaagcatcaatcaggagctgtgccgtctgaacacaatggatctgctcttagatctgttttttaaatacacctggaacaacttcctacatttccaggtggagttatgtattgctgctattctgagccacgccgcacgcgaagagcgaacagaagcgtctggcagtgaatctagagtggaacctcctcatgagaacggaaataggtcactcgaaaccccacaacctgcagcctctctgccagataacacaatggttacacacctatttcagaagtgctgcctcgtgcaaagaatattagaggcctgggaggcgaatgatcatacccaggctgccggcggaatgcggcgtggaaacatgggacatcttacccgcattgcaaatgcagttgtgcaaaatttagagcggggaccagttcagacccacatcagtgaagtcattagaggccttcccgccgactgtcggggcaggtgggaaagctttgtggaggaaactctcactgagacaaatagacgaaacactgtagatctagctttttccgattaccaaatccagcagatgacagcgaattttgttgaccaattcggatttaatgatgaggaattcgctgatcaggatgacaacattaacgctccgttcgacaggattgccgagatcaactttaatatcgatgccgacgaagactctccctcagctgcgcttttcgaagcttgttgctccgaccggattcagcccttcgacgatgacgaggacgaggacatctgggaggactctgatacaagatgcgcagccagagtgatggcccgacccagatttggggctcctcacgcgagtgaaagctgttccaagaatggacccgagcggggcggccaggacggcaaggcttcactggaagcacatcgcgatgcacctggtgcaggcgctcctccagctcccggcaagaaagaagcacctccagtcgagggagatagtgagggtgcgatgtggacagccgtatttgatgaacctgctaacagcactcccacggcacccggggttgtccgggacgttggaagcagcgtctgggccgccggcactagcgcccccgaagaaaaaggctgggctaagtttacagattttcaaccattctgttgttcggaatccgggcccaggtgcagttcacctgttgacaccgagtgctcgcatgctgaaggcagccgctcccagggccccgagaaggccttcagccctgcgagcccctgtgcatggaacgtgtgtgttaccaggaaggcacctctgcttgcgagtgatagctcctccagcgggggctcccattccgaggatggcgaccagaaggcagctagtgctatggacgcagtgagccgcggcccgggccgcgaggctccgcctctaccaactgtggcaaggactgaggaggccgtcggtagagtgggctgtgctgactccaggctgctttcccctgcatgcccggccccaaaggaggtgacggcggctcctgccgtcgcagttcccccagaggctacggtcgccattaccactgccctgagcaaggctggtcccgctattcctactcctgctgttagtagtgccctggctgtggcagtccctctcggaccaatcatggcagttactgcagccccagcgatggtggcaactctggggactgtaactaaagatggtaagacggacgcccctcccgaaggcgcggctctgaacggacccgtgtag

SEQ ID NO: 15956 - DNA, 789 bp, synthetic construct
  source 1..789: mol_type = other DNA; note = Synthetic coding sequence
atggcacttagcctggggtggaaggcacatcggaaccattgcggcctgctattgcaggcgctgcggtcatccggattgctgctattcccatgcggccaatgtccgtggcgcggagccggctccttcctagaccccgaaattaaagcctttctcgaggagaataccgaagtgacttcttcaggtagtcttactcccgaaattcagctccggttgctgaccccccgatgcaaattttggtgggaaagggctgacctgtggccacactcagacccctactgggccatttattggcccggcggtcaggctctcagcagatatctgctggacaaccccgatgtggtccgcgggaagtctgtgttggacttaggctctgggtgcggcgcgaccgctattgccgccaagatgagcggtgcttcccgcatccttgccaatgatattgaccctatagccggaatggctatcactctcaactgtgagcttaaccggttaaacccctttccaatccttatccagaacattcttaacctcgagcaggataaatgggacctagtggtgctgggcgacatgttttacgacgaagatttggctgacagcctgcatcagtggttgaagaagtgcttttggacatatcggacaagggtgttgatcggcgaccccgggaggcctcagttctccggccactccatccagcatcacctacataaggttgtcgaatatagtctcctagagtccactcgccaggagaattccggcttgacgacgtcgacggtatggggcttccaaccttag

SEQ ID NO: 15957 - DNA, 2718 bp, synthetic construct
  source 1..2718: mol_type = other DNA; note = Synthetic coding sequence
atggaggtacaggttagtcaggccagcctgggctttgaactaacctccgtggagaagtccttgcgcgagtggtccaggttgtctagggaagtgatagcatggttgtgcccttcctcgccgaattttatccttaacttccccccccctccatctgcttccagcgtgtctatggtgcagctgtttagtagcccgttcggctatcagagtccgagcggccatagtgaggaggagcgggagggaaacatgaagagcgcaaagccccaggtgaatcacagccaacatggcgaaagccaacgggcattgagcccactccagagcaccctatcatcagcagccagtccctctcaagcctacgagacctacattgagaatggattgatctgcttgaaacataagattagaaacatcgagaagaagaagctgaagctggaagattacaaagataggctgaaaagtggcgagcacctgaacccagatcaactggaagccgttgagaagtacgaagaagtgcttcataacctggaatttgctaaggagctccagaagacgttctctggtttgagtctggacctcctgaaggcccagaagaaagcccagcggagagaacacatgctcaaactggaagcggaaaaaaaaaaactccggacgatcttacaagtgcagtacgtcttgcagaatctgacccaggagcatgtgcagaaggactttaaaggagggttgaacggcgccgtctatttacccagtaaagaactggactacttgataaagttttccaagcttacatgccccgagaggaacgagtccctctccgtagaggaccaaatggagcaatctagcttgtatttttgggatttgctggagggctctgagaaggcagtggtgggtacaacctacaaacatcttaaagatctgctgtccaagcttctcaactcagggtacttcgagagtatccctgttcctaagaacgctaaggagaaggaggtccccttggaagaagagatgctgatccagagtgaaaagaagacacaattgagtaagacggaaagcgttaaggagagtgagtctctcatggaatttgcacagcctgagattcagccccaggagttcctgaatcgtaggtacatgaccgaggttgattatagtaacaaacagggcgaggagcagccatgggaggcagactatgctaggaagcctaacctgcccaaacgctgggatatgctgaccgagccagacggacaggaaaaaaagcaggagagttttaagagctgggaagcgagtgggaagcatcaagaggtgtctaaaccagcagtgtccttggaacagcgcaaacaggatacttccaagctgcgctctacactgcccgaagaacaaaaaaaacaggaaattagcaagtctaagcctagccccagtcagtggaagcaggacactccaaagtctaaggcaggatacgtgcaggaagagcagaaaaaacaggagaccccaaagctttggccggtccaactgcagaaggaacaggatcccaagaagcagaccccgaagtcatggaccccttcaatgcagagtgagcagaataccaccaaaagttggaccacccccatgtgtgaggaacaagattctaaacagcctgagacacccaagagttgggaaaacaatgttgagtcacaaaagcatagtctgacttctcaatcccagatctccccaaagtcttggggtgtggcaaccgcatctctcatccctaatgatcagctgctgccccggaagctgaataccgaacctaaagatgtgccgaaacccgtccatcagccggtgggctcctcctcgactctgcccaaggatcccgttctgagaaaagaaaagctgcaggatctcatgacgcagatccagggaacttgcaatttcatgcaggaatcggttcttgactttgacaagccatcaagtgccattcctacatcacagccacctagcgccacccccggctcccctgtagccagcaaagaacagaatctcagctcacagtccgacttcctccaggaaccactccaagccgccatcccacctggcaaacaacccagttctctggcctcccccaatccccccatggccaaggggtcagagcagggatttcaatcacctccagcatcttctagctccgtgaccattaataccgcacctttccaggcaatgcagacagtgttcaacgtgaacgcccctctccctccccgtaaggaacaagaaatcaaagagtccccctactctcctggttacaatcagtcttttactaccgcctccacacagacccccccacaatgtcaactccccagcattcacgtcgaacaaacagttcactcacaggaaaccgcacaaaccaacgttttccccagacctactcagccgtttgtgaactctagaggaagtgttaggggctgtactcggggaggacgcctgataactaatagttacagatcccctggcgggtataagggatttgatacctacagaggactccctagcatctctaacggcaactattcacaactgcagttccaagcccgcgaatatagcggcgctccttattcgcagagggataactttcagcagtgttacaaacgcggagggacttccggaggcccaagggctaattcccgcgcaaactgttttattatgagaaacagcctcttactcatcaaacagcagggcggcgtgatcctgcttcgatag

SEQ ID NO: 15958 - DNA, 1107 bp, synthetic construct
  source 1..1107: mol_type = other DNA; note = Synthetic coding sequence
atgagcttgttcggtacaacatctggcttcggcactagtggcacctctatgttcggttccgctactaccgacaaccataatcccatgaaggacatcgaggtaactagctccccagatgacagtataggctgcttgtcattcagtccgcctacgctccccgggaattttctgatcgctggctcctgggcaaatgacgtacgctgctgggaagtacaggactcggggcaaaccattcctaaagcacagcaaatgcacactggtccagtactggatgtgtgctggtccgacgatggaagcaaagtgttcacagctagctgcgataaaaccgccaagatgtgggaccttagctctaatcaggcaatccaaatcgctcagcacgacgcgccagtcaaaactattcactggattaaagctccaaactattcttgcgttatgacaggtagttgggataagacgttgaagttttgggacacgaggtctagtaacccaatgatggtcctgcaactgcccgagagatgttactgtgccgatgtcatttatcccatggccgtcgtggcgacagcagagcgtggactgattgtgtatcaactggaaaatcagcccagcgaatttcggcggatcgagtctcccctgaaacatcagcatcgatgtgtggcaatttttaaggacaaacagaataagccaaccggttttgctctcgggagcattgagggacgcgtggctattcattatattaatccacccaatcccgcgaaggataacttcacttttaagtgtcatagatcaaacggcaccaacacaagtgctccccaggacatttatgccgtcaacggcatcgcgtttcaccctgttcacgggactctggcgaccgttggtagtgacggacgcttcagtttttgggataaagatgccagaaccaaattgaaaacctctgagcaactagatcagcctatcagcgcatgctgttttaatcataacggtaatatatttgcatacgctagcagttatgattggtccaaaggccatgagttctataaccctcaaaaaaagaattatatttttctcagaaacgccgctgaggagctgaagccaaggaacaaaaagtag

SEQ ID NO: 15959 - DNA, 1107 bp, synthetic construct
  source 1..1107: mol_type = other DNA; note = Synthetic coding sequence
atgtccctgtttgggaccaccagcgggttcggtacctccggcacctctatgtttggctcagctacaactgataaccacaaccctatgaaggacatcgaggtcacatcctcacccgacgacagtattggttgtctatcattcagccctcctactctgcccggtaactttttaattgccggctcttgggccaacgatgtgcgctgctgggaggtgcaggattccggccaaacgattcctaaagctcagcaaatgcacacaggtccagttcttgacgtgtgttggtctgatgacgggagcaaggtgtttaccgcttcatgtgacaagaccgccaagatgtgggatttatctagcaatcaggccatccagattgctcaacacgacgcaccggtgaaaactatccactggattaaggcacccaattactcttgtgtcatgaccggtagttgggacaaaaccttaaaattctgggatactagatcaagcaacccgatgatggtacttcagttgcctgaaagatgttattgtgccgatgttatctatccaatggctgtcgtggcaactgccgagcgcggcctgattgtgtatcagcttgagaaccagccaagtgaatttaggagaattgaatccccccttaaacaccaacaccgctgcgtggccatctttaaggacaaacaaaacaaaccgaccggcttcgccctgggctcaatagaggggagagtggctatccattacataaatccaccaaaccccgccaaggataattttacgtttaagtgccacagaagcaatgggactaatacgagtgccccccaagatatatatgccgtgaacggaatcgcttttcaccctgtgcacggcacacttgccacagtgggttctgacggacggttcagcttttgggacaaagacgcgaggaccaaattaaagacttctgaacagttagatcagcccatctctgcctgctgcttcaaccataacgggaatatctttgcatatgcctccagctatgactggagcaaggggcacgaattttacaacccacagaaaaaaaattatatctttctacgaaatgccgctgaggagctgaaacctagaaataaaaagtag

SEQ ID NO: 15960 - DNA, 2745 bp, synthetic construct
  source 1..2745: mol_type = other DNA; note = Synthetic coding sequence
atgtcaagcagtggctacccgccaaaccaaggcgccttctccacagagcagagccgttatccacctcacagtgtacaatacacttttcctaacaccaggcatcagcaggacccggcgtttggggggaagcatgaagccccaagtagtccaatttccggacaaccttgcggggatgaccagaacgcctccccatcaaagttatctaaagaggaattgattcaatctatggatcgagtggaccgtgaaattgccaaagttgagcagcaaattctgaagctcaagaaaaagcagcagcagttggaagaagaggctgcaaaaccacccgagcccgagaagccagtttctccacccccagtggagcagaaacacagatcgattgtccagatcatttatgatgagaatcggaaaaaggccgaagaggcccacaagatttttgagggcttgggccccaaggttgagctgcccctctacaaccagccaagcgacaccaaggtttaccacgagaatatcaaaaccaatcaggtcatgagaaaaaaacttattctcttcttcaagcggaggaatcacgctcggaaacagagggagcagaagatatgtcagcgatacgatcagctgatggaggcatgggagaagaaagtggataggatcgaaaacaaccccagaagaaaggccaaagagtcaaagacgcgcgaatactacgagaagcaattccccgagattaggaaacagagagagcagcaggagaggtttcaacgcgtgggccagcgcggtgctggactctccgctaccattgctcggtctgagcatgagatatctgagatcatcgatggcctttcagagcaggagaacaacgaaaagcagatgagacagctgtccgttattcctccaatgatgtttgacgccgaacagcgaagggtgaagtttataaacatgaacggcctcatggaggatcccatgaaggtgtataaggacagacagttcatgaatgtgtggaccgaccacgaaaaggaaatctttaaggacaagtttatacagcaccctaaaaattttggcctcatcgcctcctacctcgagcgtaagtctgtgccagattgcgtgctctattactacttgacaaagaagaatgaaaactacaaggccttggtcaggcggaattatggaaagagaagaggtcgcaatcaacagattgcgcgtccaagccaggaggaaaaagtggaagaaaaagaggaggataaagcggagaaaacagagaagaaggaggaggagaagaaggatgaggaagagaaagacgagaaagaggacagcaaagagaacacgaaggagaaagacaagatcgatggcaccgcggaggagacagaggaaagagagcaggccacaccacgtgggcggaagaccgccaactcccaaggaaggagaaaaggccgaattacccgttctatgaccaacgaagcagccgccgcaagcgcagcagccgctgcagctaccgaagaaccacccccaccgttgcccccacctccggaaccaattagcaccgagccggtggagaccagtaggtggacagaagaagagatggaagtggctaagaaaggcctggttgaacacggtagaaattgggctgctatagctaagatggtgggaacgaagagcgaggcccaatgtaagaatttctatttcaactacaaacgtcggcataatcttgacaatctgctgcaacagcacaaacagaagacctctaggaaacctcgtgaagagcgggacgtgtcacagtgcgagagcgtggctagcacagtgagtgctcaggaagacgaagacattgaggcgtcgaacgaggaggaaaatcctgaggactcagagggcgcagaaaatagcagcgataccgagtccgctcctagccctagtcccgtcgaagccgtcaaaccgtcagaggattctcccgagaacgccacctcccgggggaatactgaaccagcagtggagcttgaaccgactacagagactgccccatctacttccccaagcctggcggtaccgtctactaagccggcggaggatgagtctgtggagacccaggtcaatgacagcatatcagctgagaccgcagagcagatggacgtggaccaacaggaacactcagctgaagaagggagcgtatgtgacccaccccccgccaccaaggcagattctgttgacgttgaggtcagagtccccgaaaaccacgcttctaaagtggaaggagacaacactaaggagcgcgacttggacagggcctcagagaaggtagaacccagagatgaggacttggtagtggctcagcagatcaacgcacagcgcccagaaccacaaagcgacaatgattcttctgcaacttgcagtgcagacgaggacgtcgacggggagcctgagaggcagcgtatgtttcctatggacagcaagccaagtttactaaaccccacaggaagtatcctggtcagttctccactgaagccaaatccactggacctcccccagttacagcaccgcgccgcggtcatcccaccaatggtaagctgtaccccctgcaacatacccatagggactcctgttagcggatatgcgctttaccaaagacacatcaaagctatgcacgaatccgcgctgttggaggagcagcgtcaacggcaagaacagattgatctggaatgccgatcatccacaagcccatgcgggacctcaaaaagtccaaaccgggaatgggagggcaggtag

SEQ ID NO: 15961 - DNA, 7032 bp, synthetic construct
  source 1..7032: mol_type = other DNA; note = Synthetic coding sequence
atgagtagtagcggatacccacccaaccagggtgccttttctacagagcagtcaaggtaccctccgcattcagtgcagtacacctttcccaatacaagacatcagcaggacccagctttcggtggaaagcatgaggccccttcatctccaatctccggtcagccatgcggcgacgaccagaacgctagcccctctaaattgagtaaagaggaactcattcagagtatggaccgggttgatagggagattgctaaggtcgagcagcaaattctgaaattgaagaagaagcaacaacagctggaggaggaagcagccaagccacccgagcctgagaaacccgtgagcccaccacccgtagagcagaagcatagatcgatcgttcagataatctatgatgaaaaccgcaagaaagcggaggaggcacacaaaatttttgagggtctaggtcctaaagttgagctccccctttataatcagccctctgacacaaaggtatatcacgagaatatcaagacaaatcaggtgatgcgaaagaagctcatcctattcttcaaaagaagaaatcacgcacgaaagcagcgggaacagaaaatttgccagcgctacgaccagttaatggaagcatgggagaaaaaagtggatcgaatagaaaacaaccctcgcagaaaggctaaagagagcaagactcgagaatactacgagaagcagttccctgagattagaaagcagagggaacagcaagaacggtttcagcgcgtgggacaaaggggcgccggtctcagcgcaaccattgcaagatctgaacatgagatctctgagatcatcgacggcctctctgagcaagaaaacaacgagaagcaaatgaggcagttaagcgtgattccccctatgatgtttgacgcggagcagcggagggtaaagttcattaacatgaacgggctaatggaggaccctatgaaggtttacaaagaccgccaatttatgaacgtatggactgatcacgaaaaggaaatttttaaagacaagtttattcaacacccaaagaattttggactgatagccagttatcttgagcgcaaatccgtcccagattgcgtcctctactactacctcacaaaaaagaatgaaaactacaaggcgttggtcagacgaaattacgggaagaggaggggccggaatcagcagattgcaagaccatcacaggaggaaaaggtggaggagaaggaggaagataaagcggagaagactgaaaaaaaagaagaggaaaagaaggacgaggaagagaaggacgagaaggaagacagcaaagaaaacacgaaagaaaaggataagatcgatgggacggccgaagagaccgaagaacgtgaacaggctacacctcgcggcagaaagactgcaaattctcaaggcaggcgcaagggccggattactcgctctatgacaaacgaggctgcagccgcctctgccgctgctgcggccgccactgaggaaccgcccccaccgctgcctccgccacccgagcctattagtacggagcctgttgagacaagcagatggaccgaggaggagatggaagtggctaaaaagggtctggtcgaacacgggaggaactgggccgccattgcgaaaatggtcggaacaaagagcgaagcacagtgcaagaatttctacttcaactacaagagacggcataatctggataatcttctgcaacagcataaacagaaaaccagtcgcaaacctagggaagagagagacgtgtcccagtgcgagagtgttgcatctactgtttccgcccaagaggacgaagacattgaagcatcaaatgaagaagagaacccggaagactccgaaggagccgagaatagttctgacactgagagtgctcctagtccttccccagtggaggccgtgaagccctcagaggattcccccgagaatgcaacctctaggggcaacaccgagcctgccgtcgagctggagcccactacggagactgcccctagcacatccccctcccttgctgttcctagtaccaagcctgcggaagatgaaagtgtggagactcaagtgaatgacagcatcagcgcggagacggctgagcagatggacgtcgaccagcaggagcatagcgccgaggagggctctgtctgtgatccaccaccggccaccaaggctgatagcgtggacgtggaggtccgcgtccctgagaaccacgcctccaaggtggagggcgacaacacaaaggagagggaccttgaccgcgcttcagagaaggtggaacctcgagacgaggatctcgtggtggctcagcaaataaacgctcagaggccagaaccacagagcgacaacgacagctccgctacctgctccgctgacgaggacgtcgatggagaaccagagagacagcgaatgttccccatggatagcaaacctagtttgctgaaccccaccggttcgattctggtgagtagtcccctcaagcctaatcctctggacctgcctcagctgcaacacagggccgctgtgataccaccgatggttagctgcactccatgtaatatccctatcggcacccctgtttctggctatgctctttaccaacggcacatcaaggccatgcacgaaagtgcacttctcgaagaacagcggcagcggcaagaacagatagatctcgagtgcaggtcctcaacatcaccttgtggaacctccaaatccccaaatagagaatgggaggtattgcagccagctccccatcaggtgatcactaaccttccagaaggcgtgcggctgccaaccaccagacccacccggcccccgcccccgctgattcccagctcaaaaaccaccgtggcgtctgagaagccttccttcataatgggcggcagcatctctcagggaacccccggcacctatctgacctcacacaatcaggcgtcatacactcaggagactcctaaaccctccgtcggttcaatttcgttgggcttacctaggcagcaggagtccgccaaatctgctactctaccctatattaagcaggaggagttctccccgcgctcccagaattctcagccggaagggctcttagtgagggcacagcatgaaggcgtggtgcgaggtaccgctggcgccattcaggaagggagcatcacgagaggaacgcccacttctaaaatctctgtggaatcgattcccagtttgcggggctccatcacacagggcacccccgccctgcctcagactggcattccgacagaagcgctggtgaagggcagcattagtcggatgcctatcgaggattcttccccagagaaggggcgagaggaggctgcctctaagggccatgtaatctatgagggtaaaagcggacacatattatcctacgacaatatcaagaatgcacgggaaggaacacgctcaccgcgtactgctcatgagatttccctaaagcgtagttatgagtctgtagaaggcaatattaagcaaggaatgtcgatgcgggagtctccggtgtccgccccactggaaggtttaatttgtagagctctgcctaggggttcacctcattcagacctgaaggagcggaccgttctgagcggatctatcatgcagggcacaccaagggccacaacggaaagcttcgaggacgggcttaaatatcccaaacagattaagagagagtctccgcctatcagagcatttgaaggtgctattacaaagggcaagccctacgatggaataaccactatcaaagaaatgggcaggtccatccatgaaattccccgccaagatattttgacacaggagtccaggaagacaccggaggtggtgcagagtacacggcccatcatcgaaggatccatctcccaagggacccccatcaagtttgataacaactctgggcagtcagctataaagcacaatgtcaaaagtctcattacgggaccttcaaaactgtcccgaggaatgccacccctggagatcgttcccgagaatatcaaagtcgtagagcgaggaaaatacgaagatgtgaaagccggcgaaacagtgcgcagcagacatacctccgtagtgtcatcgggcccaagcgtgctgcgaagtactttacacgaggcaccgaaggcacagttaagccctggaatttacgatgatacgagcgccagacggacacccgtctcctaccaaaatacaatgagtaggggcagtccaatgatgaaccggactagcgacgtcagctccaacaaaagtactaatcacgagagaaaaagcaccctgacccctacacagagggagtcaatcccggccaaatcccctgtgcctggagttgatcctgtggtaagtcatagcccctttgacccacatcatcggggtagtactgcaggcgaggtataccgttctcacctcccgactcatctcgaccctgctatgccgttccaccgagcacttgatccggccgccgcctatctatttcagcgccagctttcccctaccccaggttaccctagccagtaccaactgtacgcaatggaaaacacacggcagacaatcttgaacgactacattacttcacagcagatgcaagtaaaccttcgacctgacgtggctcgaggattgtcccctagagagcagccactggggctgccgtaccctgccacccgcggcatcatcgacctcaccaatatgcctcccactatcctggttccccaccctgggggcacatctacccctcccatggacagaattacatatatccccggtacacagatcactttccctcctagaccatataattccgcaagcatgtctcctgggcatccaacacacctcgccgcagcagcctctgcagagcgggagcgggagagagagagggagaaggagagggaaagggagaggatcgcggccgcttcttccgatctatacctgagacctggctcagaacagcccggacgacccggcagccacggctatgtgaggagcccgtctccttccgtgagaacccaagaaaccatgctgcagcagaggccaagcgtctttcaggggacgaatggcacaagcgtgatcaccccattggaccctacggcccagttgaggataatgcctctgcctgctggaggcccttctataagtcaggggctgcctgcttccaggtacaacaccgcggctgacgctctggcagctcttgtggacgcggccgccagcgccccacagatggacgtgtcaaagactaaggagagcaagcacgaggcagcccgcctggaagagaacttgcggtctagaagcgctgctgtgtccgagcagcaacagcttgagcagaaaactctggaggttgagaagcggtctgtgcagtgtctgtatacatcgagcgcttttccatccggcaaaccacagccacactcatcagtagtgtactccgaagcagggaaggataaaggaccccctcctaaatcaagatacgaggaagaattacggactcgtggcaagactacaatcactgcggccaattttattgatgtcatcatcactagacagattgcctccgataaggacgctcgggaaaggggcagccaatcctccgatagcagttcctctctgtccagccatagatacgagacaccgtctgatgctatagaagtgatcagtccagcttcaagccccgcaccacctcaggaaaagctgcaaacctatcagcccgaagttgtcaaggcgaatcaggcggagaacgatccaaccagacagtacgagggcccgttgcaccactacagaccccaacaggagtccccaagccctcagcagcagttgccaccttcctcacaggctgaaggcatgggtcaggtccctaggacccaccgactcataaccctcgctgatcatatttgtcagatcattacccaggattttgcgcggaaccaagtgtcgtcccagactccgcagcaacccccaaccagtacattccaaaacagcccctccgcgctggttagcactcctgtgcgcacaaaaaccagcaaccgctatagtccagagagccaggctcaatctgttcatcaccagcgtcctggatcccgcgtcagcccagaaaatctggtggataaatcccgggggagccggccaggtaagagccctgaaaggtcacacgttagctctgagccctatgagcccatctcacctccacaagttccagtggtgcacgaaaaacaggatagcctgcttctgctctctcagaggggcgccgaaccagcagagcagcggaacgatgcgcgtagtcccgggagcatcagctatttgccttcttttttcactaagttggagaataccagcccaatggtcaaaagtaaaaaacaagaaatcttccggaagctgaattcatccggtggaggagacagcgacatggccgctgctcaacccggcaccgagatcttcaacctgcctgcggttacaactagtggcagtgtctcttcccggggacatagttttgccgaccccgcctctaaccttggcctcgaggacataattaggaaggccctaatgggctcttttgatgacaaagtggaggaccacggcgtggtcatgtcccaacctatgggcgtcgtcccaggaactgctaatacctctgtagttacttcaggcgagaccagacgggaggagggggacccctcccctcatagtggggtttgcaaacccaagctcatttcaaaatccaactctagaaaatctaagagccctatccctggccagggttatctcgggacagaacgtccatcttccgtttcatcagtacatagcgagggagattatcaccgccagactcccggctgggcatgggaagataggccctctagcacaggcagcacacagtttccctataatcccctcactatgcggatgctgtccagcacaccgcctacacccatcgcttgcgccccatctgctgtaaaccaagctgccccccaccagcagaacaggatatgggagcgcgagccagcccctttgctgagtgctcaatatgaaactctaagtgacagcgatgactag

SEQ ID NO: 15962 - DNA, 7014 bp, synthetic construct
  source 1..7014: mol_type = other DNA; note = Synthetic coding sequence
atgagctcctctgggtatccacccaatcagggcgctttttcaaccgagcaatccaggtacccacctcattccgtgcaatatacctttcctaatactcgccaccaacaggagtttgccgtgccagattatcggtccagtcacctggaggtgtctcaagcatcccagcttctacaacaacagcagcagcagcagctgcggaggaggccatcccttctgtctgaatttcaccccggctctgaccgccctcaggaaagaagaacatcttacgagccttttcaccccggaccctctcccgtggaccatgattccctggaatcaaaacgcccgagactggaacaggtgtccgacagccatttccagagagtctcggctgcggttctaccgcttgtccatcctctcccagaaggtcttcgagcctcagctgatgcaaaaaaggacccggcctttggaggaaagcatgaggcaccatcttcacccattagcggccagccatgtggggatgaccagaacgcttcaccaagtaagttgtctaaggaggagctcatacagtcaatggaccgagttgacagagaaatcgccaaggtcgagcagcaaatccttaagcttaagaagaagcagcagcaactggaggaagaggccgccaaaccgcccgaacctgagaagcctgtcagcccgcccccggtggagcagaaacatcggtccatcgtccaaatcatttatgacgaaaacaggaaaaaagcagaggaggcacataaaatttttgagggactgggtcccaaggtggagctaccactctacaatcagccttccgatacaaaagtctaccatgagaatattaaaaccaaccaggttatgcgcaagaaattaatcttattcttcaagcggagaaaccatgctcgcaagcaacgggagcagaagatatgccagagatatgaccagctgatggaggcctgggagaagaaggtggatcgcatcgagaataaccctcggcggaaggcgaaagagtcgaagacccgggagtattatgagaaacaattccctgaaatcaggaagcagagggaacagcaggagagatttcagcgtgtcggacagaggggggcgggactcagtgccactattgccagaagtgagcatgaaataagcgagatcatcgatggcctgtccgagcaggaaaacaacgagaaacaaatgcgtcagctgagcgtgatccctccaatgatgtttgatgccgaacagagacgagtgaagtttattaatatgaacggcctcatggaggatcctatgaaggtctataaggataggcagttcatgaacgtgtggacagaccatgaaaaggagattttcaaagataaattcatccagcatccaaagaattttggattgatcgcctcctacctggagagaaagagcgtgccagattgtgttctgtattattatttaaccaaaaagaatgagaattacaaggcactggtgaggcgtaactacggaaagcggaggggacgcaaccagcagattgccaggccctctcaagaggagaaagtcgaagaaaaggaagaagacaaggcggagaaaacagagaaaaaggaggaggagaaaaaggacgaggaggaaaaagacgagaaggaggatagtaaggagaacaccaaagagaaggataagatagatggaacagccgaggagaccgaggagagagaacaggcaaccccccgaggacgcaaaacagccaactcccagggtcgcaggaagggacgcatcacgcggagtatgactaatgaggcagcggccgcctccgccgccgccgccgcggcaacagaagagcctcctcccccactaccccccccacctgaacccatctcgactgaacccgtggagacgagtcgctggacggaggaggaaatggaagttgcgaagaaaggattggtggagcatgggcggaactgggccgcaattgctaagatggttggaaccaagagcgaagcccagtgcaagaacttttacttcaactataagcgcagacataatctggataatcttctgcaacaacacaaacagaagacgtcaagaaagccacgcgaggagagagacgtctcacagtgtgaatctgtcgccagcacggtgagtgcacaagaggacgaggacattgaagcatctaatgaagaggagaatcccgaggacagtgagggtgccgaaaattcatcggataccgagagtgcaccaagtccatcaccggtagaggccgttaagccgagcgaggactccccagaaaacgcaacttcaaggggtaacacagagcccgctgtggaacttgagcccacaaccgagaccgcaccttctaccagcccttctctcgccgtgcccagtacgaagcctgccgaggacgagagcgtcgaaacgcaggtcaatgactcaatttctgctgaaaccgctgaacaaatggacgttgatcagcaggaacactctgccgaggagggctcagtctgcgatcctccgccagccaccaaggcggacagcgtagatgtggaggtacgagtccctgagaaccatgcaagtaaagtcgaaggtgataataccaaagaacgggacctggatagagccagtgagaaggttgagcccagggatgaagatctggtggtggcccagcagatcaatgcccagcgtcctgagcctcagagtgacaatgactcatccgccacatgcagtgccgatgaagacgtcgatggagaacccgagcgtcagcggatgttcccgatggacagcaagccctccttattaaacccgaccggaagcatcttggtgagctctcccctcaaacctaatcctctcgatctgccacagctacagcatcgggccgcagttataccacccatggtttcgtgcaccccttgcaatatccccatagggactcctgtaagtggctatgcactgtaccaaaggcacattaaagccatgcatgaaagtgccctcctggaggaacagcggcagaggcaggagcagatcgatcttgaatgccgtagctctacctctccctgcgggacatctaaaagcccaaatagggagtgggaggtccttcagcccgcaccacaccaggtgattaccaatttaccagagggcgtcagactgccgaccacgagacccaccaggccaccccccccactaataccctcgagtaagacgaccgtggcctcggagaaaccttcattcatcatggggggcagtatttcgcaaggtacccccggcacatacctgacctctcacaaccaggccagctacacacaagaaacacccaaacccagcgtcggctcaatctccctcgggctgcccagacagcaggaaagcgcgaaaagtgctactttaccttacatcaagcaggaggaatttagccccagatctcagaacagccagcctgaaggcctattagtccgcgctcagcacgagggcgttgtgaggggcacggccggggccatccaggaaggaagcatcacccggggtacccctactagtaaaatttcagtggaatcgatccctagtctccgtgggagcatcacgcagggcacaccggcactgccgcagacaggtattccaacggaagcactggtcaaaggctccatttccagaatgcccattgaagacagtagccccgagaaagggagggaagaagctgcttcgaaaggtcacgtcatttatgagggtaagagcgggcatattcttagctacgacaacattaagaatgctagagaaggcacaaggtcgccacgcactgctcacgagataagtctgaaaaggtcatacgaatctgtggagggtaacattaagcagggcatgtcaatgagggaatcgcctgttagcgctcccctggagggactgatctgtagagcactgcccaggggttcacctcacagtgaccttaaagagagaactgtgctgtctggcagcattatgcaaggcacaccgagggccaccactgagagcttcgaagacgggcttaaatatccaaaacagatcaagagagagtcccccccaatccgggccttcgagggtgcgataacgaagggcaagccttatgatgggattactacaatcaaggagatggggaggtctattcacgagataccgaggcaagacatcctcacacaggagtcccgaaagacccccgaagtggtccaaagcactcgacctatcatcgaaggcagcatttctcaaggtacacctatcaaattcgacaataatagcgggcagagtgctattaagcataatgtcaaatcactgattacaggcccttcaaaactttcacggggtatgcctcctctggaaattgtgccagaaaacatcaaggtggttgagagaggcaaatatgaggatgtcaaagccggagagaccgtaagaagccggcatacttctgttgtctccagcgggccttctgttctgagatcgacactgcatgaggccccaaaggcgcaattgtctcctggaatttacgacgacacctccgcgcgaaggactccggttagttaccagaacaccatgagcagggggtcccccatgatgaatcgaactagcgacgtgaccatttcctcaaacaaatcaacaaaccacgaacgtaagagcaccctcacccccacccaacgcgaaagtattcccgccaagtctcctgtgccaggcgtagaccctgtggtgtcgcactcaccctttgatccgcaccatcgtggctctacagcgggtgaggtataccggtcccacctgccaacgcacttggatcctgctatgccattccaccgtgccctagatcctgcagctgctgcttatctcttccaacgccagttatccccaacacctggctaccctagccaataccagctgtatgccatggaaaatacacgccagacaatattgaatgattacatcacaagccagcaaatgcaggtgaatctacggcctgacgtggcccgcggcctgtctccccgtgaacagcccctggggctgccgtatccagcgacaaggggtatcatcgatctcactaacatgcctcctacaatcctagttccgcatcctggaggtaccagcacccccccgatggacagaatcacctatattcccggaacccagattacatttccaccccgcccttacaacagtgcatcaatgagtcctggccaccccacccatctggcggccgcagcctccgccgagcgtgagcgggaacgagagcgcgaaaaagagcgggagcgtgaaagaatcgccgctgcatcatctgatctctatctgaggcctggatccgagcagcccgggcgccccggatctcacggatatgtgcgttctccctcgccatcagtcaggactcaggagaccatgcttcagcagcggccttccgtcttccaggggacaaacggaacttctgttataacccccctagaccccaccgcccagctgagaatcatgccactgcctgccggcgggccatctatctctcagggactgcctgcctctaggtataataccgccgcggacgccctggccgccctcgtggatgctgctgctagcgcaccacaaatggatgttagcaaaaccaaggagatttctagccacaggtatgaaacaccatccgatgctatcgaagtcatttcaccagcctctagtccggcacccccccaagagaaactccaaacataccagccggaagtagtgaaagcaaatcaggccgagaatgaccctactaggcaatatgaaggccccctgcatcattacagaccacagcaggaatccccaagcccacaacagcagttgcctcctagtagtcaggcagagggaatgggccaggtgccacgcacccatcgccttatcaccctggcggaccacatctgccagatcatcactcaggattttgctagaaaccaagtttcaagccagacgccccaacaaccccctactagtaccttccaaaatagcccgtctgcgctagtctctacacccgtgagaacaaaaacctccaaccgctacagtccagaaagccaagcccagtcggtccatcatcaacgacccgggtcgagagtttcccctgagaacctggtggataagtctcgcgggagccggcctggcaagtctccagaacggagccacgtgagcagcgagccttacgaacctatctccccaccacaggtgcccgtcgttcatgagaaacaagattcactgctcctcttgtcccagcgcggcgcggaacctgccgaacagaggaatgacgcaagatcccctgggtcaattagctacttaccaagtttttttacgaaactggaaaatacgtcgcctatggtaaagtctaagaaacaggagatttttcggaagctaaattctagcggcggcggcgacagcgacatggccgcggctcagcctggcaccgagatttttaacctccctgctgtgacaacctcgggatccgtcagcagtagaggacacagcttcgctgaccccgcctcgaacctaggacttgaagatatcatccggaaggccttgatgggtagtttcgacgacaaggtcgaggatcatggagtcgtcatgtcccagccaatgggagtggtccctgggactgctaacacctccgtggtcacatccggtgaaacacgaagagaagaaggggatcctagtccccatagcggaggcgtgtgcaaacccaagcttatatcgaagtccaacagtcgaaaatctaagagtccaatccccggacagggttatttaggaacggagcggccttcatctgtaagctccgtgcactccgaaggcgattaccaccgccagacgcctggttgggcatgggaagaccgaccttccagcacgggctccactcaattcccttataaccctctcactatgcgtatgctcagctcaacgccacctaccccaattgcatgtgcaccaagcgctgtgaatcaggccgcccctcatcagcagaaccggatttgggagcgagagcccgccccactgctttccgcgcagtatgagactctgtccgactctgacgattag

SEQ ID NO: 15963 - DNA, 3075 bp, synthetic construct
  source 1..3075: mol_type = other DNA; note = Synthetic coding sequence
atgcctccgcttgaaattgtgcctgagaatatcaaagtggtcgaacgcggtaaatatgaggacgtgaaggccggcgaaacggtgcgcagcaggcacacttcagtggtgtctagcggtcccagtgtgctgaggtccacactgcacgaggcacctaaggcacagctgagccccgggatttatgacgatacctcagcacgtcgaactcctgtgtcatatcagaacactatgagcagaggaagcccgatgatgaaccgaacttctgacgtcacgatttcttctaacaagagcacaaatcatgagcgaaaaagcactctgaccccaacgcagagagagagtatccctgcgaagagtcccgtgcctggcgtggatcccgtggtgagccacagtccattcgatcctcaccatagagggtcaaccgccggcgaggtttaccgatcacatcttccgactcatctcgatccagccatgccttttcaccgcgccctggaccccgctgctgcagcctacttgttccagagacagttgagccccaccccaggctacccatcacagtaccagttgtatgctatggaaaatactcgccaaactatcctgaacgattacataacttcccagcagatgcaggtcaacttaaggccagacgtcgccaggggcctgtctccaagagaacaacccctggggttaccataccccgctactcgaggcataattgacctgaccaacatgccgcctaccattctcgtgccgcacccaggcggtacttcaactcctcctatggaccgtatcacgtacataccaggcacccaaataacattcccgccacgtccatacaattccgcaagcatgagtccaggacatcccacccaccttgcagccgccgcatcggccgaacgggaacgcgagagggagagggaaaaggaaagagaacgggagcggatcgccgctgcaagcagtgacctgtacctgagacccgggagtgagcaacccggaagacccggatctcatggctacgtacgctcgcccagtcctagtgtccgcacccaggagacaatgctgcagcaacgaccttccgtgttccaaggcaccaatggtacctccgtgattacacctctggaccccaccgcacagttgcgcatcatgccactgccggccggtggaccatccatatctcagggccttcctgcctctcgctacaatactgctgcagatgccttagccgcgctggtagatgctgccgcctctgctcctcagatggatgtttctaagacaaaagaaagtaagcacgaggctgcccgcttagaggagaatctgcgcagtcggtcagctgcagtttccgagcagcaacagcttgagcagaagactctagaagtggagaagcgaagcgtgcaatgcttatatacctcgagtgctttcccctctgggaagccccagccccactctagcgtggtgtactcagaggccggcaaggataagggcccacctcccaagagtcggtatgaagaagagctccggacccgaggaaagaccaccattacagcagccaacttcatcgatgtaatcattacaaggcagattgcttcggacaaggacgcgcgcgagagaggtagtcagagctctgacagtagcagctcactgagcagtcaccgttacgagacgccgagtgatgcgattgaagtaatctccccagcttcctcaccagccccacctcaggaaaagcttcaaacataccagcccgaagtcgtcaaggctaaccaagccgagaacgatccgaccagacagtatgagggacccctgcatcactatagaccccagcaggagtctccgtccccccaacagcagctgcctccatccagtcaggcagaaggcatggggcaggtgccacgcactcacaggttgataaccctcgctgatcatatctgccagattattacccaggatttcgcccgaaatcaggtgagttcccagacaccacagcaaccacctacctctaccttccagaactcaccctccgcactcgtctccacccccgtaagaaccaagacgagtaaccgatactcccccgagtcgcaagcacaaagtgtgcatcaccagaggcccgggtcaagggtttcccctgaaaacctggttgacaagagcaggggcagtcggcccgggaaatcccctgagcggagccatgtgtcttccgaaccctacgagcctatcagccctccgcaggttcctgttgtccatgaaaaacaggattcgttgctgcttttgagccagaggggagccgaacctgccgaacaaagaaacgatgctcggtcacctggctcaataagttatctcccctccttctttacaaagctggaaaacactagcccaatggtgaagtccaaaaagcaggagatctttcggaagcttaatagttctggtggcggggattctgatatggccgctgcgcagccaggtactgaaatcttcaacttaccggctgttacaacctctgggtctgtatcctcacgcgggcactcattcgccgatcccgctagtaatctgggacttgaggatataatccgaaaggccctgatggggtcttttgacgacaaagttgaagatcacggcgtggttatgtcccagcctatgggcgttgtaccaggaactgctaacacatccgtggtcacatcaggcgagactcgacgggaggaaggcgacccttctccacactccggcggcgtctgcaagccaaaattaataagcaaatctaattccaggaaaagtaagtctcccattccagggcagggctacctgggaactgagaggccctcgagcgttagctccgtacactccgaaggggactatcaccgacagacccctggatgggcatgggaggataggccgagctctaccggctccacacagtttccttacaaccccctgacaatgagaatgctttcatccacccctccaactccgatcgcatgtgctccgtctgccgttaatcaggcagccccacaccagcaaaaccgcatctgggagcgtgagcctgcccccctcctgtcggcgcaatacgagacgctgtcagattccgacgattag

SEQ ID NO: 15964 - DNA, 4821 bp, synthetic construct
  source 1..4821: mol_type = other DNA; note = Synthetic coding sequence
atgttgttgcatctctgctccgttaagaatctgtatcagaataggttcttgggactggccgccatggcgagtccctccagaaactctcagtcacgtcgtcgctgtaaggaaccactacgatattcatacaatccagaccagtttcacaatatggatctacgaggagggcctcatgacggagtcaccattccccgatcaacatctgatacagacttggtgacatctgattcacgcagcacactgatggtttcttcatcctactatagcatcgggcactcccaagacctggttatacactgggatataaaggaagaggtcgatgccggtgattggatcgggatgtatctcatcgatgaggtgttgtcagagaactttctcgactacaaaaatagaggggtcaacggctctcatagagggcaaatcatctggaaaatcgacgcgagctcatacttcgtggaaccagagacaaagatctgcttcaagtactatcacggtgtgtctggcgcactacgggctacgacccccagtgtgaccgttaagaactctgccgcacccatcttcaagtccatcggtgccgacgaaaccgtccagggacagggctcaagacgccttatttcttttagcttatctgacttccaagccatgggattgaagaaaggaatgttcttcaatccggatccttacttaaagataagcatccagccaggcaagcacagcatcttccccgcgctgccacaccacgggcaagagcgccgctccaaaataataggtaacacggtgaatcccatttggcaagctgaacaattttccttcgtctccctgccgaccgatgtcctcgagattgaggtcaaggacaagttcgcgaaatctcgaccgatcattaaacggttcctgggcaaattgtctatgccagtgcaaaggttgctggagcgtcacgcaattggcgatagagtcgtttcatatacactgggccgccgacttccaactgatcacgttagcgggcaacttcagttccgcttcgaaattacgagctcaatacaccctgatgacgaggagatcagcctttcaaccgagccggaaagtgcacagattcaggattcaccaatgaataacttgatggaatcaggttccggagagcctagaagtgaagcgccggaaagcagcgaaagctggaagcccgagcagcttggggagggctctgtcccggacggaccggggaatcagagcatcgagttgagtagacccgctgaggaggccgccgtgattacagaggcgggggatcagggcatggtaagcgtggggccagaaggggctggtgagctgctggcccaagtgcaaaaggacatccaacccgctcccagtgctgaggaactggccgagcagctggacctgggagaagaagcttctgctctcctccttgaggacggggaagctcctgcctccaccaaagaagagccacttgaggaggaagcgactacgcagtccagggccggccgcgaggaagaggaaaaggaacaggaggaggagggggacgtaagcaccctggagcagggggaaggaaggcttcaattacgggcaagcgtgaaacgtaagtccagaccatgtagcctgcctgtctcggaactggagactgtcattgcatctgcctgcggagacccagagaccccaaggacccattacatcaggattcacacgctcctgcactctatgccctcagctcagggcgggtccgctgctgaagaggaggacggcgccgaggaagagagtacactaaaagactcatctgaaaaggacgggctttccgaggtggacaccgtcgcggctgacccttcagcccttgaggaagaccgtgaggagcccgaaggtgccacaccggggactgcgcatccaggccacagcggcggccacttcccttccctggccaatggtgcagctcaagacggggacactcatccatcaacagggtcagagagcgatagcagcccacggcagggtggtgaccattcctgcgagggatgcgacgcctcgtgctgttccccttcttgttattcctcttcctgctattccacttcctgttatagctcatcatgttactctgcatcttgctactctccctcgtgttacaacggtaatagattcgcttcacatacaagattttcaagtgtggacagcgctaagattagcgagtctacagtattctcttcacaagacgacgaggaggaggagaattctgcttttgaatccgtgcctgactccatgcagtccccggagctggacccagagagcacaaatggtgccggaccatggcaggacgaactcgcagccccttctgggcatgtcgagaggtccccggaaggactagaaagcccagtcgcaggcccgtcgaataggcgagaaggggaatgccctattctgcacaactcccagcctgtgtctcaactcccctccctgaggcctgagcatcaccactaccccacgattgacgaacccctcccgcctaactgggaagcacgaatagattcccatggccgagtgttctatgtcgaccacgtgaatcgtacgacgacttggcaaagaccaaccgccgctgctaccccggacggaatgcgcaggtcaggatctatccagcaaatggagcagctgaatcgcaggtaccagaatatccagaggactatcgcaaccgaaaggtcggaggaggatagtgggagtcagagttgtgagcaagctcctgcaggcggcggcggagggggtggctccgatagcgaggccgagagtagccagtcatcacttgacttgaggagggaagggagtctaagccctgtcaattctcaaaagatcactctgttgttgcagagcccggcagttaaattcatcacgaatcccgagttcttcactgttctgcatgccaattacagtgcataccgcgtttttacctcaagcacctgccttaagcatatgatcctcaaagtgcgccgggatgcaaggaattttgagaggtaccagcacaatcgcgacctagtaaattttatcaacatgtttgctgacacccgacttgaactccctcggggttgggaaattaagaccgatcaacagggtaagtcattctttgtggaccacaactctcgcgctacaacgtttattgatcccaggatccctctgcagaacgggagattgccaaatcatctgacacataggcagcacttacagcggttgcgcagctatagcgctggcgaagcatctgaagtctctcgaaatcgcggggctagccttttggctaggccgggacatagcttggtcgcggcaatccggagccagcaccagcatgagtccctccctctggcttataatgacaagatagtggcctttctgaggcaaccaaacattttcgaaatgctacaggagaggcagccctccctggcgcggaaccacacattacgggagaagattcattatattcgaacagagggtaatcacggactggaaaaactgagctgcgatgcggacttggtaattctgttatcactgttcgaggaggagatcatgtcttacgtgccccttcaggcagcattccaccctggctattccttttcccctcgctgtagtccttgctccagccctcaaaatagcccaggcctacaaagagcctctgccagagctccgagtccctatcgacgcgacttcgaggcgaagttgcggaatttttatagaaagctggaggcaaaaggatttggccagggccccggtaagataaagcttattattcgtcgagatcatctgctcgagggtacgttcaaccaggtgatggcctattcacgaaaagaacttcaacgcaacaaactgtatgtgacgttcgttggagaggaaggcttggactatagtggacccagccgtgagttctttttcctgctctctcaggagctcttcaatccctactatgggctattcgaatactctgccaacgatacgtataccgtgcagatctcccctatgtcagctttcgtggagaaccacctcgagtggtttaggttttccggtcgtatcctgggtctagccctcatccatcagtatttgcttgacgcatttttcacccggccgttctacaaagccctgcttcggcttccatgcgacctttcagatctggagtatctagatgaggagttccaccaatcattacagtggatgaaggataataacatcactgatattctagatctaacattcacagtaaatgaggaagtcttcgggcaggtcaccgagcgcgaattaaagagtggtggtgccaatacgcaggtaactgaaaaaaataagaaagagtatattgagaggatggtgaagtggcgggtggagcgtggcgtagtacagcagacagaagcccttgttagggggttttatgaggtggttgactctcggctcgtaagtgtttttgacgcacgtgaattggaactggtgatcgcaggcacagccgaaatcgacctgaacgattggcggaataataccgagtaccgaggcggttaccacgacggacacctcgtcataagatggttttgggctgccgtggaacgctttaacaacgagcagcgtctgcgtctgctccaattcgttaccggcacttccagtgtgccctatgagggtttcgcagccctgcgcggatccaatgggctacgtagattctgcatcgaaaaatggggcaagatcactagtctccctagagcacacacttgctttaatcgactggatctcccaccatacccaagttactccatgctgtacgagaagctcctgacggccgtggaggagacctcgaccttcggcctggaatag

SEQ ID NO: 15965 - DNA, 1209 bp, synthetic construct
  source 1..1209: mol_type = other DNA; note = Synthetic coding sequence
atggcagccttgtgtcggacagccgaatcacaggcagaactgcagtgcacccaactagacttagagaggaaattaaaactcaatgaaaacgcgatctcccggctgcaggccaaccagaaatcagtactcgtttctgtcagcgaggtcaaggctgtcgccgagatgcaatttggtgagctcctggcagccgtgcgtaaggcccaggctaacgtaatgctatttttggaagaaaaggagcaggccgcactatcacaggcaaatggcattaaagcacacctagagtaccgcagtgccgagatggaaaaatctaagcaggaattggagaccatggctgccatcagtaacacagtgcagtttcttgaagagtattgtaagttcaaaaatactgaggatattactttcccctctgtctatattggcctgaaagacaagctctctggcatccgaaaagtgatcaccgagtcaaccgtccatcttatacagctcctagaaaactataagaaaaaactccaagagttttcaaaagaggaggagtacgatatcaggactcaagtctcagccattgtgcagaggaaatactggaccagtaagcccgagccaagcactcgggagcagttcctgcaatatgtgcacgacataactttcgacccagatacagcccataaatacctaagattgcaggaagaaaataggaaggtcaccaatacgactccatgggaacatccataccccgacctcccaagtcgtttccttcactggcggcaggtcttaagtcaacagtcactttatctccatcgctattatttcgaggttgaaatctttggggcgggcacttatgtaggactgacgtgcaagggaattgatcagaagggcgaagaacggtcctcctgcatttcgggaaacaatttttcatggtcactgcagtggaacggtaaggaatttactgcttggtactcagatatggaaacacctctgaaggcaggccccttctggcggttgggtgtgtatatcgacttccccgggggcatactgtccttttatggtgtagagtatgattcaatgacactggtccacaagtttgcatgcaaattctctgagcccgtgtatgcagccttctggctgtccaaaaaagagaacgccatacggatcgttgatctgggtgaggaacccgagaagccagcgccgtctctggtgggcacggccccttag

SEQ ID NO: 15966 - DNA, 1677 bp, synthetic construct
  source 1..1677: mol_type = other DNA; note = Synthetic coding sequence
atgcacagatcggccccttcacagactacaaagaggtccagatcacctttctctacaactaggcgctcttgggatgatagcgaatcgagtgggactaatctgaatatcgacaacgaggactattcccgttaccctcctagggagtatcgcgccagtggcagccgtcgcgggatggcctacggacatattgattcatatggagctgacgattcggaggaagagggagctggccctgtggaacgcccaccagtgagggggaaaacaggcaagtttaaggatgacaaactgctcgaccccgtgccagccgcgagatgttctgcatctcgtgctgacttcttgccacagtccagcgtcgcaagtcaatcttcgtctgagggtaaattggcaaccaaaggggacagcagtgaacgagaacggagggagcaaaacctgcccgccaggccaagccgcgcgcctgtgtctatctgcggagggggagaaaatacttccaaatctgcagaggaacctgttgtccgccctaagatccgaaacttggcctcacccaactgcgtcaagcccaaaatcttttttgataccgacgacgacgacgatatgcctcacagcacatctcgctggcgtgacacagctaatgataacgagggacacagtgacggtctggcgagaagaggcaggggcgaatctagttctgggtatccagagcccaagtaccccgaagacaaaagagaggcaaggagtgaccaggttaagcccgagaaagtcccccgcagacgacgtacaatggccgacccagacttctggacacactcagatgactactataagtattgcgatgaggatagtgacagcgacaaggaatggatcgccgctctgagaaggaagtacagatcgagggagcagaccttatcgagttctggagagtcatgggagaccctgcctgggaaggaagaacgtgaaccacctcaggccaaggtttccgcgagtacgggcacctcgcctggccccggcgcatctgcttctgctggggccggagccggcgcgtctgcaggtagtaatggctctaactacttggaggaggtgagagaaccttcattgcaggaggagcaggccagcctggaagagggcgaaattccgtggctgcagtaccacgagaatgattcttcttcagagggggacaatgattctgggcacgagctgatgcaacccggcgtcttcatgttggatggtaataataacctcgaggacgacagctcagtgtctgaggacctagaggtggattggtccctcttcgatggttttgcagacggcctgggcgtagccgaggccatcagttatgtggaccctcaatttttgacgtatatggctcttgaggaacgcctggcgcaagccatggaaacagcactagctcaccttgagtccttggccgtcgatgtggaagtggctaaccctccagcctcaaaggaatccatcgatgcattgcccgaaatattagtgaccgaggatcacggagccgttggccaggaaatgtgttgtcccatctgttgttctgaatatgtcaagggggaagtggccactgagctgccctgccatcattactttcacaaaccttgcgtgtccatttggttacagaagtctgggacgtgccctgtttgtcgctgcatgttccctcctccactttag

SEQ ID NO: 15967 - DNA, 3591 bp, synthetic construct
  source 1..3591: mol_type = other DNA; note = Synthetic coding sequence
gtacctccttgtcctgctgagctccgctcagtcactaacggacaatccaatcagcccagcaacgaaggcgatgctatcaaggtgttcgtccgaataagaccacctgctgagaggtcaggttccgccgacggggaacaaaatctttgccttagcgttttgtctagcaccagtctgcgtctgcattctaaccctgaaccaaagacttttactttcgaccatgtcgccgacgtggacacaacacaggagagtgtgttcgcaaccgtcgctaagtccatagtggagagttgtatgtccggctacaatggcacaatttttgcctatgggcagactggaagcggtaaaactttcactatgatgggcccctccgaaagtgataacttcagtcacaacctgagaggcgtcataccacgcagttttgagtacctgttctctctcatcgatcgggaaaaagaaaaggctggcgctgggaaaagtttcttatgtaagtgttcattcatcgaaatctacaacgaacagatttacgatctcctggattcggcttccgccgggctctatctgagggagcacatcaaaaagggtgttttcgtggtgggcgcggtggagcaggtcgtcacatccgcggctgaagcatatcaggtactttcggggggttggaggaatcgccgcgtggcgtccacctcaatgaatcgtgaatcaagccggagtcatgctgtgtttacgatcacaattgagtcaatggagaaatccaatgagatagtgaacattcgcacttcactactgaacctggtggatctcgccggatcagagcgccaaaaagacactcatgccgagggtatgcgtctaaaggaggcggggaacatcaatcgatctctgtcttgtctcggccaggtcatcaccgcgctggtggacgtggggaacggcaaacaacgccacgtttgttaccgggacagcaaactaacctttctgctgcgcgatagcctcggcgggaacgccaagaccgcgatcattgcaaatgtgcaccctgggagccgctgttttggcgagaccctgagtaccctaaatttcgctcagagagccaagctgatcaagaataaagccgtcgtgaatgaagatacccaaggaaatgtttcacaactgcaggcagaggtcaagcgtctgaaggaacaactcgccgaactggcctccggccagacacctcccgaaagtttcttgactagagacaagaagaagaccaattatatggagtattttcaggaggccatgcttttttttaagaagtctgagcaggaaaaaaaaagtttgatcgagaaggtgacacagctcgaagacttgacactgaagaaagagaagttcattcaatccaataaaatgatcgttaagttcagagaggatcagattatcagactggaaaagctccataaagagtccaggggagggtttctgcccgaggagcaagatcgcctcctgtcggagttgaggaatgagatccaaacacttcgggaacagatcgagcatcacccccgcgtggctaagtacgccatggagaaccacagccttcgggaagagaaccggaggctgcgtctgcttgaacctgtgaagcgagcccaggagatggatgcacaaaccattgctaaactggagaaagcctttagtgagatctctggcatggagaagtccgataaaaaccagcagggattcagtccaaaggcccagaaggaaccatgtctatttgccaacactgagaaactgaaggctcagctcttgcagatacagaccgaactgaataacagcaagcaggagtacgaagagttcaaggaactcactcgcaagagacagttggagctcgaatcagagctacagtcactccagaaagctaacctgaacctggagaatttactggaggccactaaagcatgtaaacggcaagaggtctcgcagctgaacaaaatccatgctgaaaccctgaagatcataaccacccccaccaaggcttaccaactacattctaggcctgtccccaagcttagtcccgagatgggaagttttggcagtctgtacactcagaattcaagtatactagataatgacatcctaaacgaaccagtcccccccgaaatgaacgaacaggcatttgaagcaattagtgaagagctgcggactgtgcaggaacagatgagtgcgttacaggccaaactcgatgaggaagagcacaagaacctcaaactccagcagcacgtggacaaactggagcaccactcaacccagatgcaggaactcttcagctccgaacggatcgactggaccaagcagcaggaggaactgttgtctcaactgaacgtccttgaaaagcagctccaggagacccagaccaagaacgatttcctgaagagcgaggtgcacgacctgcgagtagtccttcacagcgcagacaaggagctttcatcagttaagctggaatattcctcctttaagacgaaccaggaaaaggaattcaataaattgtcggaaagacacatgcacgtccagcttcagcttgataatcttagactggagaatgagaagcttcttgagtctaaagcgtgtctgcaggactcttacgacaacttgcaggagattatgaagtttgagatcgatcagctgtcaagaaacctgcaaaactttaagaaggaaaacgaaacactgaaatcagacttgaataatctgatggaactgctcgaagcggagaaggaaagaaacaacaagctcagcctgcagttcgaggaggataaagaaaatagtagtaaggaaatcctgaaagtcctcgaggccgtgcggcaggaaaaacaaaaggagaccgcgaaatgcgagcagcaaatggcaaaggtccagaagctggaggaatcactactcgccaccgagaaggtgatttcttcactcgagaaatcccgggattcagataaaaaggtagtcgcagatctgatgaatcagattcaggaactaagaacttccgtatgcgaaaagacagaaacaatagataccttgaaacaggagttaaaagatattaattgtaaatataactccgcactggtcgatcgcgaggagtctcgagtgctgatcaaaaagcaggaagtggacatactagacctcaaagaaacgctcaggctgcgaattttgagcgaggacatcgaacgcgacatgttgtgtgaggacttggcacacgcaacggagcagctgaatatgcttactgaggcctcaaagaagcattcgggactcctccagtccgctcagcgcactgaccaggagggctcaccagatagtgggacgagcgcgcaggccaaacccaaggagcgtggttcgaggaccgaagaggagtataactttaagatgcggcagctcgagcacgtcatggattcagcggcggaggacccacagagccctaagactcccccccactttcaaacacacctcgcaaaacttcttgagacccaggagcaggagattgaggatgggagagcgtctaaaacttccctggaacatttggtgactaaactgaacgaggatcgcgaggtgaaaaatgctgagatcctgaggatgaaggagcagctccggtag

SEQ ID NO: 15968 - DNA, 3264 bp, synthetic construct
  source 1..3264: mol_type = other DNA; note = Synthetic coding sequence
atggatccattcactgaaaaattgctggaacgaactcgggccaggcgggagaacctgcagcgcaaaatggcagaacgtcctactgcagcgcccagaagtatgactcatgccaaacgcgcgcggcaacccctctccgaggctagtaaccagcagcctctgtccggaggagaagagaaatcctgcaccaagccatctcccagcaaaaagcggtgttcagataacactgaggtcgaagtgagcaatcttgaaaacaagcagcctgtggagtctacttccgcgaagtcgtgcagccccagtccagtcagtccgcaagtccagccacaggcagccgatacaattagcgactccgtcgccgtgcccgcatcattgttggggatgcgaagaggactcaacagcaggcttgaggccaccgccgcctccagtgttaaaacgaggatgcagaagcttgcggaacagagaaggcgatgggataatgacgatatgaccgatgatatacccgaaagcagcctcttttcccctatgccgtctgaggaaaaagcagccagtccgccaaggcccctattgtcgaacgcttctgcaactcccgtgggtcggcgtggcagactggctaacctggctgccaccatctgcagctgggaggacgatgtcaaccactccttcgctaagcaaaactccgtacaagaacagcccggtactgcctgtctatcaaaattttccagcgcatcaggagcctcagcccggataaacagttcttctgtgaagcaggaggcaaccttttgcagccagcgcgacggagacgccagcctcaacaaagcactgagttctagtgccgatgatgcaagtctggtgaatgcttctatcagtagctctgtcaaagctacgagtccagtaaagtccaccacctcaataacagacgccaagagctgcgagggacaaaacccagagctcctccccaaaacacctatctcgcccctgaaaaccggcgttagcaaacctatcgttaagtcaacattgtcacagactgtccccagtaagggtgagctctcccgagaaatatgccttcagtctcaatcaaaagataaatccaccacccccggagggaccgggatcaaacctttcttggagcgtttcggagaacgatgtcaggagcactccaaggagtcccccgccagatctactcctcacaggacccctatcattactccgaatactaaagctattcaggagaggctcttcaagcaggatacctccagcagcaccactcacctagctcagcagctcaaacaagagagacagaaagagctggcctgtctccggggtcgctttgataaggggaatatatggagtgccgaaaagggtggcaactcgaagtcaaagcagctggagaccaaacaagagacacattgccaaagcacccccctcaaaaagcaccagggagtgagtaagacccagtcgcttccagtgactgaaaaagtgacggaaaaccagattcccgccaagaacagctctaccgagcctaaagaagtgatacgagagatcgaaatgtctgttgatgacgacgacatcaattcttcaaaggtgataaatgatctcttctccgacgttctcgaagagggggagctagatatggaaaaatcccaagaagagatggaccaggccctggccgaatcgtctgaagagcaggaagacgccctaaacatttccagcatgagccttctggcgccgctggcccagaccgtgggagtcgtcagccctgagtctcttgtgagtacacctcgcttggagcttaaggacacatcgcggagcgacgagagcccaaagcccgggaagtttcagcgcacacgcgtacccagggccgaaagcggggacagcctcggcagcgaagatcgagatcttttgtattccatcgatgcttatcgctcccagcgctttaaagaaaccgagcgacccagtatcaagcaagtgatcgttagaaaggaggatgttacttctaaactagacgagaaaaacaatgcgttcccatgtcaagttaacattaagcagaagatgcaggagctgaataacgaaataaatatgcaacagaccgtgatttatcaggcctcccaggctctgaactgctgtgtagacgaggaacatggcaaaggctctctggaagaagcagaagcagagaggctgctgctgattgccaccggcaagcggaccttactgatcgatgaattgaacaagctcaaaaacgagggtccgcagcggaagaataaggcctccccacagagcgaatttatgcctagtaaagggagcgtaactctttctgagataagactgccactcaaagccgatttcgtgtgctctacagtgcagaaaccagatgctgctaattactactacctgatcatccttaaggcaggcgccgaaaatatggtcgctactccacttgcctcgacctcaaattccctgaacggggacgctttgaccttcaccacaaccttcacccttcaggacgtttctaatgacttcgagatcaacatagaggtctatagcctggtccagaaaaaggacccaagtggactcgacaagaaaaagaagacttcaaaatctaaagctataacccccaaaagactgctgacatctattaccacaaaatccaatattcatagcagcgtgatggcctctcctggcggcctctccgccgtccgcacaagcaatttcgcccttgtggggtcttacactctttctctgagttcagtggggaataccaagtttgtgctggataaggtgcctttcctgtcttcactggagggccacatttatctcaagattaaatgtcaggtgaactcaagtgtcgaggagcggggctttttaacgatcttcgaggacgtgtcagggtttggtgcatggcatcggcgctggtgtgttctgtccggtaattgtatcagctattggacatacccagatgacgagaaaaggaagaatccaattggaagaatcaatctggctaactgtacgagtaggcagatcgagcccgcaaaccgggagttctgtgctcggagaaacactttcgagctcattactgttaggcctcaacgcgaggacgacagagagaccctagtgagtcagtgccgagatactttatgtgtgactaagaactggctctccgctgataccaaagaggagagggatctttggatgcaaaaattaaatcaggtgctcgttgacataaggttatggcaaccagatgcctgttataagccaatcggcaaaccttag

SEQ ID NO: 15969 - DNA, 648 bp, synthetic construct
  source 1..648: mol_type = other DNA; note = Synthetic coding sequence
atggtctttcgacgcttcgtggaagtgggacgggtggcgtacgtgagcttcggacctcacgccgggaagcttgtcgccatcgttgacgtaattgaccaaaaccgcgctctcgtcgacgggccctgcactcaggttcgacgtcaagcaatgccatttaaatgcatgcagctgacagatttcatcttaaagtttccacattccgcacatcagaaatacgtccgccaggcgtggcagaaagctgatatcaataccaaatgggccgcgacaagatgggctaaaaagattgaggcccgcgagagaaaggccaagatgaccgatttcgaccgttttaaggtcatgaaggccaagaaaatgcgcaacaggattattaaaaatgaggtgaaaaagctgcagaaagccgccctactcaaggccagtccaaaaaaggcacccggaaccaaggggacagctgccgccgccgctgccgccgctgctgcaaaagttcccgccaagaaaataactgccgcaagcaaaaaggctcccgctcagaaggtgccggctcagaaagctacggggcagaaggccgcacccgcaccaaaggcgcagaagggacagaaagccccagcacagaaagcaccagctcccaaagctagtggaaaaaaggcatag

SEQ ID NO: 15970 - DNA, 2976 bp, synthetic construct
  source 1..2976: mol_type = other DNA; note = Synthetic coding sequence
atggaggaatatgagaaattctgcgagaagtccctggctcgcattcaagaggccagcctcagcacggaatctttcctgccagcccagtcagagtcgattagcctcatccggttccacggagtcgcgatactatctcctctcttgaatatcgagaaaaggaaagagatgcagcaggaaaaacagaaggcactagacgtggaggctcgaaagcaggtgaataggaagaaggcccttctcacaagggtgcaagagatcttagataacgtgcaagtccgcaaggccccaaatgctagcgacttcgatcaatgggaaatggaaactgtttatagcaattcagaggtgcgaaacttaaatgtgccggctactttcccgaattcgttcccatcacatacagagcactccactgcagccaagctagataagatcgctggaatcctgcccctcgacaatgaagatcagtgcaagaccgatgggattgacctggcacgcgactcagaaggatttaattcccccaaacagtgcgatagcagcaatatcagccacgtcgaaaatgaggcctttcccaaaacctctagtgcaactccgcaggaaaccttgatctctgatggcccattcagcgtcaacgaacagcaggatctgccactgcttgccgaggttatcccagacccgtatgtaatgtccttgcaaaacttaatgaaaaagtctaaggagtatatcgagcgcgagcaaagtagacggtccctgcgcggcagcattaataggatcgtaaacgaaagccatctcgataaagagcacgacgccgtggaggttgccgactgcgtgaaggaaaaagggcagctgaccgggaagcactgcgtctccgttatccccgacaaacccagtctgaataaaagtaacgtcctcctgcagggcgctagcacacaggcctcatctatgagtatgcctgtactggcctctttcagtaaggttgacattcctattaggactggacatccaaccgtcctggagtccaacagcgacttcaaagtcatccccacttttgtgaccgaaaacaatgtgataaaaagtttgaccggtagctatgccaagctcccctctcccgaaccttcaatgagtcctaagatgcatcgccgacgtagccggacctctagcgcttgtcacatactgattaataaccccatcaacgcctgcgaattgagcccaaaaggcaaagaacaggcaatggatcttattattcaggacacagatgagaacactaacgttcccgagattatgcccaaattgcccacggaccttgcaggtgtctgtagctccaaagtttacgtcggaaaaaataccagtgaagttaaggaggacgtcgtactcggtaaatcgaaccaggtgtgtcagtcctccggaaaccatctggagaataaagtgacccacgggttggtgactgtagaaggacagttaacgtctgacgagcgaggggcccacattatgaactcaacgtgtgccgctatgcctaaactgcacgagccttatgcaagttcccaatgcatcgcgtcaccaaatttcggaacggtatccggtctgaaaccagcaagtatgctggagaagaattgttctctgcagaccgagctgaataagtcctacgacgtgaaaaaccccagtcccctcctgatgcagaaccagaacactcgacagcagatggatacccccatggtgtcctgtggtaacgagcaatttctggataatagcttcgaaaaagtgaagaggcggctagacctggatatcgacggcttgcaaaaggagaactgtccgtacgtgatcaccagcggtattactgagcaggaaaggcagcatcttccggaaaagaggtaccctaagggcagtggctttgtcaataagaacaaaatgcttggtacttcaagtaaagaaagcgaagaattgctcaaatctaagatgctggccttcgaggaaatgcgcaagagattagaggagcaacatgcccagcagttgtctctcttgattgccgaacaggagcgcgaacaggagagactccagaaggagattgaggaacaggagaagatgctgaaagaaaagaaggccatgacagccgaagctagtgaactggacattaataacgccgtggagttggagtggagaaaaatcagcgattcaagtctgctggagacgatgctcagccaggcagacagtctgcacacctcaaatagtaatagcagcggcttcactaacagtgcaatgcagtactcctttgtgtctgcgaatgaggcacctttctacctgtggggtagctcaacctctggattaacaaagctgagtgttactcggccctttggaagggcgaagacaagatggtcccaggttttttcactcgaaattcaggctaagttcaataagatcactgcggtcgccaaggggtttctgacccgtagattaatgcagacagacaagctcaagcagctgaggcagaccgtgaaggacaccatggagttcatcaggtccttccagtcagaagccccactgaagagggggatcgtgagcgcacaggatgcctctctccaggagcgggttctggcgcagcttagggccgccctctacggtatccacgacatctttttcgttatggacgccgctgagcggatgtccattcttcaccatgatagggaagttaggaaagaaaaaatgcttagacaaatggacaaaatgaaatctcctagagtggctctttctgcagccactcagaagtcactagataggaaaaaatacatgaaggcagctgaaatggggatgccgaataaaaaattcctggttaaacagaatccaagcgagacgagagtgttgcagcctaatcaggggcagaacgctccggtccatcgattattaagtcgacagggctcaatctgcaggaagaacccaaagaaagctgcaaagtgttgcgataacctgcgccgtcagcatagcctggggtag

SEQ ID NO: 15971 - DNA, 2976 bp, synthetic construct
  source 1..2976: mol_type = other DNA; note = Synthetic coding sequence
atggaagaatatgaaaagttctgcgaaaaatccctcgcgcgaattcaggaggcctcccttagcacagaaagttttctgcctgctcagagtgaaagtatctcactgattcgctttcacggggtcgctatcctttcccccttgctgaatatcgagaagaggaaagagatgcaacaagagaaacagaaggccctggacgtagaagccagaaaacaggttaatcgcaaaaaggcccttttgacacgagttcaggaaatcctcgacaacgttcaggtgaggaaggccccaaacgcatcagatttcgaccagtgggaaatggagacggtgtattctaattcagaggtcaggaatcttaatgtacccgccacctttccgaatagcttccccagccatacggagcatagcacggctgccaaactggataagatcgccggaattctccccttggacaatgaggatcagtgcaagaccgatggaatcgacttagctcgcgactccgaaggcttcaacagcccaaaacaatgtgacagtagtaacataagccatgtggagaatgaagccttccctaagacttcctccgctacgccacaagagacactgatttcagacggaccattttctgtcaacgaacagcaagatcttccactcctggccgaagttataccagacccttatgttatgtctctgcagaacctcatgaagaagtcgaaagagtacatagaaagggaacagtccaggaggtccctgagagggagcattaaccgaattgtgaacgaaagtcacttggataaggaacacgatgcggtcgaagtcgccgactgtgtcaaggaaaagggccagctcaccggtaagcactgcgtgtctgtgattccagacaaacccagtctgaacaaaagcaacgtgcttcttcagggggccagcacccaggcttccagtatgtccatgcctgtactggctagcttctccaaggtggacatcccaatcagaaccggacaccctacagtgcttgagagtaactctgatttcaaagtgatccctaccttcgtgacagaaaataatgtgattaaatcgctcacaggcagctacgcgaagcttccatctcccgaaccaagcatgtcccctaaaatgcaccgaaggcgtagtagaacatcaagtgcttgccacatcctgatcaataaccctatcaacgcctgtgagctgtcacctaaggggaaagaacaggcgatggatctgatcattcaagataccgacgagaatactaacgtcccagaaattatgccaaaactaccgaccgacttggcaggggtttgtagcagcaaagtttacgttggtaagaacactagtgaagtaaaggaagacgtggttctaggtaaaagcaaccaagtatgccaatcctcagggaaccacttagagaacaaagtgactcacgggttagtcacagtcgagggacagcttacctcggatgagcgcggagcccacattatgaattcaacctgcgctgccatgcccaaactgcacgagccatacgccagttcccaatgcattgcttcaccaaatttcgggacagtttctggcctgaagccagcctcgatgctcgagaaaaattgctcactgcaaaccgaattgaataagagctacgacgtcaaaaatccttctccactgttgatgcaaaatcagaataccagacagcagatggacactcctatggtgagctgcggaaacgagcagtttttggataacagttttgagaaggttaaaaggaggctggatctggatattgacggtcttcagaaggaaaattgcccatacgtgatcacctcaggcataacagagcaggagaggcagcacctgcccgagaagcgctatcctaaagggtccggattcgtcaacaaaaataagatgttgggtacgtcatcaaaggagagcgaggagcttctcaagtccaaaatgctggccttcgaggagatgaggaaaaggctagaggagcagcacgcccaacagctgtctctcctgattgctgagcaggaacgcgagcaggagaggctgcagaaggaaatcgaggaacaggaaaaaatgctgaaagagaagaaagcgatgacggcagaggccagcgagctcgacatcaataacgcagtggagctggagtggaggaaaataagtgacagctcacttctggaaactatgttaagtcaggcggattcactccacacaagtaattccaattcttccgggttcacaaatagcgccatgcagtacagctttgtcagcgccaacgaagccccgttctatctttggggatcgtccacttcaggcctgacgaagctgtcagtcacaagaccattcggtcgggcgaagaccaggtggtcgcaagtcttctcgctcgagatccaagccaaattcaacaagatcactgcagtcgccaaaggctttctgacgcggagactgatgcagaccgataagttaaaacagttaaggcagacagtcaaggataccatggaattcattcggtcttttcagagcgaagcgcctttgaaacggggcatcgtttcagcccaggatgccagtctgcaggaaagagtgctggcccagctccgagctgcactgtacggaattcacgatatttttttcgttatggatgccgccgagaggatgtcgattctccaccacgatcgtgaggtacggaaagaaaaaatgctgcgccagatggataaaatgaagagccctcgggtggccctctcagcggctactcagaaatcacttgatcgcaaaaagtacatgaaagccgccgaaatgggtatgcctaacaagaagtttctcgtgaagcagaacccctccgagacccgagtgctgcagccaaaccaggggcagaatgcaccggtccacagactcctgtccaggcaggggtcaatctgccgcaagaacccaaaaaaagccgccaagtgctgtgacaatttacgccgccagcattcactgggctag

SEQ ID NO: 15972 - DNA, 999 bp, synthetic construct
  source 1..999: mol_type = other DNA; note = Synthetic coding sequence
atggccacaattaagagcgagctgattaaaaactttgccgaagaagaggcaatccatcacaacaagataagtattgtagggacaggctccgtgggagtcgcctgcgcgatatccatacttctgaaaggactgtctgatgaactcgtgttagtggatgtggacgaaggtaaactgaagggggaaacaatggatctgcaacatggttcccctttcatgaaaatgcccaatatcgtgtcttctaaggattatctggtcaccgccaatagcaacctggtgattattacggcgggggcacggcagaagaaaggcgagaccaggttggacctggtgcaacgaaatgttagtatttttaagctgatgatcccaaacatcacacagtactcccctcactgcaagctccttatcgtaaccaatccagttgatattctcacttatgtggcctggaagctgtcaggattccccaagaaccgtgtgatcggaagcggctgtaatctagacagcgctcggttccgttacttcattggacagagactggggatccattcggaaagctgtcatggcttgattctcggcgaacacggtgatagctcggtaccagtttggagcggtgtcaacattgcaggcgtccccctgaaggacttgaacccggatatcggaaccgataaggacccagagcagtgggagaatgtccataaaaaggtgatcagcagtggctacgaaatggtgaaaatgaaaggatatacaagctggggcatatctctctctgtggctgatctcaccgaatcaattctgaagaatctacgccgcgtccaccccgtctccacgttatcaaaagggctctatggtattaacgaagatattttcttgtccgtgccatgcattctgggggagaatggcattaccgatttaattaaagttaagctgacactcgaggaagaggcatgccttcagaaatcagcagagactctctgggaaatccagaaggagctgaagttatag

SEQ ID NO: 15973 - DNA, 888 bp, synthetic construct
  source 1..888: mol_type = other DNA; note = Synthetic coding sequence
atgatggcaaagaagccccccaagcccgctcccagacgcatctttcaggagaggcttaagataactgcgttacccttgtactttgaaggattcctgttgattaaaagaagcgggtacagggagtacgagcactattggaccgagctcagagggaccacccttttcttttacaccgacaagaaatcgattatatacgtggataagctagacatcgtcgatcttacgtgcttgactgagcagaattcaactgagaagaactgtgccaaatttacactcgtgctgccaaaggaagaggttcaactgaagactgagaacactgagagcggagaggagtggcgtggcttcatactgacagtgactgagctgtcggtgcctcagaatgtttctctgctgcccggtcaagtgatcaagctgcacgaggtgctcgaacgagagaagaagcggcgaatcgagactgaacagtcgacttccgtggagaaagagaaggagcctaccgaagattatgtcgatgtgcttaatcccatgccagcgtgcttctatactgtaagtagaaaagaggctacggaaatgttgcagaagaacccctccttgggtaatatgatcctgcgccccgggagtgactctcggaattattccatcaccattcgccaggaaattgacattccacggattaagcactacaaagtgatgtctgttggccagaactacactattgagcttgagaagccggtgacattgccgaacctgtttagcgttattgattattttgtgaaagagacccgcggcaaccttaggccttttatttgcagcaccgacgagaatacggggcaggagcccagcatggagggtaggagtgagaaactgaaaaaaaacccacacatagcttag

SEQ ID NO: 15974 - DNA, 1368 bp, synthetic construct
  source 1..1368: mol_type = other DNA; note = Synthetic coding sequence
atggagggagtgctttacaagtggaccaactacctttctggatggcagccacgttggtttcttctctgcggcggcattctgagttattacgactcaccggaggacgcatggaaaggctgcaaaggttccattcaaatggcagtgtgcgaaatccaagtgcatagtgtggataacacacgcatggatctaattatcccaggggagcaatacttctatctcaaggcccgctccgtcgctgagcggcagaggtggctggttgcccttggcagtgccaaagcctgtctgactgactctcggacacagaaagagaaggaattcgctgagaacactgagaatctgaaaacgaagatgtccgaactcagattgtattgcgacctgctcgttcagcaggtcgataaaaccaaagaagtgaccacgacgggagtgtcaaactctgaggagggaatcgacgtaggcacactgctgaagtccacttgcaatacctttcttaagacactagaagaatgtatgcagattgcaaacgccgccttcacaagcgaattgctgtacagaaccccgcctggctcaccgcaacttgccatgctgaaatcttccaaaatgaaacacccaatcattccaattcacaacagccttgaacgtcaaatggagcttagtacgtgcgagaatggtagtctcaacatggaaatcaacggagaagaagaaatcttgatgaagaacaaaaatagcctgtacctaaagtctgccgaaatcgattgttccatatccagcgaagagaacacagatgataatatcaccgtgcaaggcgagatccggaaggaagatggaatggaaaatctgaaaaatcatgacaataacctgacccaatctggttccgatagcagctgttcaccagagtgtctatgggaggaaggaaaggaagtcatccccacatttttctccacaatgaatacttcattctccgacattgagctgctggaggactctggcatcccaacagaggctttcctcgccagctgctacgctgtcgtgcccgtgctagataagcttggcccaactgtatttgcgcccgtgaagatggatctggtgggcaatattaagaaggtgaaccagaaatacattaccaacaaggaggagttcactactctgcagaagatcgttctgcatgaagtggaagctgacgtggcccaggtgcggaattccgccaccgaagccctgttgtggctgaaaagaggactgaagttcttaaagggcttcctgaccgaggtgaaaaacggggagaaagacattcagacagcacttaataacgcttacggaaaaactctacgtcagcaccatggatgggtggtgaggggcgtctttgccgtttag

SEQ ID NO: 15975 - DNA, 1320 bp, synthetic construct
  source 1..1320: mol_type = other DNA; note = Synthetic coding sequence
atggaaggggttctgtataaatggactaactacctgagtggctggcaaccaaggtggtttctcttatgtggaggcattctgagctattacgattcacctgaagacgcctggaaagggtgcaaaggatcgatccagatggctgtgtgcgaaattcaagtgcactccgtggacaatacacgcatggatctcatcattccaggcgagcagtatttctaccttaaggcccggagcgtggccgaacggcaacgttggctcgtggctctgggctccgccaaggcttgcctaacagacagtagaacccagaaggaaaaggagtttgcagaaaatacagaaaatcttaagacaaagatgtctgaactgcggctgtactgcgatttgcttgtgcagcaggtagacaagactaaggaggtgaccacaacgggggtgagtaactctgaggaaggtattgatgttggtactctgcttaagagtacctgtaatacatttctaaaaacactggaggaatgcatgcagatcgccaacgctgccttcaccagcgaattgctatacagaacccctcccggtagtccccagctcgccatgttgaaatcatccaagatgaagcatcccattattccaatccataattccctagagcggcagatggagctgtccacctgcgagaacggctcactcaatatggagatcaacggtgaggaggaaatcctgatgaagaacaaaaattccctatatctgaaatcagctgaaatcgattgttcaataagttctgaggagaatacagacgataatattacagtgcagggcgagatccgcaaagaggacggcatggagaatctaaagaatcatgataataacctcacgcagtccggcagcgactcctcttgctcccctgagtgtctctgggaggaggggaaggaggtgatccccaccttcttcagcacgatgaacacatccttttccgatatcgagctgttggaggatagtggcattcctacagaagcttttctggcttcgtgctacgcagtggtgcccgtgctcgataagctgggccccactgtctttgcccctgtgaagatggacctggtcgggaacattaagaaagtgaatcaaaagtacatcaccaataaggaagagttcaccactctccagaagatcgtgcttcatgaagtcgaggccgatgtcgcccaggtcaggaacagcgcaactgaagcattgctgtggctgaagaggggactgaaattccttaagggctttctgacagaggttaaaaacggcgagaaggacatccagacagctctgtcagtggggatgtgggtgtag

SEQ ID NO: 15976 - DNA, 984 bp, synthetic construct
  source 1..984: mol_type = other DNA; note = Synthetic coding sequence
atgtgctctacaagcggctgcgacctcgaggagattccgctcgatgacgacgacctcaatactattgaattcaagatcctggcctattatacacgtcaccatgtcttcaagtcaaccccagcactgttcagcccaaaactattaagaacgcgtagtctgagccagagaggcctcggcaactgctccgcgaatgagtcatggaccgaagttagttggccctgtcgtaactcacagtctagtgagaaagcaataaacctggggaagaagaagtcctcctggaaggctttttttggcgtcgtggaaaaagaagactcacagtctacgcctgcgaaggtgtccgcccaggggcaaagaaccctggaataccaggacagccattcccagcagtggagtcgatgtctgtctaatgttgagcagtgtttggagcatgaagccgtggacccgaaggtgattagcattgccaaccgtgtggcagagatcgtctactcctggccgcccccccaggccacccaggccggcgggttcaagagcaaggaaatcttcgtgacagaggggctctccttccagctccagggccatgttccggtcgcatctagctcgaaaaaggatgaagaagaacagatccttgccaagattgtagagctcttgaagtactcaggcgaccagcttgagaggaagcttaaaaaggataaagccttgatgggccactttcaggatggactttcatacagtgttttcaagacaataaccgaccaggtgttgatgggcgtagatcctaggggcgaaagcgaggtgaaagcacagggctttaaggccgccttggtgatagacgtgacagccaagttgaccgccatcgataaccaccccatgaatagagtcttggggtttgggaccaaatacttaaaagagaatttctcgccatggattcagcagcatggtggatgggagaaaatcctcggaatctctcacgaagaagtagattag

SEQ ID NO: 15977 - DNA, 5229 bp, synthetic construct
  source 1..5229: mol_type = other DNA; note = Synthetic coding sequence
atgatggagggcaacgggactgagaacagctgcagccgcactaggggctggctgcagcaggataacgacgcaaagccgtggctgtggaagttttcgaattgcttctcacggccagagcagacgctcccccacagtccccaaacaaaggagtacatggaaaataaaaaagtggcagtggaacttaaggacgttccaagtccacttcatgcgggtagtaagctgttcccagccgtgccgctccctgatatcagatctctgcaacagcctaaaattcagctctcctcagtccctaaggttagctgttgtgcccactgcccgaatgagccctctacttcacctatgcgattcggaggcggcggaggtggcagcggaggtacatccagccttatccaccctggggccctgcttgattcccagtctacccgcaccataacttgtcaggttggttcaggttttgcctttcagtcagcctcttcactgcagaatgctagcgctcggaacaatctggcaggtatcgcaagcgacttccccagcatgtgtctggagagcaacctgagcagctgtaaacacctgccctgctgtggaaaacttcattttcagtcatgtcacgggaatgtccataaactccatcagtttcccagtctgcagggctgcacctccgctgggtactttccctgctctgacttcacatccggggctcccggtcacctggaggaacatatttcgcagtccgaactcacccctcacctctgcacgaactctttgcatctgaatgtggttccacctgtttgtctgaagggaagtctctactgcgaagactgcctcaataagcccgcccggaactccattatcgacgcagccaaagtttggcctaatatcccaccaccaaacactcagcccgccccactggcagtgccgttatgtaacggttgtgggacaaaaggtactggaaaagaaactacactcctcctggctacttccttgggcaaagccgcatcaaagttcggctcaccggaagtagctgtggccggacaggtactggagaacctgcctccaatcggggtgttttgggatatcgaaaactgtagcgttccaagtggtcgctcagctacggccgtagttcaacgcatccgcgagaaattcttcaaggggcacagagaggccgagttcatctgcgtgtgcgatatcagtaaagaaaataaggaggtcatccaggaactcaataattgccaggtgacggtggcccatataaatgctaccgcgaagaacgccgctgatgacaagctgagacagtccctgagaagattcgcaaacactcataccgcccccgccaccgtagtgctggtgtccaccgacgtcaattttgccctcgaattatcagatctccgccaccggcatggtttccatatcattctagtgcataaaaatcaagccagcgaggctctgctgcaccatgcaaatgaactaatcagatttgaggagttcataagcgatctccctccccggctccccttaaagatgcctcagtgccacacactgctgtacgtgtataacctcccagctaacaaagacggaaagagcgtgagtaatcgcctcagacggttgagtgacaattgtggaggaaaagtcctgtctatcactggatgctccgccatcctgagatttatcaaccaggattccgcagagagggcacaaaaacggatggaaaacgaagacgtttttgggaaccgcataatcgtctcctttacccccaagaatcgagaactctgtgaaacaaagagctctaatgcgattgccgacaaggtgaaaagccccaagaagctcaagaatcccaaactgtgtttaataaaagacgcctccgagcagtcatcatcggcaaaagctaccccagggaagggctcacaggcaaatagcggaagcgcaaccaaaaacactaacgtgaaaagcctgcaggaactgtgcagaatggagtccaagactggtcatagaaacagcgaacatcagcaaggacatttgcggttagtggtgccaacccacggcaatagctctgccgctgttagtacccctaagaacagtggagtcgccgaacctgtatacaagacaagtcagaagaaggagaacttgtccgcacgatcagtaacgagcagtccagttgaaaagaaggataaggaggaaactgtgtttcaggtgtcctacccttctgcattttcaaagttagtggcttctagacaggtgtcaccattattggcaagtcagtcctggtcctcacggtccatgtccccaaatttgctgaaccgtgccagccctttggccttcaatatcgccaattcatccagcgaggccgattgccccgacccgttcgctaacggggctgatgtgcaagtatctaatattgactatcgtttgagccgtaaggaactgcaacaactgctacaggaagcctttgcccgacatggcaaggtcaaaagcgttgaactcagcccccataccgactaccagctcaaggccgtcgttcaaatggagaatctccaggatgctatcggagcagtgaatagcctccaccgatataaaattgggtccaagaaaatcctggtcagcctcgcgaccggggccgcctccaagagcctgagtctattgagtgccgaaaccatgtctgtgctgcaagatgcgcccgcctgttgcctgcctctgtttaaatttaccgatatttatgagaagaaatttggccacaagctgaatgtgagcgatctttacaaactcaccgatacagttgcgatccgagagcaagggaatggacggttagtgtgcttgctgccaagctctcaggccagacagagtccactgggtagtagccagtcacacgatggaagctctaccaactgctctcccatcatcttcgaggagctggaataccacgaaccggtctgccggcagcactgctcgaataaagatttttcggagcacgaatttgacccggatagctataagatacccttcgtgatcctgtcgctcaagacttttgcccctcaggtgcacagtctgctgcagactcatgaaggcactgtgcccctgttaagctttccagattgctatattgccgagtttggagacctggaagttgtacaagagaaccaggggggggtccctctagaacatttcattacctgcgtacctggagtgaacattgccaccgcacagaacgggatcaaagttgtcaaatggatccacaataaaccgccgccccccaacacagacccatggcttctgcgaagcaaatctcctgttggcaatcctcaactgattcagttcagtcgggaagttattgatttgctcaagtcacaacctagctgtgttatccccatctctcattttattccttcatatcatcatcactttgccaagcaatgcagggtcagcgactatgggtattcaaagctgattgagctgctggaggccgtaccgcatgttctccagatcttagggatgggcagtaagcgactgctcactctcacacatcgcgctcaggtaaagcgatttactcaggacctcctcaagctgctcaaaagtcaggcctccaaacaggttatagtgcgtgagttttctcaggcgtatcattggtgtttttctaaagactgggacgttactgaatatggtgtctgtgaacttatcgacatagtatcagaaatacccgatacaacaatttgtctgtctcagcaagacaatgagatggtcatttgcatccctaagagagaacggacacaagatgagatcgagcgcactaaacagttcagtaaggatgtcgtggatttgcttcgacaccaaccccacttccgcatgccgtttaataagtttattccgagctaccaccatcatttcggcaggcagtgtaaacttgcatattatggattcacaaaacttcttgagctttttgaagcgataccagatacactccaagtgctcgagtgcggcgaagagaaaatccttactttgaccgaggtagaaaggtttaaggctctggccgcccagtttgtgaaactgttaagatcccaaaaggacaattgcctcatgatgaccgatctgcttacagagtacgctaaaactttcggatatacctttaggttacaggactacgacgtgtcctcaatctccgctctcactcagaaactgtgtcacgtcgtcaaggtggccgacatcgaatccggtaggcagattcagctcattaaccgcaagagtcttcgtagcctgactgctcagctgttggtgctgctgatgagctgggaaggaaccactcacctgagcgtggaggagctcaaaagacattacgaatccactcataacactcctttgaatccttgcgagtatggtttcatgacactgaccgagctgctgaaatcgctgccttatcttgtcgaggtattcaccaatgataagatggaggagtgcgtcaagctcacttccttatacttgttcgccaaaaacgtgaggtccctactgcatacttatcactatcagcaaatcttcctgcacgagttcagcatggcttacacaaaatatgtcggcgagacactacagccaaagacttatggccacagcagcgtggaggagctgctaggagccatacctcaagtcgtctggatcaagggacacgggcataagcgcatcgtagtactcaagaatgacatgaagtcaaggctcagttcactctctcttagccccgctaatcacgagaaccagccttccgagggtgaaagaatactggaggtgccagaaagtcataccgcctcagagcttaaactgggagccgatggtagcggcccaagccacactgaacaggagttattgcgcctgacggacgacagtcccgtagatctgctttgcgcgccagtccctagctgtcttccaagtccccagttgcgccccgacccagtgattctacagtctgcagatctgatacagtttgaggaaaggccacaggaaccatccgagattatgatcctcaatcaggaggagaaaatggaaattcctatccctggtaagagtaagacattgacctccgactcgagcagcagctgtattagcgcggcagttcctgtgcccccgtgtccatcatccgaaacatctgagtcccttcttagtaaggatcccgtggagagcccagccaagaaacagcccaaaaatagggtgaagcttgctgctaacttctccctggctccaataacgaaattgtag

SEQ ID NO: 15978 - DNA, 831 bp, synthetic construct
  source 1..831: mol_type = other DNA; note = Synthetic coding sequence
atgtgttccacaagcggctgcgacctggaggagatcccactggacgacgacgacctcaatacgatcgaattcaaaatacttgcctattacacccggcatcacgtgttcaagagcacccccgcactgttttctcccaagctgctccgcacacgatctttaagtcagagggggctagggaattgctcggccaacgaaagctggaccgaggtgagctggccttgccgaaacagccagtcctcggagaaggccatcaacctggggaagaaaaagtcctcatggaaggccttcttcggcgtcgtcgaaaaggaggatagccaatccactccagcaaaggttagtgcacaggggcagcggacactggagtatcaggacagccacagccagcaatggagcagatgcctcagtaacgtcgaacaatgtctagaacatgaagccgtcgatccaaaggttataagcattgcaaatcgggtggctgaaattgtctacagttggccgccgcctcaggccactcaagccggaggatttaagtccaaggaaatctttgtgaccgagggactctcgttccagctgcagggacacgtccctgtggcgagttccagcaagaaggacgaagaggaacagattctggccaagattgtggagttgctgaagtactctggcgatcaattggaacgcaaagagaaagaatgggaggagagtgccaagactaaaatcaagatggctcttctgtggagatccagtgggggtgggccccgggttctgagtattcccgaggcgtttatgaagaatagctttactttgacccctccaggtttcagcgaacacaactag

SEQ ID NO: 15979 - DNA, 552 bp, synthetic construct
  source 1..552: mol_type = other DNA; note = Synthetic coding sequence
atggccagtaacaaaactaccctccagaagatgggaaagaaacagaatggtaagagcaagaaagtggaggaggctgagcccgaagagtttgtggtcgagaaggttctggacaggcgggtggtgaacggcaaagtcgagtactttctaaaatggaaggggtttactgacgcagacaatacctgggagcctgaggaaaatctggactgtcctgaactgatcgaggccttcctgaacagccaaaaagccgggaaagagaaggatggcactaaaaggaaatccctcagcgactctgagtctgatgacagcaagagtaagaaaaaaagagacgccgcagacaaacctcgcggattcgctcgtggcctcgaccccgagagaatcatcggtgctacagatagctctggggagttaatgttcttgatgaagtggaaggattcagacgaagccgatctcgttctggctaaagaagccaacatgaaatgcccccagattgtaattgcattctacgaagaacgattaacctggcattcatgccccgaagacgaggcccagtag

SEQ ID NO: 15980 - DNA, 960 bp, synthetic construct
  source 1..960: mol_type = other DNA; note = Synthetic coding sequence
atgctgaggtgcggtcagatgattttcgcccaagcattggtttgccgccacctgggaagggattggagatggactcagcgcaagagacagcctgatagctatttctccgtacttaacgctttcattgaccgaaaagatagctattatagtattcaccaaatagctcagatgggcgttggcgaagggaagtcaattggccaatggtatggcccgaatactgtggcccaggtgctaaaaaagctcgctgttttcgacacgtggtcaagtcttgcggtccacatcgcaatggataacacagtggtgatggaggaaattcgtcgtttatgtagaacctccgtgccgtgcgcaggtgctaccgccttcccagctgactctgatcgtcactgtaatggcttcccagcaggcgcggaggttacaaatagaccatcgccatggcgccccctggttttgctgatacccctccgactgggcctcacggatatcaacgaggcttatgtggaaacactcaagcactgtttcatgatgccgcaaagcttaggcgtgatcggcggcaagccaaatagcgcacactactttattgggtacgtcggagaggaactcatctatctggacccgcacaccacccaaccagctgtcgagcccactgatgggtgttttatccccgacgaatcctttcactgccaacatccaccatgccggatgtcaatcgcggagttggatccctcaattgctgtggggttcttttgtaagacagaggacgactttaacgattggtgccagcaggtaaagaagctgtcactgctgggcggagctctgcctatgttcgagctcgtagaactccagccctcccatctggcatgcccagacgtactcaacctatctctagattctagcgatgttgaaaggctcgagagattcttcgattcagaggatgaagatttcgagattcttagtctgtag

SEQ ID NO: 15981 - DNA, 564 bp, synthetic construct
  source 1..564: mol_type = other DNA; note = Synthetic coding sequence
atgaatggacgagctgactttagagaaccaaacgcagaagtgccccggcctataccccacatcgggcccgactatatccctaccgaagaggagaggagagtgttcgccgagtgcaatgacgagtccttttggttccgctccgtccctttggccgcgacttctatgctgatcactcaaggcctcattagcaagggaattttgtccagtcaccccaaatatggatctatcccaaagctcattctggcttgcatcatgggctactttgctgggaagctcagctatgtgaagacatgccaggagaagttcaagaagcttgaaaattcgccactgggcgaagccttaagatcgggacaggcccggcgcagttcccctcccggtcactactatcagaaatccaagtatgactcttccgtgtctgggcaatctagcttcgtgaccagccccgctgccgataacattgaaatgctgccacattacgagccaatacctttctctagtagtatgaacgagtctgcccccacaggaattacggatcacatcgttcaagggcggaacttctcttag

SEQ ID NO: 15982 - DNA, 270 bp, synthetic construct
  source 1..270: mol_type = other DNA; note = Synthetic coding sequence
atgagcgaacaaggggatctcaatcaggcgattgcagaagaggggggaaccgagcaggaaaccgcaacacctgagaacggcatcgtgaaatccgagtctctagacgaagaggaaaaactagagctccaaaggaggctcgaagcacaaaaccaggaaagaaggaaatccaaatccggtgccgggaaaggcaaactgactaggtccctggctgtgtgtgaagaatcctccgcccggcctgggggtgagtccctgcaggaccagaccctgtag

SEQ ID NO: 15983 - DNA, 270 bp, synthetic construct
  source 1..270: mol_type = other DNA; note = Synthetic coding sequence
atgtctgaacagggggatctcaaccaggcgattgcagaggaggggggcacggagcaggaaacagccacccccgaaaacggaatcgtcaaaagcgagagccttgatgaggaagaaaagctggagttgcagcgcaggctggaagcccaaaatcaggagcggaggaagtctaaaagtggggccggaaaggggaagcttaccagatccttggcagtttgtgaggagtcatccgcccgacctggcggcgagtcactgcaagaccagacgttgtag

SEQ ID NO: 15984 - DNA, 1473 bp, synthetic construct
  source 1..1473: mol_type = other DNA; note = Synthetic coding sequence
atggaggattctgccagcgccagtctgtcctccgcagccgctacagggactagcaccagtacacccgccgcacccaccgcgaggaagcagctggataaagagcaagtcaggaaagcagtggatgccctgctcacacactgcaagagccggaagaacaactatggcttattactcaatgagaacgagtcattatttttgatggtggtcctgtggaaaattccgtctaaagaactccgggtccggttgacgcttccacactccattcgctctgatagtgaagacatctgcctttttactaaggatgagcccaacagcacccctgaaaagacagagcaattttacaggaaactcttgaataaacacggtatcaagaccgtgagtcagataatatcgttgcagacactgaaaaaggagtacaagtcatatgaggcaaagctgcgactgctcagttctttcgacttctttcttacggatgcccgcattcggcggttgcttccctctttgattgggagacacttttatcaaaggaagaaggtcccggtttccgtgaaccttctatccaaaaatctttccagagagataaacgattgcattggtggtaccgtcctgaatatcagtaagtctgggtcttgctctgcgatccgaatcggacatgttggaatgcaaatagaacacattattgagaacatcgtggccgtgacgaaggggctgtccgagaaactgccagagaaatgggagagtgtgaaactgctgtttgtgaagacagagaaatcggcggcattaccgattttctcctctttcgtgagcaactgggatgaggccacaaaacgttctctgctgaacaagaaaaaaaaggaagctaggaggaagcgaagggagcgtaatttcgaaaaacaaaaggaaagaaaaaaaaaacgacaacaagctagaaaaactgcctctgtgttgagtaaggacgacgtggctcccgaaagcggtgatacgaccgtgaaaaaacccgagagtaagaaggagcagactcctgagcatggcaagaaaaagaggggaagaggcaaggcccaagtaaaggctactaacgagtctgaagacgagatccctcagctcgtcccaatcgggaaaaagaccccggcaaatgagaaggttgagattcagaaacacgctacaggaaaaaaatccccagctaaaagccctaacccttcgactccaaggggtaaaaaaagaaaagccttgcctgcgagcgagaccccaaaagcagcggagtccgagactcctgggaagtctcctgagaagaaacctaagattaaggaggaggcagtaaaggagaagagtccttccctgggcaaaaaggatgccagacagacacccaagaagccagaggctaaatttttcacaacacccagtaaaagtgttcgcaaagcatctcatacgcccaagaagtggcctaaaaaaccaaaagtgccacagagcacctag

SEQ ID NO: 15985 - DNA, 495 bp, synthetic construct
  source 1..495: mol_type = other DNA; note = Synthetic coding sequence
atggcagagccagcgtccgtcgctgctgaatccctagccggtagtcgagcaagagctgctaggactgttctgggtcaggtcgtgctacctggcgaggagcttcttctccccgaacaagaagatgctgagggtcctggcggcgcggtcgagagacctctgtctttgaatgctcgagcctgcagccgggtccgcgtagtttgtggccccggcttgaggcgttgcggggataggctgctcgtgaccaaatgtggccgccttcgccacaaggagccgggctccgggtcgggtgggggagtctattgggtggacagccagcagaagagatacgtacctgtgaagggagaccatgtcatcgggattgtcactgccaaaagcggggatatatttaaagtggacgtgggcggtagtgaacccgccagcttgagctacctctcttttgagggggctacaaaaaggaacagacctaacgtgcaggccattagctcccggctgtag

SEQ ID NO: 15986 - DNA, 2508 bp, synthetic construct
  source 1..2508: mol_type = other DNA; note = Synthetic coding sequence
atgacatgcaataaacacggctgcagacaggctttccacgtgacgtgtgcgcagtttgccggactgctatgcgaggaagaaggaaacggcgctgataatgtccaatattgcggttattgcaagtatcatttctctaagttgaaaaagagcaagagaggctctaacagatcctatgatcagagtctaagcgactcgagctcacatagccaggacaaacatcatgagaaagagaaaaaaaagtataaagagaaggacaaacacaagcagaagcacaagaaacagcctgaaccctcacctgccctggtcccttccttgactgtcacgaccgagaagacctatactagcacaagtaacaactctatcagcggctcattgaaacggctcgaggacaccaccgcgcgctttacgaacgccaactttcaagaggttagcgctcacacgtcttctggaaaggacgtcagcgaaacacgtgggtcagagggcaaagggaagaaatcaagtgcccactcctcagggcagcgcggccggaagcctgggggggggcggaatccaggtacaacagtgagtgcagctagtccatttccccagggttcttttagtgggactcccggatctgtgaagtcttcctctgggtcatcagtccagtcacctcaagattttctgagtttcaccgacagcgatctaagaaatgacagctatagccatagtcagcaaagtagcgccaccaaggatgttcacaagggcgaatccggtagtcaggagggaggcgtgaattcctttagtactctgatcggtctgccatccactagcgctgtgactagccaaccgaaatctttcgaaaatagccctggagatcttggaaactcatctctgcccaccgccggctataagcgcgcccagacctctggcattgaggaagagacagtcaaggaaaaaaaacggaagggcaataaacagagtaaacatggacccggccgtcccaagggcaataagaaccaagagaacgtttcacacctctccgtttctagtgccagcccaacttcctccgttgccagcgcagctgggtccattacaagctcttcgctccaaaaaagtccaacgcttctgcgaaatggcagcttacagagtctttccgtgggatcttcacctgtgggctccgaaattagcatgcagtaccgccacgatggggcatgtccaacgacctctatttacaactcaaatgacgtggccgtgtcttttccaaatgtggtgagcgggtcaggttctagcacgccagtgagctcttcacacttaccacagcagagcagtggacatctccagcaggtgggagcccttagtccatctgcggtctcctccgccgcgcctgctgtcgctaccacacaggccaacactttaagcgggtcaagtttaagccaggcccccagccacatgtatggtaataggtccaatagttccatggccgctctgatcgcgcaatccgaaaataaccagaccgatcaagacctcggtgacaattcaaggaacttagtcggtcgagggagttccccgcgggggtccctaagcccccgcagcccggtgagcagcttgcagatccgctatgaccagccagggaattcctctctggaaaacctccctcccgttgctgcttctattgaacagctgttagaacggcaatggagcgagggacaacagttcctgctggagcaaggaactcccagcgatattctcggaatgcttaagagcctgcatcaactgcaggtggagaatagaagactggaggagcagatcaaaaacctgacagcaaagaaggagcggttacaacttctaaatgcccaactgtctgttcccttccctaccatcaccgccaatccctctccctcccaccagatccatacgtttagcgcccaaactgcccccacaacagatagcctgaattcctcgaagtccccccacattgggaatagttttctcccagataactccttacccgtgctgaaccaggatctgacctcatccggacaaagcacatccagcagttcagcgctaagcaccccccctccggccggacagtcacctgcacagcagggatcaggggttagcggggttcaacaagttaacggagtgaccgtgggcgccctggccagcggcatgcaaccggttaccagtacgattcccgccgtcagcgccgtcggcgggattatcggcgctctgcctggaaaccagttggccattaacgggatcgtgggcgccttaaacggggttatgcagactcctgtgacaatgtctcagaatccgacccccttgacccatactacagtcccccccaatgccactcatccgatgccagcgactctgactaattcagcatcaggcctcggcctcttgagcgaccagcagcgccaaatcctgatccatcaacaacagttccagcaactgcttaactcacagcagctgaccccaaatatggtgaaagagttttctgctcagatcattgcatggaggccatag

SEQ ID NO: 15987 - DNA, 1620 bp, synthetic construct
  source 1..1620: mol_type = other DNA; note = Synthetic coding sequence
atggcaacatcagcgccactccgaagcctggaagaggaagtgacttgtagtatctgcctggattacttacgtgatccggtgactattgattgcggccatgttttttgcagaagctgtaccactgacgtgcgcccaatcagcggatcaaggcctgtttgcccactgtgtaagaagcccttcaagaaggagaacatccggccagtttggcagctggcctctctcgtcgaaaatattgaaaggctgaaggtagacaaagggcggcaaccaggcgaagttactagagagcagcaagatgcaaagttgtgtgagcggcaccgcgagaagttacactactattgtgaggatgacgggaaacttctttgtgtgatgtgcagggagagccgggagcatcggccacataccgcggtgctgatggagaaggccgcgcagcctcaccgggaaaagattcttaaccatctgtcaacactgcgccgtgacagggataagatccagggttttcaagccaaaggcgaggccgacatactcgctgccctcaagaaattacaagatcagagacagtacatcgtcgccgagttcgagcaggggcatcaattcttgcgcgaaagggaggaacatctactcgaacaacttgcaaagctggaacaggaacttaccgaaggtcgggaaaagtttaaatccagaggagttggtgagctcgcccgtctggccctggtcatttctgaactcgagggaaaagcacaacagcccgcagcagagctcatgcaggatactagggatttcctgaaccgatatcctcgcaagaagttctgggtgggcaagcccatcgcgagagttgtgaaaaagaaaactggagagttttctgataagctactgtccttgcagaggggtctgcgtgagtttcaggggaagctgctgagggatctggaatacaagacggtgagtgtaacgctcgatccacagtctgctagcggatatctgcagctttcggaagactggaaatgtgtcacttatactagtctttacaagagcgcatatctccacccccagcagtttgactgcgagcccggggttctaggcagcaaggggtttacttggggtaaagtttattgggaagtggaagtggagagagaaggttggtccgaggatgaggaggagggcgacgaggaggaagagggtgaggaagaggaagaagaagaggaggcagggtatggagacgggtacgatgattgggagaccgatgaggacgaggagtccctcggcgatgaggaagaggaggaagaagaggaggaagaagaggtacttgagtcatgcatggttggggttgctcgggatagtgtcaagagaaaaggcgatctgtcactgcggccagaggatggagtgtgggccctgcgacttagttcaagtgggatttgggccaacaccagccctgaggctgagctgttccctgccctgagaccaagacgcgttggcatcgcactggactatgagggtggcaccgtaacgtttactaacgccgaaagccaggagctgatttacacattcaccgcaaccttcacaaggcggctggtaccttttctctggctgaagtggcctggcacgcggctgcttctgcgaccgtag

SEQ ID NO: 15988 - DNA, 444 bp, synthetic construct
  source 1..444: mol_type = other DNA; note = Synthetic coding sequence
atgtcttcagagccacccccaccacctcagccccccacacaccaggctagcgtgggcttgctggacacaccccgaagtcgcgaaaggagccccagtccgctgcgaggaaacgtggtgccttcaccgctcccaaccagacgcacacggacattttccgccaccgtgcgcgcgtcccaggggcctgtttacaagggcgtgtgcaaatgtttctgtcggtcaaagggtcatgggtttataactcccgcagatggtggcccagatatctttcttcatattagcgacgtcgagggggagtacgtccccgtggaaggcgacgaagtgacgtacaaaatgtgttcaattccccctaaaaacgagaagctccaagcagtggaagtggtcatcacccacctcgcacccggaactaaacacgaaacctggtccggccacgttattagctcatag

SEQ ID NO: 15989 - DNA, 951 bp, synthetic construct
  source 1..951: mol_type = other DNA; note = Synthetic coding sequence
atgaccccctctgagggggcaagggcaggcacaggacgcgagctcgaaatgctcgactctctgttagctttaggaggcctggtactcctgcgtgatagcgtcgagtgggaaggacgctcactcctcaaggccttagtaaaaaaatctgctctgtgcggagagcaagtacacatcctcgggtgcgaggtctccgaggaggaatttagggaaggcttcgattctgacatcaataataggttggtctatcatgattttttccgggacccccttaactggtcaaaaaccgaggaggcatttcctggtggtccgcttggggcactgcgcgccatgtgtaaacgaaccgaccctgtgcccgttacgattgcgctcgactccctgagttggctcctgctgcggttaccttgtaccacattgtgtcaggttcttcatgccgtgtctcaccaggattcttgtccaggggactccagcagcgtggggaaggttagtgttctcggcctgcttcatgaggagcttcatggaccaggacctgtgggcgcgctgtcctcactagcccagaccgaggtgactctcggcggaactatgggccaggctagtgctcatattttgtgcaggagaccacggcagcgaccaactgatcagacacagtggttttctatactacctgacttctccctggacctgcaagagggcccctccgtggagagtcagccatactccgacccgcacataccacctgtcgatcccacaacgcacttgactttcaacttgcacctaagcaaaaaagagcgggaggccagggattctcttattttgcctttccagttctcatccgaaaagcaacaggctctgctccgaccacgccccggtcaggcaacctcgcatattttttatgagcccgacgcatatgacgatctcgatcaggaagaccctgacgacgacctggatatttag

SEQ ID NO: 15990 - DNA, 951 bp, synthetic construct
  source 1..951: mol_type = other DNA; note = Synthetic coding sequence
atgacccctagcgaaggggcgcgggctggaactggcagggaacttgagatgctggattccttattagctcttgggggactggttctcctgcgggacagtgtggaatgggaggggaggagcctcctaaaagccctggtgaagaaatcagccctgtgcggtgagcaggtgcacattctgggctgcgaagttagcgaagaggaattcagagagggttttgattccgatattaacaacaggctcgtatatcacgatttttttagggatcctcttaactggtctaagaccgaggaagccttccctggcggacctctgggggctctgagagctatgtgcaaaaggacagatccagtcccagtgactatcgctctcgattcactgtcttggcttctgctgagacttccctgtacgactctgtgccaggtacttcacgccgtctcacaccaggactcatgtcccggcgactcttctagcgtgggtaaagtcagtgttcttgggctcttacatgaagaactccacggacccggaccggtgggcgctttaagttcactggcccagactgaggttaccctaggagggacaatggggcaggcttctgcccacatcctttgcagaagaccaaggcagcgaccaacagatcagacacagtggtttagtatccttccggatttcagtttggatctgcaggaggggccaagtgtggaaagtcagccatatagcgacccccacatccctccagtggatcccactactcacctgacatttaacctccatctatctaagaaggagagagaagcccgcgactcattgattctgcctttccagttctcctctgaaaagcagcaggctttgctcagaccgcgcccagggcaggctacatcccatattttttatgaacccgacgcctatgatgatctcgatcaagaggaccctgacgacgatcttgacatctag

SEQ ID NO: 15991 - DNA, 810 bp, synthetic construct
  source 1..810: mol_type = other DNA; note = Synthetic coding sequence
atgaaccaggaggatctggaccctgactcaactacagacgtgggtgacgtgacaaataccgaggaggagttgatccgtgaatgcgaagagatgtggaaagacatggaggagtgccagaacaagctcagcctcatcggcaccgaaacgctgaccgattctaatgcccagctgtctctgttgattatgcaggtgaaatgcctgactgccgagctgtctcagtggcagaaaaaaactcccgagactatacccctcactgaagatgtgctgatcactctgggaaaagaggagtttcaaaagctccgccaggatctcgaaatggtcctgtcgaccaaggagtccaaaaacgaaaaattgaaagaggacttagagcgggaacagcggtggctcgacgaacagcagcagatcatggagtccctcaacgtactccactccgaactgaagaataaagtggagacattctcagaatcacggattttcaatgaactaaagacaaagatgctaaatattaaagagtacaaggagaaattgctgagtaccctgggtgaatttcttgaagaccacttccccctgcctgatagatcagtgaagaaaaagaagaagaacattcaggaatcctcagtgaacctgattacactgcatgagatgctggagatcttgatcaataggttattcgatgtgccccatgacccatacgtaaagatttccgacagtttttggcctccttacgtggaactgttgcttcgaaacggcatcgcactcagacatcccgaagatcccacccggatccggcttgaggcgttccaccagtag

SEQ ID NO: 15992 - DNA, 1173 bp, synthetic construct
  source 1..1173: mol_type = other DNA; note = Synthetic coding sequence
atggctaccggcgacttgaaacggtccctgcgaaacttagaacaagtattgcgcttgctcaactacccagaggaggtggactgtgtggggttgatcaagggtgatcccgccgcctcgctgccgatcatttcttacagttttacatcctactctccttatgtgaccgaactgattatggaaagcaacgtggaacttattgctaagaatgatctacgatttattgacgctgtatacaaattattgcgagatcaatttaactacaaacccatcctgaccaaaaagcaattcattcagtgcgggttcgccgagtggaagatacaaatagtttgcgatattttaaactgcgtgatgaagaagcacaaggaattatcatcactacagaagattcctagccagcagcggaaaaaaatatcctccgggaaatccgaacctcctctcggcaacgagaaaatttctgctgaagcggtgggggtggacatttctgggagatttatgacatcaggcaaaaagaaagctgtggtgatcaggcatctttacaatgaagacaacgtggatattagcgaagataccttgagtcccattaccgacgtaaacgaggccgtagacgtgtccgatctcaacgcgaccgaaatcaagatgcccgaggttaaggtgcccgagatcaaggctgagcaacaggatgtgaacgttaacccagaaattacagcactgcagacaatgctggccgagtgtcaggagaatctgaagaagctgacaagcatcgaaaagcgcctggactgcctggagcagaagatgaagggaaaggtgatggtcgacgaaaacacctggacgaatctcctatctcgcgttacacttctggagaccgagatgctgctgtccaagaaaaacgatgagtttatcgaattcaatgaagtcagcgaggattacgcttcttgctctgacatggatctgctgaatccccaccgtaagtcagaggtcgaacgtcctgccagtatcccactgagctctggctactctaccgcgagctctgacagcacaccaagggcatcgactgtaaattattgcggtctcaatgaaatatccgaagagaccaccattcagaagatggagcgaatgaagaaaatgttcgaagaaaccgccgagcttcttaaatgtccaaatcattacttgtag

SEQ ID NO: 15993 - DNA, 381 bp, synthetic construct
  source 1..381: mol_type = other DNA; note = Synthetic coding sequence
atgccgttcttcggtaatactttcagtcctaaaaagacgccccccagaaagtcagcaagcttgagcaatctacattctttggaccggtcaactcgggaggtcgaattgggcctggagtatggatcgcccaccatgaatctggcgggacagtccctgaaatttgagaacggtcagtggatagccgagacaggtgtctcagggggggtagatcggagagaggtgcagaggctacgccgacgcaatcagcagttggaggaagagaacaacctcctcaggcttaaggttgatattctgttagatatgctgagtgagtcgaccgctgaaagccacctgatggaaaaggaactcgatgagcttaggatcagtagaaagcggaaatag

SEQ ID NO: 15994 - DNA, 711 bp, synthetic construct
  source 1..711: mol_type = other DNA; note = Synthetic coding sequence
atgcaggtccaggatgatggagttaatctcattccgttcgctaagtgctcacgcgtcgtaagccggagcccacccccacggctgccaagtcaatctctgcggccaatgccccagcgctacggcgacgtgttctggaagaatctgaatcagagaccgacacctacatggctcgaagaacagcacatccctccaatgttgcgcgcaaccggctgtagccagctcgggctgtacccccccgaacagctgcccccacctgagatgctgtggcggcgaaaaaagagacgaccgtgtctggaaggaatgcagcaacagggattgggaggcgtgccggcacgcgtgcgggccgtcacttaccatctcgaggacctgcgccgccgccagtccattatcaatgagctcaagaaggcccagtgggggagttccggtgccgcgagcgagcctgtggtactgggggaggagggctgcggctttccgtcaacgaatgagtaccccgatcttgaagaggaacgagccacctacccgcaggaagaagacagattcctaaccccggggcgggcacaactactgtggagcccatggtcaccactggaccaggaagaagcctgcgcttcaaggcagttgcacagtttggcatctttttcaaccgtgaccgcccgcaggaaccccctgcacaacccttggggtatggagctggccgcctcagaggaatag

SEQ ID NO: 15995 - DNA, 1680 bp, synthetic construct
  source 1..1680: mol_type = other DNA; note = Synthetic coding sequence
atgaatccgctgttcggaccaaatcttttcttactccaacaggagcagcagggtctggctgggcccttaggggatagcctgggaggagatcattttgctgggggaggggacctgccgcctgccccactgtcaccagctggccctgctgcgtattctccacccggccctggaccagcgcccccagccgccatggctctgcgaaacgacttaggatctaacatcaacgtccttaagactctaaatctgcggtttcgatgtttcctggcgaaggtgcacgagttagagcggaggaacagattgctagagaagcagctgcagcaagcccttgaggaaggaaaacaggggagacgggggttaggtagaagagatcaggctgtgcagaccgggttcgtgtctcctatacgtccactcggcctgcagcttggtgctcgtccggccgctgtgtgttctcctagtgctcgggtgttaggtagcccagcaaggagccccgcaggtccactggctccttcagcggcatccctgagctcctcctcaacaagtacctctacaacttattcttcttccgcccggttcatgccaggcaccatatggtctttctctcacgccaggcgtctgggacccgggctagagccgactctggtccaggggcccggcctctcatgggtgcacccagacggcgtgggcgttcagattgacaccataactcctgagatccgcgcgctgtacaatgtgcttgccaaagtaaaacgagagcgggacgagtataagcggcggtgggaggaagaatacaccgtgcgtattcaactccaggaccgagtgaacgagctccaggaagaggcccaggaagccgatgcctgccaggaagaacttgcactgaaggtagaacagcttaaggcagagctggtggtattcaaggggctcatgagcaacaatctctccgaattagatacaaaaatccaggaaaaagcaatgaaagttgacatggacatctgccgccgaatcgacatcactgcaaaactgtgcgacgtcgctcaacagagaaactgtgaggatatgatccagatgtttcaagtgccttctatgggaggtaggaagcgggaaagaaaggccgcagttgaagaagatacttccctgagtgagtctgaagggcctcggcagcccgacggagacgaggaggaatccactgccttgagcataaacgaagaaatgcagaggatgctgaatcagctgcgggaatatgatttcgaggatgattgcgactctttaacatgggaagagactgaggagacactcctgctctgggaagatttctccggctatgccatggcggctgctgaggcccagggagagcaagaggattctctggagaaggtcattaaggatacagagtcactgttcaagacccgggagaaggagtatcaggagacgatagatcagattgagctagagctggcaaccgctaaaaacgacatgaaccgccatctccacgagtacatggagatgtgcagcatgaagagaggcctcgacgtgcaaatggagacttgccgccgtctgatcacgcaatctggcgacaggaaatcgcctgcctttaccgccgtgcccctgtcggatccgcccccacccccctcggaagccgaagatagtgacagggacgtatcatctgactcttcaatgagatag

SEQ ID NO: 15996 - DNA, 1182 bp, synthetic construct
  source 1..1182: mol_type = other DNA; note = Synthetic coding sequence
atggcttctggacgggctaggtgtacgaggaaattgcggaattgggtggtagaacaggtagagtccggacagttcccgggtgtctgctgggatgataccgcaaaaaccatgttccgcataccatggaaacacgctggcaaacaggattttcgtgaggaccaggatgcagcattttttaaggcttgggcaatattcaaaggaaagtacaaggagggcgatacggggggccccgccgtttggaagacccgactgcggtgtgctctgaataaaagtagtgaattcaaggaagttcctgagagaggccgaatggacgtcgccgaaccctataaggtttatcaattacttccaccagggatagtgagcggtcaaccgggaacacagaaagttccctcaaaacggcaacatagttcagtttcaagcgagcgtaaggaggaagaagatgcgatgcagaattgtactctgtcaccaagcgtgctgcaagactccctgaataacgaggaggaaggagcctctggaggggccgtgcattccgacataggaagcagcagttctagttcctctccagagccacaggaagttacggatactacagaggcccccttccagggagaccagcgcagtctggaattcctccttcctcccgaacccgattacagtctactcttaacctttatctataatgggagagtggtgggcgaggcacaggtgcagagtctggactgcaggcttgttgcggaaccttccggaagcgagtcttccatggaacaggtgctgtttccaaaaccagggccgctggagcctactcagagactgctctctcagctggagaggggtatcctagtggcttccaatccaagggggctatttgtgcaaagactgtgccccattcctatatcgtggaacgcaccccaggcaccccccggccctggtccccatctcctgccttctaacgaatgcgtggagctgttccggacagcttatttctgccgggatctggtacggtattttcagggattgggacccccaccaaaattccaagtaactcttaatttttgggaggaatcccacggctcatcacatacaccacagaatctcatcaccgtgaaaatggaacaggcttttgctagatatctgcttgagcagacaccagagcagcaggccgccatcctctctttagtgtag

SEQ ID NO: 15997 - DNA, 2454 bp, synthetic construct
  source 1..2454: mol_type = other DNA; note = Synthetic coding sequence
atgtggtccctgacagcatccgagggcgagtctactacagctcatttcttcctgggcgccggcgacgaagggctgggcactcggggcatcggaatgcgaccagaggagtccgattctgaactcctggaggatgaggaagacgaagttccaccggaacctcagattatagtgggaatctgcgcgatgaccaagaaaagcaagagcaagccgatgacacagattcttgagcgcctgtgccgtttcgattatctcaccgtcgttatattaggtgaggacgttatcctcaatgaaccagtggagaactggcctagctgccattgcctgatttccttccactcaaaagggtttcctctggataaggccgtagcctactcgaagttacgaaacccatttcttattaatgatttagccatgcagtactatatccaggacaggcgcgaggtgtataggatcctgcaagaagaaggtatcgacttgccacggtacgcagtacttaacagagatcctgcccgcccagaagagtgcaacctgatcgagggggaagatcaagtcgaagtcaacggtgccgtcttccccaagcctttcgtggaaaaacccgtgagtgctgaagaccacaatgtgtacatatactacccctcttccgctgggggcgggagccagcggttgtttagaaagatcggttcacggtcgagcgtttacagtcctgaaagttcagtgagaaagactggatcttacatctacgaggaatttatgccgactgatgggaccgacgtaaaagtgtacacggtgggcccagattacgcccatgcagaagcaagaaagagccctgccctcgacgggaaggtggagcgcgacagtgagggcaaggaaattcagtacccagtgatgctgactgccatggagaagttagtcgccaggaaggtgtgcgtggcatttaagcaaacagtctgtgggttcgatctactgagggctaacgggcacagctttgtctgcgacgtgaacggattctcttttgtcaagaattccatgaaatactacgatgattgtgccaagatccttgggaatacgattatgcgagagcttgccccccagtttcagattccatggagcatcccaacagaagccgaggacatcccgatcgtccccaccacctctggaactatgatggagctgcgatgtgtgatcgcaattatcaggcacggggaccggacccctaagcagaagatgaagatggaagtgaaacatcctaggtttttcgccctttttgaaaaacatggaggatataaaactgggaaacttaaactcaagaggcctgaacagttgcaagaagtgctggatatcactcggctccttcttgcagaactcgagaaggagcccgggggggaaatcgaggaaaaaacgggaaaactcgagcagcttaagtcagttcttgaaatgtatggccactttagtggaatcaacagaaaagtccaacttacctattaccctcatggcgttaaggcatccaatgagggccaggatccccagcgcgagacactggcgcctagtcttcttctggttttgaagtggggaggggagctaaccccagcggggagggttcaagccgaggaattggggagggctttcagatgcatgtacccgggtggacagggcgactacgcgggcttccccggctgtggactcttgcgcctgcatagcacctttcgacacgatctcaagatctacgcctcagatgaaggtagggtgcagatgaccgctgccgcgttcgctaagggtttactcgccctggagggagagctgaccccaatcctggtgcagatggtgaagagcgccaatatgaacgggttgcttgactccgatggagactctctgtcatcctgccagcaccgggtgaaagctcgattgcaccacatcctgcagcaggatgcacctttcggcccagaggactatgaccaactagccccaaccaggtcgaccagcctgctcaatagcatgacaattatccagaatcctgtgaaggtttgtgatcaagtgtttgcgctgattgagaatctgacccaccagattcgggagaggatgcaagatcccagatccgtggatctccagctgtatcattcagaaaccctagagttgatgctccagagatggtcaaagctggagagagattttagacagaagtcgggacgatacgatatctctaagattcccgacatatacgactgtgtgaagtacgatgtgcagcacaatggctctctaggtttacagggaactgctgagcttctgcgcctctccaaggcgctggctgacgtggtgatcccacaagaatatggcatcagtagagaagagaaactggaaatcgcagtcggtttctgcttaccgctgttaagaaagatccttctggacttgcagaggactcacgaagatgagagcgttaacaaactgcaccccctctag

SEQ ID NO: 15998 - DNA, 417 bp, synthetic construct
  source 1..417: mol_type = other DNA; note = Synthetic coding sequence
atgatcttacagcaacccctccagagggggccccaaggcggtgcccagagattgccccgcgctgccttgggggtgacttggggcctggatgccagcagcccattgcgtggggccgtgcctatgtcaacaaagagacgcctcgaggaagaacaggaacccttgcggaaacagttcctgagtgaggaaaatatggcaacccactttagccaattgagtctgcacaatgaccacccatactgctctcccccaatgactttttccccggcacttccgcctttgcgaagcccctgcagtgaactgttactttggcgctatccgggaagtctgatccccgaggctctccgtctcctgcgcctgggggacacgccgagcccaccctatcctgccactccggccggcgacattatggagctttag

SEQ ID NO: 15999 - DNA, 4302 bp, synthetic construct
  source 1..4302: mol_type = other DNA; note = Synthetic coding sequence
atgtggagcctgacggcttcggagggagagagcactaccgcccatttcttccttggagccggtgatgaagggttgggaacaaggggcatcggtatgcggcccgaggagtctgatagcgaacttcttgaagacgaggaggacgaagtgcctccagaaccgcaaatcatcgtgggcatttgtgcgatgacaaaaaaaagcaagagtaagcctatgactcagatactggagcgcctctgcagattcgattatcttacagtggtgatcctaggagaggatgtgatccttaatgaacccgtcgaaaattggccttcatgtcattgcctcatctcctttcacagtaagggcttccccctcgacaaagccgtggcatactccaagttacgcaacccttttttgatcaacgatttagccatgcagtattatatccaggacaggagggaggtctatcgcatacttcaggaggagggcatcgatctccccaggtacgcagttttgaaccgagacccagccaggcctgaggaatgcaatttaatcgagggtgaagatcaggtagaagtcaacggagctgtgttcccgaaaccattcgtggagaagccagtctcagccgaggatcacaacgtttacatatattacccctcaagcgctggaggagggtcacaacgactctttcgcaagattggttctaggagctcagtctatagtcccgagagcagtgtcaggaagacagggagctacatttatgaggagtttatgcctacggatggaaccgatgtgaaggtttacaccgtgggtcccgactacgcacacgccgaggccaggaaatcccccgcgctggatggaaaggtcgaacgcgattccgagggcaaggaaatcagatacccagtgatgttgacagctatggaaaaacttgtcgcaagaaaagtgtgtgtggccttcaaacagactgtgtgtggatttgacctgttgagagccaacggacattcatttgtgtgcgacgtgaatggtttctctttcgtcaagaactcaatgaagtactatgatgattgtgccaaaatacttggaaacacgatcatgcgagagctcgctccccagtttcagatcccctggtccatacccactgaggctgaagacattcctatcgtcccgaccacgtccggcacaatgatggagctccggtgtgtgatcgccatcatacggcacggagatcgaacccctaagcagaagatgaagatggaggtgaaacacccacggttcttcgcccttttcgaaaagcacgggggatataaaaccggtaagctgaaactgaaacggccagaacagcttcaggaggtcctggatattacacggcttcttctcgctgaactcgagaaggagccggggggtgaaattgaagagaagaccggaaaactagagcagctgaaaagcgtgctggaaatgtatggacacttttccggaatcaataggaaggttcagctgacgtattacccccatggcgtgaaggcctccaacgagggtcaggatccacagagggagaccctggcaccaagtctcctcctggtgcttaagtgggggggggagctcactccagccggcagagtgcaggcggaggaactcgggagggcatttcgctgcatgtatcctgggggtcagggtgactatgcaggcttcccaggctgtggcttgttaaggctgcactcaactttccgccacgatctgaagatctacgcatcagacgagggaagagtgcaaatgactgccgccgccttcgcgaagggactcctggccctcgagggcgagctgacgcccatcctcgtccagatggtgaaaagcgccaatatgaacggactgctggattccgacggagactctcttagttcatgccagcatcgggtgaaagcccggctgcaccacattctacagcaagacgccccatttggccctgaggactacgatcagctggcccctactcgaagcacatccctgttgaactctatgactattatccaaaaccccgtcaaggtgtgtgatcaggtctttgctttgattgagaatctgacccaccagattcgtgagcgcatgcaagatcccaggtcagtggacctgcagctttaccactccgaaactctggaattgatgttacagcgctggtcaaagctcgaacgcgatttcaggcaaaagtctgggcgatacgacatttcaaaaattccagatatttatgattgcgtaaaatatgacgttcagcacaatggtagtctgggcctccagggaacagctgagttgctcagactgtccaaggccctcgcggatgtagtgattccacaagagtacggtatctcacgggaggagaagttggagatcgctgtgggcttctgtctgcctctgctgaggaaaatcctcctcgatctgcaacggacccatgaagacgaatctgtgaataagttgcacccattatgttacctgcgatacagtcggggggtgctgagtcccggaagacacgtgcgtaccaggctgtattttactagcgaatcccatgtgcatagccttctttccgtgtttcgctacgggggactactggacgaaactcaggacgctcagtggcagagggcgttggactatctgagcgcaatcagtgagctgaattacatgacccaaattgttattatgctgtatgaagataacactcaggatcccctcagcgaagagcggttccacgtggagctgcattttagccccggggtgaagggcgttgaagaggagggttctgctcctgctgggtgcggttttcgacctgctagctccgaaaatgaagagatgaaaactaaccaggggtcaatggagaatttatgcccaggcaaggcctccgatgagcccgacagggctctgcagaccagtcctcagcctcccgaaggacccggtctgcctcggcgaagcccactaattaggaaccgcaaagccggttctatggaagtcttgagcgaaacttccagttctagacctggcggttatcggctgttttcttcctccagaccccctacagagatgaagcaatctggtttagggagtcagtgtacaggccttttcagcacgaccgtgttaggtggatcaagctcggctcctaacttacaggattatgcacgttctcatggaaaaaagttaccccccgcatcactgaaacacagagatgagctactgttcgtacctgccgtgaagcggttttctgtcagcttcgcaaaacatccaaccaacgggtttgagggttgcagcatggtcccaaccatctatcctcttgaaactctgcacaacgccctgagtctcaggcaagtgagcgagtttctgagcagggtttgccagagacacacagatgcccaagctcaggctagtgccgctctattcgattcaatgcatagcagtcaggcctcagataaccccttcagcccacctcggaccctgcactcacctcctttacagcttcagcagcggtcagaaaagcctccttggtacagttctggtccgtccagcaccgtgagttcagcaggacctagctcccctactactgtggatgggaactctcagttcgggttcagcgaccagccatctctaaactctcacgtcgccgaggagcaccagggactcgggttactgcaagagaccccaggttctggagctcaagagctgtctatcgagggcgagcaggaacttttcgagccaaaccagagccctcaggtgcccccaatggagacctcacagccctacgaggaagtctcccagccttgccaggaagttccggatatttctcagccttgtcaggacatcagcgaagcactaagccagccttgccaaaaggtgcccgacatttcacaacagtgtcaggagaaccacgacaacgggaaccacacttgccaggaggtgccccacatctctcaaccttgccagaagtcatcccaactttgtcaaaaggtgtctgaggaagtgtgtcagctttgcttggagaatagtgaagaggtgtcacagccctgtcagggcgtgtctgtggaggtaggtaagcttgttcacaaatttcacgtcggcgtgggttctctggtgcaggagactctggtggaagtgggctctccggctgaagaaattccagaggaggtgattcagccttatcaagaattcagcgtggaggtgggaagactggcgcaggagacctccgccataaatctgctttcccagggaattccagaaatcgacaaaccttctcaagagtttcctgaggagatagatctgcaggcacaggaagtccccgaggaaattaactag

SEQ ID NO: 16000 - DNA, 435 bp, synthetic construct
  source 1..435: mol_type = other DNA; note = Synthetic coding sequence
atggcagaagtgcaggtcctcgtcttagacggaaggggccatcttctgggaagactggccgctatcgtggctaagcaggtgctcctgggcagaaaggtggtggtagttcggtgcgaaggcatcaatattagtggtaatttttatcggaacaaactgaagtaccttgcttttttgcgcaagaggatgaacactaacccctctcgcggaccataccactttcgagcaccttctcgaatcttctggcgcacagtgagggggatgctgccacacaagacaaagcgcgggcaggcggccctcgacagactgaaagttttcgacggcattccaccaccatacgggaaccgtcccagacgtacctggcggcgaaagctgacgaacacccaaagaagttcccgcccaactgacagttggagcgagccgaataaggattgttag

SEQ ID NO: 16001 - DNA, 408 bp, synthetic construct
  source 1..408: mol_type = other DNA; note = Synthetic coding sequence
atggctgctctgcgaccactcgtaaagcctaagattgtgaaaaagcgcaccaagaagttcatcaggcaccaaagtgaccggtatgtgaaaatcaaaagaaattggcgcaagcctcggggaatagataacagagtgcggcggcggtttaaaggacaaattttaatgcccaacattggatacgggagcaacaaaaaaaccaaacatatgctgcctagcgggttccggaaattcctggtacacaacgtcaaagagctggaggtcctgctaatgtgcaataaaagttactgcgcggagattgcccataacgtctcttcgaagaacaggaaggcgattgtggagcgagcagcccagcttgcgatcagggtcacaaacccgaatgccaggctccgctccgaggaaaacgaatag

SEQ ID NO: 16002 - DNA, 408 bp, synthetic construct
  source 1..408: mol_type = other DNA; note = Synthetic coding sequence
atggctgccctcaggcctctggtgaaacccaagattgttaagaaaaggacaaagaagttcatcaggcaccagtctgacaggtatgtcaagatcaagcgaaattggcggaagcccagaggcatagacaacagggtgcgaagacgctttaaaggccagattctcatgcctaatattggctatggctctaataagaagactaagcacatgctccctagtgggttcaggaagttcctggttcataacgttaaggaacttgaggtgctcctcatgtgtaataagtcatactgcgctgaaatagcccataacgttagcagcaagaacagaaaggccatcgtggagcgagcggcccagctggccatcagagtcactaatcctaacgcccggctacggtccgaggagaacgaatag

SEQ ID NO: 16003 - DNA, 684 bp, synthetic construct
  source 1..684: mol_type = other DNA; note = Synthetic coding sequence
atggagccccaagggtatcctgcctttgggtgggatcacagcctgcacaagagaaagagactaccaccggttaaaaggtccctggtctattacctgaagaatagggaggtacggttgcagaatgagacctcgtacagcagagtgctgcacggctacgcagcgcaacagctgccatctttgctgaaagagagagagttccacctggggactctgaataaggttttcgcaagccagtggctgaatcacagacaagtagtgtgcggcactaagtgcaacacgttattcgtggtggacgttcagacatcccagataaccaagattccaattttaaaggatcgggagccggggggtgtgacacaacaggggtgtggcatacatgctatagagctaaatcccagcaggaccctactcgcgactggtggggacaatccaaactccctggcaatctaccggctgccaacattggatcccgtgtgtgtaggggacgacggccataaagactggattttcagtattgcctggatatccgacaccatggcagtctctggaagccgggatgggagcatgggcttatgggaagtcaccgacgatgttctgactaaatcagatgctagacataatgtatccagggtccccgtttacgctcatatcacacacaaggctctgaaggatatacctaagtag

SEQ ID NO: 16004 - DNA, 1554 bp, synthetic construct
  source 1..1554: mol_type = other DNA; note = Synthetic coding sequence
atgactcggcttggaacagtgcctcgaaaggccctcgagatgtcgtgcgctatccagaatcagctggctcggatcctcgcggagtttgaaatgacgcttgagcgggacgtgctgcagccattgtcccgcctgagcgaggaagagctacctgctattcttaagcataaaaaatccctacaaaagctggtctcagattggaacacattaaagtctcggctgagccaggccactaaaaactctgggtctagccaagggctgggcggtagccctgggtcacacagtcacacaacaatggccaacaaggttgaaacgctcaaggaagaagaagaggagctgaagagaaaagtcgagcagtgccgtgacgaatacctcgcagacctgtatcatttcgtgactaaggaagactcctacgccaactatttcatcaggctgctcgagatccaggctgactaccaccgcaggagtctgtcttcgctggatacagcgctggccgaactccgggagaatcacggtcaggcagatcactccccatcgatgaccgcaacgcattttccccgcgtgtacggagtgtctttagcgactcaccttcaggaactgggacgggagattgcgctcccaattgaggcgtgcgtcatgatgctcctatctgaggggatgaaagaagaaggcctgttcaggctcgcagctggggctagcgtactgaagcggcttaaacaaaccatggcaagtgaccctcattctctggaggagttttgttcagatccccatgcagtggccggcgcattaaagagttacctgagggaactgcccgagcctctcatgacatttgacctgtacgacgactggatgcgtgcggcctccctcaaggaacccggcgcccgcctccaggcgttacaagaggtgtgcagccgcctgccgcccgagaacctctccaaccttaggtacctaatgaagttcctggccaggctcgccgaagagcaggaagtgaacaagatgaccccatcgaatattgctattgtgctaggccctaatctcctttggccccctgagaaagagggcgatcaggctcaacttgatgctgcaagcgtctcaagtattcaggttgtcggcgtcgtggaagctcttattcagagtgcggacaccctgttcccaggtgacataaatttcaacgtcagtggtcttttctcagccgttactctgcaagacaccgttagcgataggttggctagtgaggaacttcctagtactgcagtgccgacacccgctaccactccagcaccggcccccgcccctgccccagccccagcgcctgcactcgccagcgccgcgacaaaggaaagaactgaaagtgaagtgccgccccggcctgcatcccccaaagtcactcgatcaccgcctgaaaccgccgctcccgtggaagatatggctcgtaggagccccaggggcgccactggcagaaaggagagattcgcctgtagttacggcactgactccagtcttgctgatatgttctttgtcagattagtcaacaagctcttctggacaaaactttag

SEQ ID NO: 16005 - DNA, 918 bp, synthetic construct
  source 1..918: mol_type = other DNA; note = Synthetic coding sequence
atggacctgtccggggttaagaagaaatcattgctcggcgtcaaagaaaataataaaaagtcgagtacccgggccccctctcccactaagcgcaaagaccgtagcgacgagaagagcaaagaccgtagtaaggataagggggctactaaagagtcatcggagaaggacagaggaagagacaagaccaggaagcgcaggtctgcctctagcgggagctctagcacccgatcccggtcttccagcacatcatcatccgggagctcaaccagcaccggatcttcctccggaagttcttcatccagcgcttccagtcgatcaggatcgagctccacctctcgcagctcctcttcctctagctccagtggcagtccaagtccgtctcgccgccgccatgataatcgcaggcggtcacggagcaagtccaagccgccgaagcgtgatgaaaaggagagaaagcgaagatctccatccccaaaacctactaaggtgcacatcgggaggttaactagaaacgtaacaaaggatcacataatggagattttctcaacctatgggaagatcaaaatgatcgatatgcccgtggagagaatgcatcctcacttgtccaaggggtacgcatatgtcgagttcgaaaaccctgatgaggccgagaaagccctcaagcatatggacggggggcagatcgatggtcaagaaatcaccgctacagcagtgcttgccccttggccacgacctccacctaggcgcttttcacctcctagacgcatgttaccaccacctcctatgtggcggagatccccaccccgcatgagaagacgctcccggtctccccgtagaagatctccagtgcgcagacgtagtcgaagccctggcaggcgccggcatcgttcacgctccagttcaaacagctcccgctag

SEQ ID NO: 16006 - DNA, 927 bp, synthetic construct
  source 1..927: mol_type = other DNA; note = Synthetic coding sequence
atgattcacgacgcccaaatggactactatggaactcgtctggctacctgtagttccgaccggtccgttaagatcttcgatgtgcgcaacggaggccagatactgatcgccgacttgaggggccacgagggacccgtgtggcaagtagcatgggcccacccaatgtacggcaacatcctagcttcatgtagctacgatcgcaaagtcatcatctggagagaagagaatgggacgtgggaaaagtcccatgagcatgcagggcatgactctagcgtcaacagcgtgtgctgggctcctcatgactatggtctgattctcgcatgcggctcgtccgatggagccatcagcttactcacctacactggagaggggcagtgggaggtgaagaaaatcaacaatgcccacaccataggctgcaatgcggtgagttgggcgcctgctgtcgtgcccggcagtttgattgatcatccaagcggccagaagccaaactacatcaaacgatttgcttctggaggctgcgacaacctgattaagctgtggaaagaagaagaggatggccagtggaaagaagagcagaagttggaagcgcacagcgactgggtgcgcgacgttgcctgggcccctagcatcgggctgccaacctcaaccatagcttcttgctcacaggatggacgggtcttcatatggacctgcgatgacgcttcttccaatacctggagccccaagcttctgcacaaattcaacgacgtggtctggcacgtaagctggtccatcaccgcaaacattctcgccgtgtcgggaggtgacaacaaagtgactctttggaaggagagcgtagatggccagtgggtgtgtatcagcgatgtaaacaagggtcagggctccgtgtctgccagtgtaacagaaggacaacagaacgagcagtag

SEQ ID NO: 16007 - DNA, 1542 bp, synthetic construct
  source 1..1542: mol_type = other DNA; note = Synthetic coding sequence
atgagtattgagatagagtccagtgacgtcattcgactcattatgcagtatctgaaagagaattccctgcatagggcgctggcgacgttgcaggaggagaccactgtgagcctgaacaccgtggattctatagagtcctttgtggcagacatcaattctggacactgggacaccgtacttcaagctatccagagcctcaaactgcccgacaagacgctaatcgatctgtacgaacaggtggtgctggagctcatcgagcttagagaattgggtgctgcaagatctctccttaggcagactgaccccatgatcatgctaaaacagacccagcctgaaagatatatccaccttgagaacctcttggcgcgtagctatttcgacccgagagaagcgtaccctgacggctcctctaaagagaagcgtagagctgcaatcgctcaagcattagccggagaggtgtctgtggttccccccagtcggctcatggccctccttggccaggcactcaagtggcagcagcaccagggactcctccctccaggcatgaccatagacctttttcgcggtaaagcagccgttaaggatgtagaggaggagaagtttccgactcagctgtcccgccatataaagtttggccagaagtcccacgtcgagtgcgcacgcttctcaccagatggacagtatcttgtgaccggatctgtggacgggtttatcgaagtgtggaatttcacaaccggtaagataagaaaagatttgaagtaccaggcacaagacaacttcatgatgatggatgacgccgtgctgtgcatgtgtttttctcgcgacactgagatgttggccaccggtgctcaggacggcaagattaaagtgtggaagatccagtccggacagtgcctgcgaagattcgagcgtgcacatagcaagggcgtgacctgcctctccttctccaaagactcctcacagatcctgtccgcgtcctttgaccagacgatccgtatccatggtttaaaatctgggaaaacacttaaagagtttcgtgggcacagcagcttcgtgaacgaagccacattcacccaagacggtcattatatcatctcagcttcctccgacggcacggtgaagatttggaacatgaaaaccacagagtgctccaacaccttcaaaagcctggggtcaactgctgggacagacatcaccgtaaattcagtgatcctgctgcctaaaaatcctgaacacttcgtggtgtgcaaccgaagtaacacagtggtgattatgaatatgcagggacagatcgtcagatccttctcttcaggtaagcgagaaggcggcgattttgtgtgttgtgccctatccccacgtggagaatggatttactgtgtgggagaggatttcgttctctactgcttttcaaccgtgactggcaaattggagcgaacattaactgtccacgagaaggatgtcatcgggattgctcatcatccccaccagaatttgatagcaacatactccgaggacggcctgctgaaactctggaagccgtag

SEQ ID NO: 16008 - DNA, 2136 bp, synthetic construct
  source 1..2136: mol_type = other DNA; note = Synthetic coding sequence
atgagtagcgtgcagtcacagcaggagcagctgtcccagtcagatcccagccctagtccgaattcatgctcgagttttgagctgattgacatggatgcgggcagtctatacgaaccagtgtcaccgcactggttttactgtaagatcatagactcaaaggagacgtggatccctttcaacagtgaggattcacaacagctggaagaggcatatagcagcggcaaagggtgtaatggacgggttgtcccgaccgatggtggaaggtacgatgtccatctgggtgagcgaatgcggtatgcggtgtactgggacgaactcgcaagcgaggtgagacgctgcacatggttctacaaaggggataaagacaacaaatatgtaccgtattccgagtctttctctcaggtgctggaggaaacttacatgctggccgtgacactcgatgagtggaaaaagaagctggaatcgcccaaccgggagattatcatccttcacaacccaaagctcatggtgcactatcagcccgtcgccggttccgatgactggggctcgacccccaccgaacagggacgacctcgcacagtcaaaagaggggttgagaacatttccgtagacatccactgcggagagcccctccaaattgatcacctggtcttcgtcgtgcacggaattggaccagcctgcgatcttagattccggagcatcgtgcagtgcgtgaacgatttcagatcagtgtccctgaaccttctgcaaactcacttcaaaaaggctcaggaaaaccagcaaatcggccgcgtggagtttcttccagtgaattggcacagtccccttcattctactggcgtggacgtggatctgcaacgcataaccctcccttctattaatagattacgtcactttacgaacgacactatactagatgtatttttctacaatagccctacctattgtcagacaattgtcgataccgtggctagtgagatgaatagaatttatactctgttcttgcagcggaatcctgacttcaaggggggggtgtctattgctggccactccttggggtcactcatcctgttcgacatcctgaccaaccagaaagactccttgggcgatattgatagtgagaaagactctctgaacattgtgatggaccagggcgatacacctacccttgaggaagatctcaaaaagctgcagctcagtgagttctttgatattttcgagaaagagaaagtggacaaggaagccctggcactgtgcacagatagggacctgcaagagattggaatcccacttgggccgcgtaaaaaaatattgaattacttttccacccggaagaatagtatgggaatcaagcgcccggctccacagcccgccagtggcgccaatattcccaaagagtccgagttttgcagtagttccaacacccggaacggcgactacttggacgtgggcatcgggcaggtttcggttaagtatcctcgactcatatacaagcccgaaatcttttttgcgttcgggtcacccataggaatgttccttacagttcgaggtctcaagcgcatagatccaaactaccggtttccaacttgcaagggttttttcaatatttaccacccgtttgaccctgtggcttaccgcatcgaacctatggtggtcccaggagtcgaattcgagccaatgctcataccccaccacaaagggagaaagcgcatgcacctggagcttcgcgagggtctcacaaggatgagtatggatctgaagaataatctgctggggtcactaaggatggcatggaagtcttttactcgagccccctaccctgccctacaggcctcggagacacccgaagagactgaggccgagcccgaaagtacatccgaaaaacccagcgatgtgaacaccgaggagacatccgtggccgttaaagaggaggtcctgcccatcaacgtaggaatgctgaatggggggcagcgaattgactatgtgctgcaggaaaaacctattgaaagttttaatgaatatctgtttgctctgcagtctcacctgtgttactgggaaagtgaagatacagtgctgctggtccttaaggagatctatcagactcagggcatctttctggaccaaccactacagtag

SEQ ID NO: 16009 - DNA, 3351 bp, synthetic construct
  source 1..3351: mol_type = other DNA; note = Synthetic coding sequence
atgtatggaagtgcccgtagcgtggggaaggttgagccatcatctcagagcccaggcagatccccccgtctccccaggagccccagactaggtcacaggagaacaaattctacaggcggctctagcgggtcgtccgtgggaggggggtctggcaagaccctgtctatggagaatattcaaagcctgaacgccgcatacgctacaagcgggcccatgtatctttctgaccacgagaacgtaggatctgagaccccaaagagtacgatgaccctggggagatctggaggccgcctgccttatggggtgcggatgacagcaatggggagttcaccaaatatcgcttcttccggggttgcctctgatacgatcgcattcggagagcatcacctgccccccgtgtccatggcatctaccgttccccattccctgcgtcaagctagagataacaccatcatggacctccagacccaactgaaagaagtgttgcgagagaatgacctgttaagaaaggacgtcgaagtaaaggaaagcaaactatcctcatcaatgaacagtattaagacattctggtcacccgagctgaaaaaggagagagccttgaggaaagatgaagccagtaagattacaatctggaaagagcagtatagggtcgtgcaggaagaaaatcagcatatgcagatgaccatccaagccctccaagatgaactgcggattcagcgcgatctcaatcaactgttccaacaggactcgtcctcaagaacaggcgagccatgcgtggccgaactcaccgaagaaaactttcaaaggcttcatgcggagcacgaaaggcaggccaaagagctgttcttgctccgtaagacgcttgaagaaatggagcttaggatagagactcagaagcagacgttaaacgcacgcgacgagtctatcaagaagctgttggaaatgctgcagtcaaaggggttatcagccaaggcaacagaggaagatcacgagcgcaccagaagactggcagaggctgaaatgcatgtccaccatctggaatctctcctagaacagaaggagaaggaaaacagcatgctgcgggaggagatgcaccggcgcttcgaaaacgctcctgactctgcaaagacgaaggctctccagactgtaattgagatgaaagatagtaagatctccagcatggagaggggcctgcgcgatctggaggaggagattcagatgctgaagagcaatggagctctgagcaccgaggaacgcgaggaggaaatgaagcagatggaggtctaccgctcacacagcaaatttatgaaaaataaagtggagcaattaaaggaggaattgtcgagtaaagaggcccagtgggaggagctcaaaaagaaggccgccggactacaggccgagattggtcaggtgaaacaggaattgtctcggaaagacactgagctactggcgctgcagacgaaactggagacactgaccaaccaattctcagattctaagcaacacatcgaagtacttaaggagtctctcaccgccaaggaacagagagccgccattttgcagaccgaagtggatgcactcaggctgcggctggaggaaaaggaaacaatgctgaacaaaaaaaccaagcagatccaggacatggctgaagaaaaaggcactcaggccggggagattcacgacctcaaagacatgcttgatgtaaaggaacgtaaagtgaacgtgctccaaaaaaaaatcgaaaacctgcaagaacaactgagggacaaggagaaacagatgagtagcttaaaagagcgtgtaaaaagtctccaggccgacacaacaaacacagacaccgcactcaccacactcgaagaagctttggctgagaaagaaagaacaatcgaacgtctgaaagagcaaagagatagagacgaacgcgaaaagcaagaggaaattgataattacaaaaaggacctcaaggatctgaaagagaaggtctccctgctccagggagatctcagcgaaaaagaggcctcactgttggatctgaaggagcacgcctcctcactcgcttcttcggggctgaaaaaagattctcgcttgaaaacattggaaattgccctggaacaaaagaaagaagagtgcctgaagatggagagtcagctgaagaaggcccacgaagccgctctagaggctcgcgcttcccccgaaatgagcgaccggatccagcacctggagcgcgagatcaccagatataaggatgaaagctccaaggctcaggcagaagtcgataggctgctggagatattgaaagaggtggaaaacgagaagaacgacaaggataagaagatcgccgaactggagaggcaggtgaaagaccagaataaaaaggtcgcaaatctgaagcacaaagaacaggtggagaaaaaaaagagcgctcagatgctggaggaggcccgcaggcgtgaggacaacctcaatgattcatctcaacagctgcaagactctctccgtaaaaaagacgatagaattgaagagctggaagaagccctcagggaaagtgtgcaaattacagcagagagggaaatggtactggctcaggaagagtccgctaggacaaatgcggaaaaacaggtggaggagttgttaatggccatggagaaggtaaaacaggaactggagtcaatgaaagcaaagcttagctccacgcaacaatcgctggcagaaaaagagactcacctgactaacctccgggccgaacggagaaaacatttggaggaagttctggaaatgaagcaggaagctctcctcgccgccatttccgagaaggatgctaacatcgcactcctggagctcagtagttccaaaaaaaagacacaagaagaggtcgccgccctcaagagggaaaaggatcgcctagtgcaacagctcaaacagcagacgcagaatcgcatgaagctgatggcagacaactacgaggatgaccattttaaaagcagtcacagcaaccaaaccaatcataagccttctccagatcagattatccagcctctgttggaactggaccagaatcgctctaaattaaagttgtacattggtcatcttacaacgttatgtcacgatcgggacccattgattctgagaggattgaccccacctgcgagctacaacctggacgacgaccaagcggcctgggaaaatgagcttcagaaaatgactcgtggccagctgcaagacgaactggagaagggggagcgggacaacgccgagctccaggagttcgcaaacgctattttgcagcaaatcgccgatcattgccccgatattctggaacaggtggtcaatgcactggaggagagctcctag

SEQ ID NO: 16010 - DNA, 1233 bp, synthetic construct
  source 1..1233: mol_type = other DNA; note = Synthetic coding sequence
atgcagaacatccacggcaaggagattgatctgttgagaacaaccgtgaaggtgccgggaaaacggctgcctcgggccacgcctgctactgcacccgggacctctccgagggcaaacggcctgtccgtggagcgctccaacactcagttggggggaggcaccgcatctgggcccgcggaggttctgtcttcctccccaaagctagacccaccaccttcccctcactccaacaggaagaagcaccgccgaaagaagagtaccggaacccctcgaccagatggcccttcctccgctaccgaagaagcagaagagtcattcgaatttgtagtggtgagtttaaccggccagacgtggcatttcgaggcctccaccgcagaagagagagagctgtgggtccaatctgtgcaagcacagattctggcgtctctgcaggggtgccggagcgccaaagataagactcggttgggaaatcaaaacgcagcgttggctgtccaggcagtgaggactgtacggggtaattccttctgtatcgattgcgatgctcccaatccggactgggcatccttaaatctcggggccctcatgtgtattgaatgttccgggatacacaggcacttaggggcccacctgagtagggtccgatccttagaccttgatgactggcccccagagctacttgcagtgatgaccgccatgggtaacgccttggctaactcagtctgggaaggtgcactcgggggctattctaaaccagggcctgacgcctgccgggaagagaaggagagatggattcgcgcaaagtatgaacagaagctcttccttgcgcccctcccgagttccgacgtaccactagggcagcaacttctgcgggctgtcgtggaggatgacctgcgcctcttggtgatgttgctggcgcatggatccaaagaagaggttaatgagacctacggggacggtgacggacgcactgcactgcacctgagcagcgctatggcaaatgtggtgttcacacagctcctgatatggtatggtgttgacgttagaagccgggacgccaggggactcacaccactcgcctatgctcggagagccggaagccaagaatgtgccgacatcctgattcagcacgggtgccccggtgagggatgcggcctggcccctacaccaaatagagaaccagctaacggtaccaatcccagtgccgagttgcacaggagtccatcccttctgtag

SEQ ID NO: 16011 - DNA, 492 bp, synthetic construct
  source 1..492: mol_type = other DNA; note = Synthetic coding sequence
atgtccgacagcccagccggttccaatccacgaacccctgagagtagcggtagtggatccggaggaggcggtaaacggccagcggtaccggccgcagtttctctgctgcccccagcggatcctctgcgacaggcaaatagactccctatccgggttctcaagatgttaagcgctcacaccggccacttgctgcatccagagtatcttcagcctctcagctcaacccccgtctctcccatcgagttggatgctaagaaatctccgctggccctcctggcccaaacatgctcccaaatcggttcacccgggagcctcagcctcaggaatcctcatacactgggcctgtcccggtatcacccctacgggaaatcacacctttccactgcaggtggcctggcagtaccttcactgcccaccgcgggtccttattacagcccttatgccctgtacggacagcggctcgctagcgcctcagccttagggtaccaatag

SEQ ID NO: 16012 - DNA, 2736 bp, synthetic construct
  source 1..2736: mol_type = other DNA; note = Synthetic coding sequence
atgaacttccaagctggaggcggccagtctccacagcagcagcaaagtcttgctgcccctggtgggggtggggccgccgctcaacagctcgtctgcgggggacaatttgggggggccggacctggggccggaggcggaggggggccgtcccagcaactggctggggggcccccgcagcagtttgctctgagtaactccgctgcaatccgcgctgaaatccagcgatttgagagtgtgcacccaaatatatacgcaatctacgacctgattgagagaatagaggatctggccctccaaaatcaaataagagagcatgtgatcagcattgaggatagtttcgtaaatagccaggaatggacgttatcccgatcagttcctgagctgaaggtcggcattgttggtaacctgtcaagcggcaaatccgcgctggtccataggtacttgaccggcacatatgtgcaagaggagtctcccgagggcggacgcttcaagaaggaaatcgtcgttgacggccaatcatatctgcttctgatcagagatgagggaggaccacctgaactgcagtttgctgcctgggtggatgccgtggtgttcgtgttcagcctagaggatgagatttcttttcagacagtgtataattactttctgcgcctgtgttcattccgcaatgccagcgaagtgccgatggtgcttgtcggaacccaggacgcaattagtgcagccaatcctcgtgttatagacgacagcagagcccggaaactgtcaacagatctcaaacggtgcacttattacgaaacctgtgctacatacggactgaacgttgagcgcgttttccaggacgtggcccagaaagtggttgccctgagaaagaagcaacaattggccatcggcccatgtaagtctctcccaaacagtcctagccactctgccgtgagtgccgctagcataccagccgtgcacatcaaccaggctacaaatgggggggggtcagccttctccgactactcaagctccgttccatccaccccaagcatcagtcagcgggagctgcggatagaaaccattgcggcttcctccactcctacccctataaggaagcagagtaaacgtaggagtaacatatttacatcgaggaaaggcgctgatcttgatagagagaagaaagccgctgaatgtaaagtggacagcatcggaagtggccgcgccattcctattaagcagggaattctccttaaaaggagtggaaagagcctgaataaagagtggaaaaagaaatacgtgacactttgtgataatggcctattaacatatcatccatctctgcacgattacatgcaaaacattcatgggaaggaaattgatctgttgcggacgacagtgaaggtacctggaaaaagactaccccgtgcgacgccagcaaccgctcctggaaccagcccaagagctaatggtttgagcgttgaacgaagcaatactcagctgggaggggggactggagctccacactcagccagctctgccagcctgcatagtgaacgtccactgagtagctctgcgtgggctggacccaggcctgagggcctccatcaacgcagttgtagcgtgtctagcgcagaccagtggtccgaggccactacatcgctccccccgggcatgcagcaccctgcctctggaccagccgaagttctgagtagttcacccaaactggatcctcctccctctccccatagcaacaggaagaagcacaggagaaaaaagtctacaggaaccccccgcccggacgggcctagtagtgctaccgaggaggctgaggaatcattcgagtttgttgtggtctcattaacaggacagacatggcatttcgaggcaagtactgccgaagaacgggagctctgggtgcagtcggtgcaggctcagatactggccagtctgcagggctgccggtcagctaaagacaaaactagacttggcaaccaaaacgcagccctggcagtgcaggccgtcaggaccgtgcgaggaaattctttctgcatagactgtgatgccccaaatcccgattgggcatccctgaacttgggtgctcttatgtgcatagagtgtagcggtattcaccgacacctgggagcccacctgtccagagtaaggtctctcgacctggacgactggccaccggaactcctagctgtcatgacggcgatgggtaatgccttagcaaactctgtatgggaaggcgctcttggtgggtactcgaagccgggacccgatgcatgcagggaggaaaaagaacgttggatccgggcgaagtacgagcagaagctgttcctggccccgctacccagcagtgatgtcccactcggtcagcagttactgcgcgcagtggtcgaagacgatctccgattactggtcatgcttctagctcatggaagtaaagaagaggtgaacgaaacgtacggtgacggagacggccgcaccgctcttcacctaagcagtgctatggctaacgtggtctttacacagctgctcatttggtacggagttgacgtcaggtcccgcgatgccagggggcttaccccactggcctacgcacgccgggcggggagccaagagtgtgcagatatattaattcagcatggttgtcctggcgaaggctgcggcctcgcccctactcctaatagggaacctgctaacggaacaaatccaagcgcagagctgcatagatccccatctttgctgtag

SEQ ID NO: 16013 - DNA, 1059 bp, synthetic construct
  source 1..1059: mol_type = other DNA; note = Synthetic coding sequence
atggatatcgataaagatctcgaagctcctttgtacctgactccagagggctggtccctcttcctgcagagatactatcaagtcgtccacgaaggggccgagctacggcatctggatactcaggtccaacgttgtgaggatatacttcagcaactccaggccgttgttccacagatcgacatggagggcgacaggaacatttggatcgtgaaaccgggcgcaaaatcacgaggacgagggatcatgtgcatggatcacttggaggaaatgctaaaactggtgaacggtaatcccgtcgttatgaaagatggtaagtgggtggtgcagaagtacatcgaacgtcccctcctcattttcggtaccaaattcgatttgcgacagtggtttttggtgaccgactggaaccctctgacagtgtggttttaccgggatagctacataagattctctacgcagccattcagtctgaagaacctggataattcagtccatttatgcaacaacagtatacagaagcatctcgagaactcatgccacaggcatcccttgcttccaccagacaacatgtggtcgtctcagcgctttcaagcccatttacaggaaatgggtgcccctaatgcgtggtcaacgattatcgtgccaggcatgaaggatgcagttattcatgctctgcaaacgagccaggataccgttcagtgtcggaaggcatcgtttgagctttacggcgcggactttgtgttcggcgaggactttcagccatggttgattgaaatcaatgcttcacctaccatggctcccagcacagctgtgaccgccagattgtgtgccggagtccaagccgacacactcagggtggtcattgacaggatgctggatagaaattgcgataccggggctttcgagctcatatataaacagcctgtgacaacctctcctgctagcacacccaggccatcctgcctgttaccaatgtacagcgacactcgtgcccggagcagtgacgattctacggcaagctggtgggctctgcgtccgtgtcggccacaggctagaccctag

SEQ ID NO: 16014 - DNA, 507 bp, synthetic construct
  source 1..507: mol_type = other DNA; note = Synthetic coding sequence
atgacagcgaccctgcgcccataccttagtgcggtgcgtgccaccttgcaagccgcgctgtgcttagagaactttagctcacaagtcgtggagaggcacaataagcccgaggttgaagtcagatcatctaaagaactactcctgcaacctgtcaccataagtcggaatgagaaggagaaggtcctgatcgaaggatctattaattccgttcgcgtcagcatcgccgtgaagcaggccgatgagatcgaaaagattctgtgccacaagttcatgcggtttatgatgatgagggctgagaattttttcattttgcggaggaaacctgtggaaggatacgatatatcctttctgattaccaattttcatacagagcagatgtataagcacaaactcgttgactttgtgattcatttcatggaagagattgacaaggaaatctccgagatgaaactatctgtgaatgctagggcaaggatcgtggccgaagagtttctgaagaacttttag

SEQ ID NO: 16015 - DNA, 993 bp, synthetic construct
  source 1..993: mol_type = other DNA; note = Synthetic coding sequence
atggagcgttttatggaacaagtcgtttttaagtatttaagggcagaaccggaagaccattatttcttgatgaccgagcccccacttaacactccagagaacagggagtatctggctgaaatcatgttcgagtcctttaacgtgcccggactgtacattgctgtccaggctgtcctggccctggctgctagctggacctctaggcaggtgggtgaacgcacactcaccggtatcgttatcgattcaggcgatggcgtcacgcacgtcatccccgtggcggagggctacgtgatagggtcatgcattaaacatatacccattgccggtagggatatcacatatttcatccagcaactgctgcgcgagagagaagtcggtatcccccccgaacagtccctggagactgctaaggcaattaaggagaaatactgctatatatgccccgacatcgtgaaagagttcgccaagtacgacgtagatccccgtaagtggataaagcagtacacaggaataaatgctattaaccagaaaaagtttgtcattgacgttggttatgagaggtttcttggtcctgagatttttttccaccctgaatttgccaatcccgattttatggagtctatctccgacgttgtggacgaagtgattcaaaactgcccaattgatgtgcgtagaccactctacaagaatgtggtgctgtcgggtggcagcaccatgttccgggatttcggcaggagactgcagagagaccttaagagagtggtcgacgcccgcctacgcctgtctgaggagctttcagggggcaggattaaacccaagccagtggaagtacaggtcgtcacacatcacatgcaaaggtatgcagtctggtttggagggagcatgctggcatccacaccggaattctttcaggtgtgccacactaaaaaagattatgaagaatacggccccagcatatgcaggcataatccggtgttcggagttatgtcctag

SEQ ID NO: 16016 - DNA, 894 bp, synthetic construct
  source 1..894: mol_type = other DNA; note = Synthetic coding sequence
atgaaaaccctcagccccgacaggatccagccccatattatgaccgacgtgcctgcaacattcacccaggctgagtgcaacggcgacaaaccgcccgagaatggacagcagactatcacaaagatatcagaggagttaactgatgtcgacagccctttgccccactaccgggtagaaccaagcctcgagggagcattaacaaaggggtcacaggaagagaggcgtaagctacaagggaacatgttgctgaattcaagcatggaggacaagatgctgaaggaaaaccctgaggagaagctgtttattgtgcacaaggccatcactgatctcagtctgcaggagacatctgccgacgagatgacattcagagaaggacaccagtgggagaagatcccattgtccggctccaaccaggaaatcaggcgccaaaaagaacggatcacggagcagcctctgaaagaggaagaagatgaagatagaaagaacaagggtcatcaggccgctgagattgaatggcttgggtttcggaaaccatcccaagccgacatgcttcactccaagcacgatgaagagcaaaaggtgtgggacgaagagatcgacgacgatgacgacgataattgcaacaacgacgaggatgaagtcagagttatagagtttaaaaaaaaacacgaggaggttagccagtttaaagaggaaggggacgcttctgaggattctcctctgtcatctgctagtagtcaggccgtcacccccgatgagcagccaacccttggtaaaaaaagtgatattagtcgcaacgcttacagtaggtacaacaccatctcgtaccgcaagataaggaaaggcaatacaaagcagcgtatcgacgagtttgaaagtatgatgcacttgtag

SEQ ID NO: 16017 - DNA, 1074 bp, synthetic construct
  source 1..1074: mol_type = other DNA; note = Synthetic coding sequence
atggtccagcctttcacaaccattccttttcctccccctcctcagaacggtattcctacggagtacggggttccccacactcaggactacgccgggcagacaggtgagcataatctcactctctacgggagtacccaagcccatggcgagcagtctagtaactcgcccagcacacagaacggatcccttactcagaccgaaggaggggcgcagacggacggtcaacagtcccaaacccaatcatcggaaaacagcgagtctaagtctacacccaagagattacatgtgtcgaatattcctttcagatttagggatcccgatctaagacagatgtttgggcagttcggtaaaatcctggacgtggagatcattttcaatgagagaggctcgaaggggttcgggttcgttacctttgagaactctgcggacgcagatagagctagggagaagctccacggcaccgtggtggagggtaggaaaatcgaggttaataatgctactgctcgcgttatgacaaataaaaagatggtcactccttacgctaatgggtggaagctgtccccggtcgtgggtgccgtgtacggccctgaactgtacgcggcttcctccttccaggcggacgtttcactcgggaatgatgctgctgtccccctgtcagggcgcggggggattaacacttatataccacttatcattccagggttcccatatcccactgccgcaacaacagccgcagcctttcgaggagcccatctccgtgggcgcgggcggacagtgtatggcgccgtgagggccgtaccacctactgccattcctgcataccctggagtggtttaccaggatggattctatggggctgacctgtacgggggatatgccgcgtatcggtatgcacagcccgctacagcaactgctgccaccgctgccgcagctgcggctgcagcatattccgatgggtatgggagggtctacaccgccgatccctatcacgcccttgccccggctgcatcttacggagtgggcgccgtggctagtctgtaccggggaggctacagccgctttgccccttactag

SEQ ID NO: 16018 - DNA, 387 bp, synthetic construct
  source 1..387: mol_type = other DNA; note = Synthetic coding sequence
atggttcagccctttactacgattcctttccccccccccccgcaaaacggaatcccaaccgaatatggtgtgcctcatacacaggactacgccggacagacgggcgagcataatctgacattatacggttctacccaggcacacggcgagcagagttctaactcacccagcacgcagaacgggtcactgacaactgagggcggggcacagacagatggacaacagtcacagacccagtcatcggagaactctgaaagcaaatccacccctaaaagactccatgtctctaacatcccattccgattccgagaccccgacctgcgccagatgtttggattcgggaagatccttgatgtcgagataattttcaatgagcgcggcagttag

SEQ ID NO: 16019 - DNA, 1071 bp, synthetic construct
  source 1..1071: mol_type = other DNA; note = Synthetic coding sequence
atgcagggaattttgctgttggtgtttgccaagtaccagcacctgccatacatccagatcttgagcactaagtccacccctacagggttgttcggctattgggggaataagggtggggtgaacatttgtctgaagctgtacgggtactatgtaagtattattaattgtcacctgcccccccacatcagcaacaattatcaacgactggaacacttcgatcggattttagaaatgcagaattgtgaagggcgggacatccccaatatcctagatcatgatcttatcatctggttcggggacatgaacttccggatagaagatttcggactgcattttgtccgtgagtctattaagaacagatgctacggaggactatgggagaaagaccagctctccattgccaagaaacacgatccccttctgcgcgaatttcaggagggccggctgcttttcccacccacatataagttcgatcggaatagtaatgattatgataccagtgagaagaaacggaagccagcatggaccgataggatcttatggagactcaaaagacaaccgtgcgctggacccgacacacctatccctccagcctcgcatttcagcctgtcccttagaggttatagctcgcacatgacatacgggattagtgaccacaaacctgtttccggcacatttgatcttgagctcaagcccctcgtcagcgcccccctgattgtgctgatgccggaggatttatggacagtggagaatgacatgatggtgtcttattccagtacaagtgatttccctagctcaccgtgggactggataggactgtacaaggttggattgagagatgttaacgattacgtgtcttacgcttgggtgggggattccaaagtgtcatgttccgacaacctgaaccaggtatacattgacatcagtaatatccccaccactgaagatgaattcctactctgctactacagcaattctcttcgctcagttgtcgggatctcccgtccattccagatcccgcccggtagcttacgagaggaccctctcggcgaggcacagcctcagatctag

SEQ ID NO: 16020 - DNA, 1752 bp, synthetic construct
  source 1..1752: mol_type = other DNA; note = Synthetic coding sequence
atgctgagtgagtccaaggagggagaggagaaggaggaggtgacaatggatactagcgaaaatcggcctgaaaacgacgtgccagagccgccgatgcctattgcggaccaggtgtccaacgatgatagacccgaaggatccgtcgaagatgaagaaaaaaaagagtcttccctgcccaaatccttcaagcgaaaaatctccgtcgtttccgctacgaagggcgttcccgcaggaaatagcgacaccgagggtggccagccgggccggaagcgcaggtggggcgcttctaccgcaaccacccagaagaagccgtccatctcaataactactgagagcctaaagtcgctcatccccgatatcaaaccgctcgccggacaggaggctgtggtcgatctccatgcggatgactcccggatctcagaagacgagactgagcgaaacggcgatgatgggactcatgacaaagggttgaaaatttgcaggactgttacccaggtcgtgccggccgaaggccaggagaacggccagcgcgaggaagaagaagaggagaaagagccagaagccgagccaccagtgccgcctcaggtatccgttgaggtggctctgcctccgcctgccgaacacgaagtcaagaaggtcaccctaggcgatacccttaccagacgatctatatctcagcagaaatctggagtctccatcaccatcgacgaccctgtgcggactgcacaggtccctagccccccacgtggcaagatttcaaatatcgtgcatatcagcaatttggttcggccattcactctggggcaactaaaggagctgctcgggagaacggggacattggttgaggaagcgttctggattgacaagattaaatcccactgcttcgtgacatactcaacggtggaggaggcagtagccactaggacagccctgcatggggtcaagtggccgcagtcaaatcctaaattcctgtgcgcagattacgctgaacaagacgaactcgactatcatagagggcttctcgtggacaggcccagtgaaactaaaacagaagagcagggaattccccggccgttgcacccccccccccctcccccagtgcagccccctcagcaccctcgggctgaacaacgggagcaggaacgcgccgtccgtgagcagtgggctgagagagaaagggagatggaacgccgggaaaggaccagaagcgagcgagagtgggatagggataaggtccgagagggccccaggtctcgttcccgctcaagggatcgcagacgaaaggagcgcgcgaagtcaaaggaaaagaagtccgaaaaaaaagaaaaggcccaagaggagccgcccgctaagcttctggatgatctctttcgaaaaactaaagccgcaccctgtatctactggctgcccttaactgacagccagatagttcagaaagaagcagaaagagccgagcgggccaaggagagggaaaagagacgcaaggagcaggaggaggaagaacagaaggaaagagagaaagaggctgaacgcgagaggaaccgtcagctggaaagagaaaagagaagggagcactcgagggagcgggaccgagagcgtgagcgtgagcgggaacgtgatcgcggcgacagggacagggacagagaaagggaccgagagcgcggacgtgagcgagacaggcgggacacaaagaggcattcacggtctcgttcacgctcgacgccagtacgggacaggggcggcagacgctag

SEQ ID NO: 16021 - DNA, 1329 bp, synthetic construct
  source 1..1329: mol_type = other DNA; note = Synthetic coding sequence
atggccaatagcttcgccgcaagaatttttaccactctcagtgatttgcaaactaatatggcaaatctgaaagtgatcggaatcgtgattggaaaaaccgatgtcaagggatttccagaccgcaaaaatattggatcagagcgatacacatttagctttacaattcgggattccccggctcattttgttaatgcagcctcatggggcaatgaagattacatcaagtcgctgtccgattcattccgagttggcgactgcgtgatcatcgagaacccccttatccaacgcaaagagatcgagagagaggaaaagttcagtccggccaccccctcaaactgcaaactgcttctctcagaaaatcacagtaccgttaaggtgtgctccagctatgaagtagatactaagctactgtcccttattcacctgcctgtgaaggaatcccacgactattattctttgggagacatcgtagccaatggacacagccttaatgggcgcattatcaatgtcctggcagcagtgaaaagcgtgggggaaccaaaatacttcacgacatccgatagacgcaaaggacagcgttgcgaagtgcggttatatgatgagaccgagtcctcatttgcaatgacgtgttgggataacgaatctattctcttggctcagtcctggatgcctcgtgaaacggtcatctttgccagcgatgtaagaatcaattttgacaagttccggaactgcatgacggcgaccgtgatcagtaagacaatcatcacaaccaaccctgatatccccgaggctaacattttgctgaatttcataagggaaaacaaggagacgaatgtccttgacgatgaaattgattcctactttaaggaaagcattaatttgtccactattgtcgacgtgtacacagtggaacagctaaaaggcaaagcactaaaaaatgaaggaaaagcagatccttcttacggtattctttacgcgtacatctctacattgaacatcgatgatgagaccacgaaggttgtgcgtaacaggtgtagctcttgtggctacattgtgaatgaggctagcaacatgtgtacgacttgcaacaagaactcactcgattttaaatcggtgttcctatccttccacgtgctgatcgacctgacagaccacaccggaacattacacagttgctctctgacgggctcagttgccgaagaaactttaggatgtacatttgtactatcccaccgggcccgttcaggtctgaaaatatccgtcctgtcctgcaagctggccgatcccacagaagcctcgagaaacctttctggccagaagcacgtttag

SEQ ID NO: 16022 - DNA, 627 bp, synthetic construct
  source 1..627: mol_type = other DNA; note = Synthetic coding sequence
atggctggaactgcgagacatgaccgtgagatggccatccaggccaagaagaaactcaccacggccactgaccccattgagcgcctacggttgcagtgcctggctcgcgggagcgccggcatcaagggcctgggtagggtattccgcatcatggatgatgacaacaaccggaccctagatttcaaagaattcatgaagggcttaaacgactatgctgtagtaatggagaaagaagaagttgaggaactgttccgaaggttcgacaaggacggtaacggcaccatagattttaatgaatttcttctgactctgagacctccaatgagccgcgcaaggaaagaagtgattatgcaggcttttcgaaaactggataagactggggatggcgttataaccatagaagacttacgcgaagtctataatgctaaacaccatcccaagtaccagaacggcgagtggtcagaggaacaggtgtttagaaagttcctggataactttgactccccttacgataaggatggtttggtgaccccagaagaatttatgaactactatgccggtgtatccgcttctatcgatacagatgtgtattttattattatgatgcgcacagcttggaagctttag

SEQ ID NO: 16023 - DNA, 627 bp, synthetic construct
  source 1..627: mol_type = other DNA; note = Synthetic coding sequence
atggcaggcacagcccgtcatgatcgggagatggccatccaggccaaaaagaagctgacaacagcgacagatcccatcgagaggctccggctgcagtgtcttgcccgtggttcggcaggcattaagggactaggtcgcgtattccgcattatggacgacgacaataatagaacactggacttcaaggaatttatgaaaggactgaacgactacgcagtcgttatggagaaggaagaggtagaagaactatttaggcgattcgataaggacgggaacggcacaattgatttcaacgagtttctactgacgctacggccacccatgagtcgggcacgcaaagaagtgatcatgcaggcatttcgaaagctcgacaagacaggcgacggagtgattaccatcgaagacctgagagaagtgtacaacgccaaacaccaccctaaataccagaacggggagtggagcgaggaacaagttttccgaaaattcctggataacttcgactccccttacgacaaggatggactggttacgcctgaagagttcatgaattattatgcaggagtatccgcctcaatcgacaccgacgtttacttcataattatgatgcgcaccgcctggaaattgtag

SEQ ID NO: 16024 - DNA, 789 bp, synthetic construct
  source 1..789: mol_type = other DNA; note = Synthetic coding sequence
cactcctatagtgagggcctgggccacccaagagtctcacaggccctggtgaccttccaccagcaaaaaccaattgagccaagacgcgagctgcttacccagccctgtagacaaaaagatcccgccaatgtggattacgaagacctctttctctacagcaacgctgtcgctgaggaggcagcatgtcctgtgagtgcaccagaggaggcttcgccgaaaccagtgctttgtcaccagagcaaggaacgtaagccatccgctgagatgaatcggatcactactaaggaagccacctctagctgtccaccgaagtcccctctgggagagacgcgtcagaaactctggaggtctctcaagatgttgcccgaacggggtcagcgggtgcggcagcagaaatcccatcttgctactgtgaatctgtcaagcctgctggacgtcaggaggagtacggtcataagcggccccggaaccggtaagggcagccaagaccactcaggggacccaacatccggcgacagaggctatacagacccttgcgttgccaccagcctcaagtcaccaagtcagccacaggcgccaaaggacaggaaagtgcctacacggaaagccgagagatccgtgagctgcattgaagtgacgcctggagaccgctcctggcatcaaatggtagtacgggcactgagctcccaggaaagtaagcccgaacatcaaggcttagctgaaccggagaacgatcagctcccagaagagtatcaacagccaccccctttcgcgccaggatactgttag

SEQ ID NO: 16025 - DNA, 1941 bp, synthetic construct
  source 1..1941: mol_type = other DNA; note = Synthetic coding sequence
atgtcatataccggattcgtgcagggctctgagaccacactccagtccacttacagcgacacatctgcccagccaacttgtgactatggctacggcacctggaactccggcactaaccgcgggtatgagggctatggctatggctacgggtacggtcaggacaacaccaccaactacgggtatggcatggccaccagtcatagctgggagatgccgagctccgataccaacgccaacacctccgcttccggcagcgcaagtgccgactccgtactttcccgcatcaaccagaggcttgacatggtcccccatttggagactgatatgatgcagggcggtgtgtacggatccggcggcgaacgctacgatagctacgaatcatgtgactcccgggccgtgctgtcagaacgggacctgtataggtccggctacgactatagcgaactggaccctgaaatggagatggcttacgagggccaatacgacgcttatcgagatcagtttcgcatgcgaggcaatgacacttttgggccaagagcgcagggatgggccagggatgccaggtcaggacgacccatggcatccggctacggccgaatgtgggaagatcccatgggcgcaagggggcaatgcatgtcgggcgcttcccgccttccctctctctttagtcaaaatataattccggaatacggaatgttccagggaatgaggggtggaggtgcatttccgggaggttcgcggttcggcttcggcttcggaaacggcatgaagcagatgaggcgtacctggaaaacatggaccaccgccgattttaggaccaaaaagaaaaagcgaaaacaagggggctcccctgatgaacccgacagcaaagccaccagaactgattgctccgacaatagcgactcagataacgatgagggtacagagggagaagcaacagaaggtcttgaaggcacagaagctgttgaaaaaggatcacgggtcgatggggaagatgaggagggcaaggaagatggcagagaagaggggaaggaggaccccgaaaagggagccctgacaacacaggacgagaacggccagactaagcggaagttacaggccggaaagaagtcacaggacaaacaaaaaaagagacagcgggaccgcatggtcgagagaatccagtttgtctgtagcctgtgcaagtatcggaccttttacgaagacgagatggcatcccacctcgacagcaagttccacaaagagcatttcaagtatgtgggcacgaaactacctaaacagaccgctgacttcctccaggaatacgtgacaaacaaaacgaagaaaacagaggagctgagaaagacagtggaggacctggatggattgattcaccagatttaccgcgatcaagatcttacacaggagatcgcaatggagcactttgtcaagaaggtggaggctgcccactgtgcagcttgcgatctgttcattcccatgcagttcggaatcatccaaaagcacctgaaaacgatggaccataaccggaaccgccgcctgatgatggaacaatcaaaaaaaagctccctcatggtggcgaggagcattctcaacaataaactgatctcgaagaaactggaaagatacctcaagggagagaacccttttaccgacagtcccgaggaagaaaaggagcaggaagaggctgaggggggtgccctcgatgagggagcacaaggagaagccgcaggaatctccgagggtgcggaaggcgtacccgctcagcctccagtgccacctgaaccagccccgggcgccgtgtcacctccccccccacccccacctgaagaagaagaagagggtgccgtgcccctcctcggtggcgcgctacaacgccagattcgcggaattcccggactcgacgtggaggatgacgaggaagggggggggggcgctccatag

SEQ ID NO: 16026 - DNA, 1401 bp, synthetic construct
  source 1..1401: mol_type = other DNA; note = Synthetic coding sequence
atgcgaggccctaactctggcaccgaaaagggacggttggtcattccggagaagcaagggttcgactttctttgcatgccggtgttccaccctaggtttaagcgagagtttatccaagagcccgctaaaaacaggcctggaccccaaaccagatccgacctgttgctctccggtcgtgattggaacacactgatagtgggaaaactgagtccatggatacgaccagatagcaaggtggaaaaaattcggagaaactccgaagccctcgaggtgcaatttattatcaccggcaccaatcatcacagtgaaaaagaattttgcagttacttgcaatatctggagtacttgtcgcagaatcgccctccgcccaacgcctatgagttatttgccaaaggctacgaagactacctgcagtctccactccagcctctcatggacaacctagagtcgcagacttatgaggtcttcgagaaagaccctatcaagtactcacagtaccaacaagccatttacaagtgtctccttgaccgagtgcctgaggaagagaaggacactaacgtgcaggtgctaatggtacttggggcggggagagggcccctggtgaatgcctccctaagggctgccaagcaggcggatcgccgcatcaagctgtacgcagtggaaaagaatccaaatgccgttgttacccttgaaaattggcaatttgaggagtggggcagtcaagtcaccgttgtgtcatcagatatgagggagtgggttgctcctgagaaggcagacatcatcgtgtcagagctgctagggagctttgcagataacgagctgtctccagagtgtctggatggggctcagcactttctcaaggatgacggcgttagcatcccgggcgagtatacctcctttcttgctccaatttcgagcagtaaattgtataacgaagttcgagcctgcagggagaaggaccgggaccctgaagctcagttcgaaatgccctatgtggtcagattgcataatttccaccagttgagcgcgccacaaccttgttttacgttctctcatcctaacagggacccaatgatcgataataacaggtattgcacactggaatttccggtggaagtgaacacagtgctccatgggttcgcaggatatttcgaaaccgtcttgtaccaagatatcaccttatccattcgccccgaaactcattctcctgggatgtttagttggtttccaatcctgtttcctattaagcagccaattactgtgagggagggtcagacaatttgcgtgaggttttggcgatgctccaattccaagaaggtctggtatgagtgggctgtaaccgccccagtgtgtagtgctatacacaatccaacaggacggtcctacaccatcggcctgtag

SEQ ID NO: 16027 - DNA, 1863 bp, synthetic construct
  source 1..1863: mol_type = other DNA; note = Synthetic coding sequence
atgcgcgggcccaattctggcacggagaaaggacgtttagtcatccctgagaagcagggattcgacttcctgtgcatgcccgtgtttcatccccgatttaaaagagagtttatccaagaacctgctaaaaaccggccaggcccacagaccagatccgatctgctgctcagtggccgggactggaatacgctcattgttgggaaactgtcaccctggatacggccagacagcaaggtggaaaagatcaggagaaacagcgaggccgcgatgttacaggagctcaacttcggcgcatatctgggtctgcctgccttcctgctgcctttaaaccaagaggacaataccaacctggctagggtactgacaaatcacatacatacagggcaccacagcagtatgttctggatgcgcgtgccactggtggcgcccgaggatcttcgcgacgatattatcgagaacgccccgacaacccacacagaagagtactctggagaagaaaagacctggatgtggtggcacaatttccgcacgttatgtgactatagcaagaggattgccgtcgcactggaaattggcgctgatcttccatccaatcatgtcatcgacaggtggctgggagaaccaataaaggcagcgatactgccaacctcaatcttcctgaccaacaaaaagggattcccagttctgtctaaaatgcaccagagacttattttcaggctacttaaactagaagtccagttcatcatcactggaacgaatcatcattccgagaaagagttctgctcttacctacaatatttagaatacctgtcgcagaatcggccaccccccaatgcctatgaactgtttgctaaaggatatgaagactatctgcaatctcccctacagcctcttatggataacctggagtcccagacgtatgaggtattcgaaaaggatccaataaagtactctcagtatcagcaagccatctataagtgtcttctcgatagggtaccagaagaggaaaaggacactaatgtgcaagtgctgatggtgctgggtgcaggccgaggccccctcgtaaacgctagcctgagagccgctaagcaggcagatcggaggattaaactgtacgcggtggagaaaaatcctaatgccgtggtgaccctagaaaactggcagttcgaggagtggggcagccaggtaactgtggtatcgagtgatatgagagagtgggtggctcctgaaaaggctgacataatagtctctgagctcctcggctcctttgctgacaatgaactatccccggaatgcttggatggggctcagcatttccttaaggacgatggagtctcgatccctggcgagtatacctcttttttagcccccatcagctcttccaagctgtacaatgaggtacgtgcctgccgtgagaaagacagggacccggaagcacagtttgaaatgccttacgttgttcggctgcacaactttcaccagctgtcagccccgcagccctgcttcactttttcgcatcccaacagagaccccatgattgataacaatcgttactgcactcttgaatttccagtcgaagtcaatactgtgctgcacggcttcgcaggttatttcgaaaccgttctgtatcaggatatcacgttatccatcagacccgaaacacattcccccggtatgttttcatggttcccgatactgtttcccattaaacaaccgataaccgtcagagagggtcagacaatttgtgtacgcttctggagatgttcaaatagcaaaaaggtgtggtacgagtgggcagttacggccccagtatgttctgcgatccacaatccgacgggcaggagttacacaatcggactgtag

SEQ ID NO: 16028 - DNA, 2271 bp, synthetic construct
  source 1..2271: mol_type = other DNA; note = Synthetic coding sequence
atgccctccgtcagcaaggccgctgccgctgcgctgtccggcagtcctcctcagacagagaaaccgacccattatcgttacctgaaagaattccgtacggagcagtgtcccctgttctctcagcacaaatgtgcgcagcatcgaccattcacctgcttccattggcattttctgaatcaacggagacgcagacctttgcggcgacgagatggtacctttaactattctccagatgtctattgctctaagtacaacgaagcgaccggggtctgccccgatggcgatgagtctctcctcggagtactataccccctgtgggcaccgccaccggttccagccccggtgggagctccaacggtgcacccattcttggcaaggtggttttcccatgtcccatgggagccagctggctctgcagatcctcgggcctcatcaacacccgccgggggcactacatgggccactggcttgctgggcgacttcgatgcctgtggctcccagagcagggaatgtgttaagggagtgtggtggactttgctcggatttcgatgcccttaccttcaccggactactggggataccgaaaggaagtaccacctgcgctattacaaaaccgggacttgtatccacgaaaccgacgcacgcgggcattgtgtgaaaaacggtctgcattgcgctttcgcacacgggcctctagacctgaggccacctgtgtgcgacgttagagagctgcaagcccaagaggctctgcagaacggtcagctcggaggaggcgagggagttccggaccttcagccaggtgtcttggcctcccaagctatgatcgagaaaattctttccgaagaccctcgatggcaggccctcctgccagtggcactgttacggcaccgcgtcgcacattttagcgacgctaattttgtgcttggtagctacaaaactgagcagtgccctaagccgcccaggttgtgtagacaaggttacgcttgtcctcactaccataacagtcgagatcggcgcaggaaccctagacggttccagtatcgctctaccccgtgccccagtgtgaagcacggcgacgaatggggagaaccatctaggtgtgatggaggagatggttgccagtactgccactctaggactgagcagcagttccacccagagggacctgtcggctctccagttagtggcgctttctcagtgttttctcacgctgggctcgtggctgacccatccctttggtatcctgcagaatggtcctggcatcatgtcgggcactctagaaccatcaatcccgaaggtgataagcccagccggcttggtcccgcacctgaaaatattaaaagaggcaacgacttcgcatgtgacggacgagctgatgccgctggcatggccccacatgtgtgtgtgttccctatctacaagtctactaaatgcaatgatatgaggcagaccgggtactgcccacgcggacctttctgtgcctttgcccatgtggaaaagtccctgggtatggtcaacgagtggggatgccatgacttacatctgacgtcaccctcatctaccggcagtggacagccagggaacgctaaaaggcgggacagtcccgccgagggcggccctagaggttcggagcaagattctaagcagggcgtgcgcgcacacggagtgtacgttttcgaacaaaaccacttagcagtgtttgccgccgtgcatcccccagcacccagcgtgtctagcagtgtggcatcttccctcgcctcctcagccgggtcaggaagctctagccctaccgcattaccagcacctccggctcgagccctgcctctggggccagccagctccaccgtggaagcagtccttgctcttgagcctactccatcctcccccaccagcagtgccgtgcagggggtcgcaggagaactgggaatgggatctggcggccagggttgttggagccatgtagtcggcgcactggcagctgtgccggcctggacccacagtggcgacctcgaatgggaccctagcacgattcggacccgcgtgaatgtggggggtggcccggctgccaggcccgccatgactctcgctagagaaccccagttgctagtcgtgggggggtgtcctacgcggaactgttctggcccagctgctagcccccagcaactactagatgatgctggccagggaggcagaggtgagcgagattcatctcaaagaccactccggccacagactacgcatagacaggatacacggcctgtcccctcgtag

SEQ ID NO: 16029 - DNA, 549 bp, synthetic construct
  source 1..549: mol_type = other DNA; note = Synthetic coding sequence
atgaccccccctcaacagccacccccactgcgaagtgagccaggcaccttaggctcagcagccagctcatactcccctctgggactaaatggcgtgccgggctccatttgggattttgtctctggctctttttctccctcccctagccccatcctgtcagcagggcctcccagttcttcaagcgcgtcccctaacggcgctgagttggccagggtacggcggcagctcgacgaggcgaaacggaagatcaggcagtgggaggaaagttggcagcaggttaagcaggtgtgcgacgcttggcagcgcgaggctcaggaggctaaagaaagggctcgggtagctgattcagacaggcaattggccctgcagaaaaaagaggaggtcgaagcgcaggtgatctttcagcttagggcaaaacagtgcgtcgcttgcagagagcgcgcacacggagctgtgctcaggccctgccagcaccacatcctctgtgagccgtgtgcggccacagcgcctgaatgcccttactgcaagggtcaaccactgcagtggtag

SEQ ID NO: 16030 - DNA, 444 bp, synthetic construct
  source 1..444: mol_type = other DNA; note = Synthetic coding sequence
atggagggtgagccaccccctgtggaagaacggaggcggcttcaagaagagttgaatgagtttgtcgagtcgggctgccgcaccttggaggaggtgaccgcctctctaggttgggacctggattctctggaccctggggaggaggaagctgccgaggacgaagtggtgatatgcccgtacgacagcaatcaccacatgccaaaaagctccctggccaaacatatggcaagttgtcgacttcgaaaaatgggttataccaaagaggaagaggatgaaatgtacaatccggagttcttttatgaaaatgtgaaaatcccatctataacgcttaataaagactcgcaattccagattatcaaacaggccagaacagccgtcggaaaggatagtgactgctacaaccaaatcatcggtgtatctatcaagcgcaattataagatctag

SEQ ID NO: 16031 - DNA, 522 bp, synthetic construct
  source 1..522: mol_type = other DNA; note = Synthetic coding sequence
atggggaccttcgacctgtggaccgactacctcggcttggctcatctggttagggctctgagtggcaaagaggggcctgagacacgtctatccccgcaacccgagcccgaaccgatgctcgaaccagatcagaagcgctcgctcgagagttctcccgcgccagaaaggctgtgtagcttctgtaagcataatggcgaatctcgagctatataccagtcacacgtcttgaaggatgaagccggccgagtcctgtgcccgattttgcgggattatgtatgccctcaatgcggggcaacccgggagagggctcatactaggaggttctgtcccctgaccggtcaggggtatacttctgtatattcacacacaacacgcaattctgcaggtaaaaaactcgtgcgccccgataaggctaagacgcaggacaccggacacaggcggggaggcggaggcggtgccgggttccgtggagccggtaagagtgagccctcccccagctgctctcccagcatgagcacctag

SEQ ID NO: 16032 - DNA, 1722 bp, synthetic construct
  source 1..1722: mol_type = other DNA; note = Synthetic coding sequence
atgagcgcattctgtctcgggttggtaggaagagccagcgcacctgcggaaccagacagcgcctgttgcatggagctccccgccgccgcgggagatgctgtgcgttctcccgcggcagccgctgccctgattttccctggcggcagcggcgagttggaactcgcactagaagaagagctcgcgctccttgcagccggagaacggcccagcgaccctggggaacatccacaggcggaaccggggagtctcgctgagggagctgggccacaacccccaccctctcaagacccggaactgctgtcagtcatcagacagaaggagaaggatctggtcctggctgctcgcctgggcaaagcccttttagaacgcaaccaggatatgtcccgtcaatacgaacaaatgcacaaagagttaactgacaagttggaacatctggagcaggaaaagcacgagctgagacgccgctttgaaaatcgagaaggcgagtgggaaggacgggtctcagagcttgaaagtgatgttaaacaattgcaggacgaactggaacgtcagcaaattcacctacgcgaagcagatcgggaaaaaagcagggccgttcaggagctgtcagagcagaatcagaggctgctggaccagttatccagagcatctgaagtggagcggcaactgagcatgcaagttcacgcacttcgagaagactttcgggagaagaacagctcgacaaaccagcacattatcaggctggagtcccttcaagcggaaattaaaatgctgtccgaccggaagagggaactggaacaccgactctctgctactttggaggaaaatgacctgctgcagggaaccgttgaagaacttcaggacagggtgttaatcctggagagacaaggccatgacaaagacctgcaactgcaccaaagccagcttgagttgcaggaggtgagactgagttgcaggcagcttcaagtgaaggtggaggagctgactgaggagcggagccttcagagctccgcggctacctcaacaagcctgcttagcgagatagagcagagcatggaggcagaggagctggagcaggagcgtgagcagctcaggttgcagctgtgggaagcttattgtcaggtgcggtatttgtgctctcacctgagaggcaatgatagtgctgattcggccgtcagcacagactccagtatggatgaatcctcggaaacctcttcagcaaaggacgtgccagcgggctctttgagaactgctctgaacgagctgaaacgactgatccaaagcattgtggatggaatggagcccacagtgacgctgctgtctgttgagatgacggcactgaaagaggagagagatagattgagagtgacttcagaggacaaagagcccaaagaacagcttcagaaggccattcgggaccgggacgaagcaattgctaaaaagaatgccgtagaattagaactggctaagtgccgcatggacatgatgtcactgaactcccagttgttagacgccattcagcagaagctcaatctgtcgcagcagctggaagcttggcaggacgatatgcacagggttattgatcgtcagctgatggatacacatcttaaggagcgttctcagccggctgctgcactatgtagagggcactcggccggaagaggggacgaaccgtccattgcagagggcaaacggctgttcagcttctttcggaagatctag

SEQ ID NO: 16033 - DNA, 1086 bp, synthetic construct
  source 1..1086: mol_type = other DNA; note = Synthetic coding sequence
atggcacttaatgtcgcaccagtcagagataccaagtggctgacattggaggtttgtaggcagttccagagagggacctgttcgcggtccgatgaggaatgcaagttcgcccatccgcctaaatcctgtcaggtggagaatggaagggtcatcgcctgctttgactcccttaaaggacgatgttcacgggaaaactgcaagtatctccacccccccactcatctgaagacacagctggagattaatggacgaaataatttgatccagcagaagaccgcagccgccatgctggcacagcagatgcagtttatgttcccagggacaccactccatcctgtacccacgttccctgttgggccggcaatcgggacaaacactgccatctctttcgctccttacttggcccctgtgacccccggggtcgggctcgttcccaccgaaatcctacctactacaccagtaatcgtcccgggaagccctcccgtcaccgtgcccggatcaacggctacccagaaactgctccggacagacaaactagaggtctgtcgcgagttccagcgcggtaactgtgcccggggcgagactgactgcagatttgcacatcccgctgactcgaccatgatagacacctcagataataccgtgacagtctgtatggactacattaagggccgatgtatgcgcgagaaatgtaagtacttccaccccccagctcacctgcaggcaaaaattaaagccgcccaacaccaggccaaccaggccgcagtggccgcccaagccgctgccgcggcagctactgtcatggcttttcccccgggcgcgcttcatcccctaccaaagcgccaggccctggagaaatcaaacggcacctctgctgtcttcaacccttctgtcctgcactatcagcaagctctgaccagtgcgcagctacagcagcatgctgcattcattcccactgataatagcgaaattatcagcagaaacggtatggagtgccaagagtctgccctgcggatcaccaagcattgctattgcacatactatccagtgtcatcttcaatcgagctccctcaaactgcctgctag

SEQ ID NO: 16034 - DNA, 3099 bp, synthetic construct
  source 1..3099: mol_type = other DNA; note = Synthetic coding sequence
atggcattcactaactattcatctttgaatagagctcaactaaccttcgagtacctacacacgaactctaccacacacgagttcctgttcggtgccctggcagagctggtggacaatgcccgggatgccgacgcaacaagaatcgacatctatgccgaacgcagggaggacctgcgaggaggattcatgctctgttttctcgacgacggcgccggaatggatccaagtgacgctgcctctgtcattcagtttgggaagagcgcaaaacgtacccccgaatcgacccagatagggcaatatggtaacggcctcaaatcaggctcgatgcgaatcgggaaagattttattctgtttactaagaaggaggatactatgacctgtctcttcctctctcgcacttttcacgaagaggaaggcatcgacgaggtaatcgtcccactgccgacatggaacgcaaggacccgagaaccagttactgataacgtcgaaaagttcgccattgaaactgaactcatctacaaatatagcccatttcgtaccgaagaagaggttatgacccagttcatgaagatccccggcgattccgggaccctcgtgatcattttcaaccttaaactgatggacaacggcgagcccgaacttgatataattagtaaccctcgcgatatccaaatggcagagacatcaccggagggaaccaaacccgagaggcgatccttcagggcgtacgcagcggtgctgtacatcgacccacgcatgcgcatcttcatccacgggcacaaggtccagacaaaaagattgtcctgctgtctatacaagccccggatgtacaaatataccagttcgcggttcaaaacaagggccgaacaggaagtgaaaaaggctgaacacgtggcgcgcatcgcagaggagaaagctagggaagccgagagcaaagctcgtacactcgaggtgcgactaggtggagacctgacacgggactcccgcgtcatgttaagacaggtgcagaaccgcgccatcaccttacgtcgcgaggcagatgtgaagaagcgcatcaaagaagcgaaacaaagggccctcaaggagcccaaagagctgaacttcgtgttcggggttaacattgagcatcgcgacttagacggcatgtttatttacaactgttcaagactgattaaaatgtatgagaaggtgggcccccagctcgagggagggatggcctgtggaggagtcgtgggagtggtcgacgtgccctacctggtgcttgagcctacccacaataagcaagacttcgccgacgcgaaggagtatcgtcacctgctgcgtgccatgggcgagcacctggcacaatactggaaggatatcgctatcgcacagcggggaatcatcaagttctgggacgaatttggatacctgagtgccaactggaatcagccaccaagttcagaactgaggtacaagaggaggcgagcaatggagattcctaccactatccagtgtgacctatgtctgaagtggagaacactgccttttcagctgtccagtgtcgagaaagattaccccgatacctgggtgtgctcaatgaacccagatcctgaacaggacaggtgcgaggcttcagagcaaaaacaaaaagtccctcttggtactttccgaaaggacatgaagactcaggaagagaagcagaaacagctcacggagaaaattcggcagcagcaggagaagctggaggcgctgcagaaaaccacccctatacggtcacaggctgacctgaaaaagcttccgcttgaggtgaccacacgacctagcactgaggagccggtgaggaggccccagcggcctcggagcccccccctgcctgctgtcatccgcaatgccccatccagacctccctctttgcccacccctaggcctgcatctcagccgaggaaagctcctgtgatctcctccacacctaagctccccgccctcgctgcccgcgaagaagcttctacgtctcggttgctgcagccacccgaagccccaagaaaacccgccaacacacttgtaaagacggccagccgacccgcccctttggtgcagcagctgtctccaagcctgctcccaaactcaaaatctcccagggaagtgccaagtcctaaggtgatcaagacaccagtggtgaagaaaacggagagccccatcaaactgagtcccgcaactccttctcggaagcgctcagttgccgtcagtgacgaggaggaggtggaggaagaggctgagcggcggaaagagcgatgcaaacggggccgattcgtggtcaaagaggagaagaaggatagcaacgaactgtccgactctgccggagaagaggacagtgccgatttaaaacgggcgcaaaaagataagggcctccacgttgaggtccgggtgaatcgcgagtggtacaccggcagagtgaccgccgtggaagtcgggaagcatgtggttcgttggaaggtgaagttcgactatgtacccacggatacgacacccagagacagatgggtcgagaaggggagtgaggatgtgcgcctgatgaaacctcccagccctgagcaccagtccttggatacacagcaagaaggcggggaggaagaagtgggccccgtggctcaacaggccatcgcggtggcggaacctagcacctccgagtgcttgcgaatagagccagacaccactgccctgagcactaaccacgagacgatagatctgttggtgcagatacttaggaactgtctgcgctactttctgccaccatctttcccaattagcaaaaagcaactctccgccatgaacagcgacgagctgatcagttttccactgaaggagtattttaagcagtatgaggtgggccttcagaacctgtgtaactcctaccagtcacgtgccgactctcgagccaaggccagcgaggagagcctgaggacaagtgaacgaaaactcagagaaactgaggagaaattgcagaagctgagaaccaatattgtagcattacttcagaaggtgcaggaggatatagacattaatactgacgacgaactcgatgcttatattgaggacttgattacaaaaggggactag

SEQ ID NO: 16035 - DNA, 5943 bp, synthetic construct
  source 1..5943: mol_type = other DNA; note = Synthetic coding sequence
atgaatccaaccaatcccttctcaggccagcagcccagcgccttctccgcctcttcctcaaacgtgggaacactgccaagcaagccccctttccggtttggtcagccctctctgttcggccaaaattctaccctttctggaaagtccagcggcttctcgcaggtaagctcgtttccagcgtcgagcggcgtatctcacagtagctcagtgcagactcttggctttactcagacctctagtgtgggaccattttcagggctggaacatacttccacatttgtcgctacttcaggtcccagctcctctagtgtcctggggaacactggattctcctttaaaagccctacatcagttggtgccttcccttctactagcgcgttcggccaggaagccggggaaattgttaactctggattcggcaaaactgagttctccttcaagccactcgagaacgccgtgttcaaaccaatcctcggtgccgaatctgagccagaaaaaacgcagagccagatcgcaagcggctttttcacctttagtcaccccatcagtagtgcgccaggcggcctggcccctttcagcttcccacaagtcacttcttcttccgccactacaagcaactttacattttctaaacctgtgagttcaaacaactcattatccgccttcacccccgccctttccaaccaaaacgtagaggaagagaaacgaggacctaagagcatcttcggcagttcaaacaacagtttttcaagctttcctgtgagctccgctgtgctaggtgaaccctttcaggcttcgaaggctggtgtgagacagggctgcgaggaggcagtgagccaggtggaacccctaccctctctcatgaaaggcctcaaaagaaaagaagatcaggacagaagtccacgacggcacgggcatgaacccgccgaggactccgaccccctgtcccgaggtgaccatccccctgacaaacgaccggtgcgtttgaatagaccccgcggtggaacattattcggaaggaccatccaagacgtgtttaaaagcaacaaggaagtcggtagactcggcaacaaggaggcaaaaaaggagacgggcttcgtggagagcgcagaatctgaccatatggccattcctggcggaaatcaaagcgtgttagcccccagtaggataccaggagtcaacaaggaggaggagaccgaatccagggagaaaaaagaggactccctacgggggactcccgcccgccaatccaacagatctgagtctacagattccctcggaggactctctccaagcgaagtaacagctattcagtgcaaaaacatcccagattacctaaacgaccgcaccattcttgagaaccatttcggcaagatagcaaaggttcagcgtatcttcacaaggcgtagcaagaaattggctgtggtgcatttttttgatcatgcatcagccgcactggcaaggaaaaagggaaaatctctgcacaaagacatggccattttttggcacaggaagaagataagcccaaataagaaaccattttcattaaaagagaagaagcctggagacggagaggtctcaccaagtactgaggatgcgcctttccagcactctccgctgggaaaagctgcaggccgcacaggggcgagctccttgctgaacaagagctctcccgtgaagaagccgtcactgctgaaagcccaccaattcgagggtgactcattcgacagcgcctctgaaggatccgaggggctcgggccttgtgtgctctccctttccacactgattgggaccgtggctgaaacatctaaggaaaagtacaggttattagaccagcgggacaggatcatgcgacaggctagagtgaaacgcacagacctggataaagcgaggacttttgtaggcacctgcctagacatgtgcccagagaaggagcgttacatgcgcgagacacggtctcagttgtcagttttcgaggtggtaccgggcaccgatcaggttgaccatgccgccgctgtgaaggagtatagccggtcatcagctgaccaagaggagccactgccacatgagctcaggcctctgcccgtgctctcgaggaccatggactatctggtgacccagattatggatcagaaggagggatcattaagagactggtatgacttcgtctggaatcggacacgcggcattaggaaagacataacccagcagcacttatgcgatcccctcacagtatccttgatcgaaaagtgtaccaggtttcacatacattgtgcacattttatgtgtgaagagcccatgagctccttcgatgccaaaatcaacaacgaaaatatgacaaaatgcctgcagagtctgaaagagatgtatcaggacctcagaaataagggcgtgttctgcgcatccgaagctgaattccagggttataatgtccttctgagcctaaacaagggcgatattctgcgtgaagttcaacagttccatccagctgtgaggaatagttcggaagtaaagttcgccgtccaggcctttgccgccctgaactcaaacaacttcgttcgctttttcaaactcgtgcagtcagcctcctaccttaacgcctgccttctacactgctattttagccagatccggaaggatgccctaagggcactaaacttcgcatacaccgtgtcaacccagcggtccaccatatttccgctcgacggagtggtgaggatgctcttgttccgagattgtgaagaggcgacagacttcttgacttgccatggactgactgtgagcgatggatgcgtcgagcttaacaggtccgcatttctcgagcctgagggtctctccaaaactaggaagtccgtgttcatcaccagaaagctgaccgtgagcgtcggagaaattgtcaatggcggccctttaccccctgtgcctagacacactccagtatgctcctttaattcacagaacaaatacatcggcgagtcccttgccgctgaactgcccgtgagtacacaaaggcctgggtctgataccgtaggtgggggacggggggaggagtgcggggtggaacctgatgccccactgtctagcctgcctcagtccttgcctgcccccgccccgagcccagttcctctccccccggtccttgctctgacccctagcgtagctccatctctgttccagctttctgtgcagcctgaacctcccccgcccgaacccgttcccatgtacagtgatgaggatctggctcaggttgttgacgagctcatccaggaagccctccagagagattgtgaagaggttggttcagctggggcagcttacgctgctgcagcattaggcgtgtctaacgccgccatggaagatctgttgacagcggcaactaccggcattttgagacacatcgccgccgaagaagtgtctaaggagcgggaaaggagggaacaggagcgccagagggcagaggaggagaggctaaaacaggagagggagttggtgctttcagagcttagccagggcttggctgtggaactaatggaacgcgtcatgatggagtttgtacgcgagacatgtagtcaagaattgaaaaatgcagtggagacagatcagagagtccgagtagcgaggtgttgtgaagacgtgtgcgcccatcttgtggatctcttcctggttgaggagatctttcagaccgctaaggagacccttcaggaattgcagtgcttctgcaaatacttacagaggtggcgtgaggccgtaacagccaggaagaagttgcgaagacagatgcgtgcctttcccgctgctccctgctgcgtcgatgtcagtgataggctccgggcgctggccccctctgctgagtgtccgatcgccgaggagaatctggcccgcggactgctagacttggggcacgccggcagactggggatctcttgcactaggcttagacggctgaggaataagaccgcccaccaaatgaaagttcagcatttctatcagcaattgctgagcgatgtggcctgggctagtctggacctcccctctcttgtggctgagcacctccctggtcgacaggagcacgttttctggaagctggtactagtgttgcccgacgtcgaggaacagtccccggagagctgtggtcgcatactggcaaactggttgaaggtgaagttcatgggagacgaggggtctgtagatgacacttcctcggatgctgggggcatacagaccctgagcctgtttaattccctgtccagcaagggtgatcagatgatcagtgttaacgtgtgtattaaagttgcacacggcgcactcagcgatggggccatcgatgcagttgagacccaaaaagatctcctgggtgcatcagggctcatgcttctcctgcctccaaaaatgaaatccgaagacatggctgaggaagatgtttactggctgtcagctctgctgcagcttaagcagttactgcaggcgaagcccttccagcccgcattgccattagtcgtgctcgttccaagcccagggggagacgccgtagagaaagaagtggaagatggactcatgttgcaagatctggtgtccgccaagctgatcagcgactacacagttaccgagatcccagacaccatcaatgatttgcagggaagcactaaggttctacaggccgtacagtggttagtgtctcattgccctcactctcttgacttgtgctgtcagacccttatacagtatgtggaagatggtattggtcacgaattctccgggagatttttccatgaccgacgcgaacgcaggcttgggggcctggcctcgcaggagcccggggctattatcgagttattcaatagcgttctgcagtttctggcttctgtggtctctagcgaacagctctgcgacttatcttggcctgtgacagagtttgcggaggccggcggttcacgcctgttgcctcacctgcactggaacgcgccagaacatctggcatggctgaaacaggcagtgctgggcttccagctgccccagatggacttgcccccgctgggcgcaccatggttgcccgtatgttctatggtggtgcagtatgcttcacagattccttctagtaggcagacacaacccgttctgcaatctcaggtggagaatctgttgcaccggacttattgtcggtggaaatctaagtcccctagccctgtacacggagccgggccgtccgtgatggagatcccgtgggacgatcttattgccctgtgcattaaccacaaactccgcgattggacccccccccgattacccgtcacttcagaggccctcagtgaggatggccagatctgtgtctacttctttaagaacgacctcaagaaatatgatgtgccactaagttgggagcaggccagactgcagacacagaaggagctgcagttacgggagggccggctcgccattaagccattccacccgtcagctaataattttcccattccgctcttgcacatgcacaggaattggaaacgatccactgagtgtgctcaggaggggcgcatcccaagcacagaggatctcatgcgtggcgctagcgccgaggagctactagcacaatgtttgtcctcatcactcctgctggaaaaagaggaaaacaagcgcttcgaagatcagctgcagcagtggctgtctgaagattccggcgcttttaccgatctgacatccctgcccctatacctccctcagacgctcgtgtccctaagccatacaatagagcctgtgatgaaaacaagtgtgaccactagtccccaatcagacatgatgcgagaacagctgcagttgtctgaggccaccggaacctgcttaggtgaacgcctcaagcacctagagcggttgatccgaagctccagagaggaggaggtggccagtgaattacatctctccgccctgttggacatggtggatatttag

SEQ ID NO: 16036 - DNA, 513 bp, synthetic construct
  source 1..513: mol_type = other DNA; note = Synthetic coding sequence
atgggcaagaggtatttctgcgattactgcgaccgctcttttcaggataatctgcataaccgtaagaaacatctgaatggcctccagcatctgaaagctaagaaggtctggtatgacatgttcagagatgctgccgccatcttactcgatgaacaaaacaagagaccttgcaggaagttcctcttgaccggacagtgcgacttcgggtctaattgccggttctcccacatgtcggaaagagacctgcaggaactgtctattcaggtggaggaggaacgaagagctcgcgaatggctgctggatgcacctgaactgcctgagggacacctggaagattggcttgagaagcgggccaagcggttatctagtgcaccctcatcccgggccgagcctattcgcactactgtctttcaatatccagtgggatggcctccagtgcaggaactcccgccttccctcagagcaccacctccaggcggctggccccttcaacctcgcgtgcaatggggatag

SEQ ID NO: 16037 - DNA, 291 bp, synthetic construct
  source 1..291: mol_type = other DNA; note = Synthetic coding sequence
atgtgtcacacaagctgttcaccggcatgtcagcctacatgttgcatccatagcccctgtcaggcctcttgctacgtgccagtatcctgtcagtcttcagtgtgcatgccagtatcttgcactagaattgtttgtgtggccccttcttgtcaaccatctgtatgcgtgcccgtgtcttgccgcccgattatttatgtcacaccaagctgtcagagctccggctgctgccaacctccgtgcactacagcgttgtgccgccccatcagctgcagcacaccatcctgttgttag

SEQ ID NO: 16038 - DNA, 879 bp, synthetic construct
  source 1..879: mol_type = other DNA; note = Synthetic coding sequence
atggccgcctcaaccatgtcgataaggtccagcgcgtatagcgactcctggcaggtagacgactgccccgaaagctgctgtgaacccccgtgttgcgcgacgagctgctgcgctcctgccccctgtcttaccctcgtgtgtacacctgtgagtagggtctctagcccttgctgccaggtgacttgtgagccgtcaccgtgccaatccggttgtaccagctcatgtacaccttcatgctgccagcagagcagttgccagccagcgtactgcacttcaagtccctgtcagcaggcttgctgcgtccctgtctgctgtaaacccgtgtgttgtgtgccagtgtgttgtggggcatcttcctgctgccaacagtctagctatcagccggcctgttgcgcttcaagcagctgtcagcccgcatgttgcgttcctgtctgttgtaaacccgtctgttgtgcccccacctgttctgaagacagctactcctgttgtcagcagagttcttgccagcccgcgtgctgtacaagttctccctgccagcagtcgtattgtgtccccgtatgctgtaagccggtgtgttgcaagcccatttgctgtgttcccgtgtgttcaggggcatcatccctctgctgccagcaatccggttgtcagccagcctgttgtactacatcttgctgtagaccaagctctagtgtatctctgctctgcaggcctgtgtgccggcctgcctgctgtgtgccggtgtcctcctgctgtgcacctacttcttcaagacagccatcctactgtaggcaggcctcttgtgtctcactgctgtgcagacccgtgtgcagccggcctgcatgttactcattttcttccggccagaagtccagctgctag

SEQ ID NO: 16039 - DNA, 1608 bp, synthetic construct
  source 1..1608: mol_type = other DNA; note = Synthetic coding sequence
atgaagaagatcagtttgaagaccttgaggaaaagcttcaaccttaacaagagcaaggaggaaaccgatttcatggtggtccagcagccttctctcgcaagcgactttggtaaagatgactccctatttggttcatgctacggcaaagatatggcgagttgtgatataaacggtgaggatgagaaaggagggaaaaataggagtaaatctgaatccctgatgggtacattgaagaggcggttgtccgctaaacagaagtccaaggggaaggctggaacgccaagtggttccagtgcagatgaggacaccttttcatcttcaagtgcccccatcgtctttaaggacgttcgtgctcaacgccccatcagaagcactagcctccggtcccatcactactcacccgcgccctggcccctgcgaccaacaaactctgaggagacttgtatcaagatggaggtacgtgtcaaagccctcgtgcattcaagtagcccttcccccgccctcaatggggttcgcaaagatttccacgatcttcagtccgagaccacttgccaggaacaggccaatagcctcaagagttctgcgtcacacaatggggatctgcatcttcatctggatgagcacgtccccgtagtcattgggcttatgccccaggactacatccagtatacggtgccattagatgagggcatgtaccctctggagggtagcaggagttattgtttagacagcagcagcccgatggaggtgtctgccgtccccccgcaggttggcgggcgcgccttccccgaggacgaaagccaagttgatcaggatcttgtggtggcccccgagattttcgttgaccagtcagtgaatggcctccttattggcacgactggagtcatgcttcagagccccagggccggccatgatgacgtgcctcccctgtctccgctgttgccacctatgcaaaacaaccagatccagagaaacttttcagggctgacagggacggaggcccatgtggcagagagcatgaggtgtcaccttaattttgatccaaactcggcgccgggtgtcgcccgagtgtatgactccgtgcaatcaagcggcccaatggtcgtgacaagcttgaccgaagaactgaagaaactcgccaagcaggggtggtactggggacctattaccaggtgggaggctgaaggtaagctggctaacgtgccagacggatccttcctggtccgggactcatcagatgaccgctaccttttatcgttgagcttcagatcacatggcaagacactgcatactagaatagaacattcaaacgggcgtttttcgttctacgaacagccagacgttgaggggcatactagtatcgtggacttgatcgagcattccataagggactcggagaacggagctttctgctacagccgatcccggttacccggaagtgctacttatccggtgcgtctcaccaatccagtctcaaggtttatgcaagtccgctctcttcagtacctgtgcaggttcgtgattcgtcagtacacccggattgacctgatccaaaaactccctctccccaataagatgaaggattacttgcaggaaaaacactactag

SEQ ID NO: 16040 - DNA, 1260 bp, synthetic construct
  source 1..1260: mol_type = other DNA; note = Synthetic coding sequence
atggccgcgtccagtttggaacagaaactgtcacggcttgaggctaaattgaaacaggagaatcgcgaggcgcgtcgccggatagacttgaatctggatatcagtccccagagacctcgccccacgctgcagttgccactggccaacgacggcgggagtcgatcgcctagctcggagtcgtcccctcaacatccaacacctcccgcccgacctaggcacatgttgggccttccctctaccttattcactccccgtagcatggagagcatcgagatcgatcagaagttgcaagaaattatgaagcagaccggttacctgactattggcggtcagcgctatcaggcagagattaacgacttagagaacctgggcgagatgggcagcggcacctgcggacaggtttggaagatgcgattccgcaaaaccgggcacgtcatagctgtaaaacaaatgagaagatccggcaacaaagaagagaacaagaggatcctgatggatttagatgtagtgcttaagagccatgattgcccatacattgtgcagtgcttcgggacattcattaccaacaccgacgtgttcatagccatggaactaatgggaacatgcgcagaaaaactgaagaagaggatgcagggaccgatacccgaaagaatcctcggaaaaatgacagtcgccatcgtaaaagcactgtactatttgaaggagaagcatggggttatacaccgggacgtgaaaccgagtaacattctcctggacgagaggggccagataaagctgtgtgactttggcatcagtgggaggcttgtggactctaaagctaagaccaggtcggctgggtgtgctgcttatatggcaccagaaaggatcgaccctcctgatcccaccaaacctgactacgacattcgcgcagatgtgtggagcctcggcattagtttggtagagttggcaactgggcagttcccctacaagaattgtaagacagacttcgaggtgctgacaaaggttctgcaggaagagcccccactcctacccggccacatgggtttctctggggatttccaatcctttgtgaaggactgcttgacaaaagatcatagaaagcgaccaaaatacaataagctcttagaacattctttcataaagcgatacgaaaccttagaagtcgatgttgcctcctggttcaaagacgtcatggccaaaaccgagtctccacgcaccagcggggtgctgtcgcagccccacctcccgttttttcggtag

SEQ ID NO: 16041 - DNA, 963 bp, synthetic construct
  source 1..963: mol_type = other DNA; note = Synthetic coding sequence
atgtccaagtctgcctcccctaaggaaccagaacagctccgtaaactgtttatcgggggactgtcattcgagacaacagacgagtcccttaggtctcactttgaacagtgggggacactcactgactgcgtcgtgatgagagaccccaataccaaacggtctcggggttttgggtttgttacatacgccactgtggaggaggtcgatgctgcaatgaacactacacctcataaggtggatggccgcgtcgttgagcccaagagggccgtttcccgggaagatagccagcgtcctggagctcatcttactgtgaagaagatcttcgttgggggcataaaggaggacactgaggagcatcatcttcgcgattacttcgagcagtatggcaagattgaggtgatcgagattatgaccgatagagggtctggaaaaaagagaggctttgcctttgtcacatttgacgaccatgactccgtcgacaagatcgttattcagaagtatcacactgttaaagggcataattgtgaagtccgcaaagccctaccgaagcaggaaatggcctcagcttcttcctcccagagaggccgtcggggctcaggaaattttggcggaggtagaggcgatggcttcggcggaaacgataacttcggacgggggggtaatttttctggaaggggaggtttcggaggctcttgcggtgggggaggatatggaggtagcggagacggctataatgggttcggcaatgatggctctaattttggcgggggcgggtcctacaatgacttcggaaactataacaaccaatcttcaaacttcggaccgatgaaggggggaaatttcggcggacggagtagtgggccttacggaggtgggggacagtacttcgcgaagccacagaaccagggcggctacggagtgtcatcaagttcatccagttacgggtccgggcgacggttttag

SEQ ID NO: 16042 - DNA, 1737 bp, synthetic construct
  source 1..1737: mol_type = other DNA; note = Synthetic coding sequence
atggagctggagaacatagtggccaacagtctccttttaaaggctcgccaggggggatatggcaagaagtcaggaagaagcaaaaagtggaaggaaatcctaaccttacctccggtgagtcagtgtagcgagctgaggcactcaattgaaaaggactactcatctttgtgtgataaacagccaataggccgcagactgtttagacagttctgcgacaccaagccgacactcaagcggcacattgaatttctggatgcagtggctgagtatgaggttgcagacgatgaagatcgctcagattgcggcttgagcattctcgatcgattcttcaatgacaagttagccgcccccctgcccgagatccctccggacgtggtgaccgagtgtcggctagggctgaaggaggagaaccccagcaaaaaagcttttgaggagtgtacacgagttgcccacaattaccttaggggcgagccattcgaggaataccaggagtccagctatttctcccagtttctgcaatggaaatggttggagcgccagccagtcactaagaacacgttccggcattatcgggttttggggaaaggaggttttggcgaagtgtgtgcctgtcaagtgcgcgcaacaggcaagatgtacgcttgtaaaaagctgcaaaaaaagagaatcaagaagcgtaaaggcgaggccatggcactgaatgaaaaacggattcttgagaaagtacagagtaggtttgttgtgagtctggcttatgcgtacgaaacaaaggatgctctctgtctggttctgacaatcatgaatggaggtgacctgaagtttcacatctataacttaggcaacccgggcttcgacgaacagagagcggtattttatgccgcagagctctgttgcggcctggaggacctccagcgcgagcggatcgtctatagggacttgaagcctgaaaatattctgctagacgatagggggcacataagaatctctgacctgggtctcgccactgaaattccggagggtcagagagtccgcggtcgggtcggcactgtagggtacatggcacctgaggtcgtgaacaatgagaaatatacttttagtcctgactggtgggggctgggctgtctcatctacgagatgatccagggccacagtccatttaaaaaatacaaggagaaagttaagtgggaagaggtcgatcagcgaatcaagaacgatacggaggagtatagtgaaaaattctccgaggatgcgaagtccatctgccgtatgctgctgacgaagaacccttccaaaagactgggctgccgcggggagggcgcagccggagttaaacaacaccccgtatttaaagacatcaattttcgccgcctggaggctaacatgctggaacctcctttttgtcccgacccacacgcggtgtactgtaaggatgtgttagacattgaacagttctcagtagtgaaaggaatctacctggacacagcagacgaggatttttacgccaggtttgcaaccggctgtgtctcgattccctggcaaaacgagatgatcgaaagcggctgctttaaggacattaataagagcgagtccgaagaagctctgccattagacttggacaagaatattcacacaccggtgagcaggccgaaccgagggtttttttaccggttgttccgaagagggggttgcttgaccatggtcccctccgagaaggaagttgagcctaagcaatgttag

SEQ ID NO: 16043 - DNA, 2625 bp, synthetic construct
  source 1..2625: mol_type = other DNA; note = Synthetic coding sequence
atgaaccagcgttcccacctcggaacaacttacttagatacggcaaaaggggccgtcgagaccttcatgaagcttagggcacgggaccccgcatcaaggggagaccgttacatgttggtcaccttcgaggagcccccatatgccatcaaggcagggtggaaggaaaatcacgcaacctttatgaatgagttgaagaacctacaggcggaggggctcactaccttaggccagtcgctcaggactgcatttgatttgctgaatcttaaccgactggtgactggcattgataactacggacagggaagaaatccatttttcctggagccagccattattatcactatcaccgatgggagtaagctcacaactacgagtggtgtccaggacgagctgcatctgcctctgaactcccctctacctgggtccgagctgactaaggagcctttcagatgggatcagagactctttgccctcgtgttacgactgcctggcacgatgtccgtggaaagcgagcagttgaccggtgtccccctggacgacagcgcaatcactccaatgtgtgaagtgacgggcggtaggagttattctgtttgttccccgaggatgctgaaccagtgcctcgaatccctggtccagaaagtgcagtctggagtagttattaattttgagaaggccggtcctgatccaagtcctgtagaggatggacagcctgacatcagccgccctttcgggagtcaaccgtggcacagctgccataaactcatttatgtgcggcccaacccaaaaactggagtgcccatcggacactggcctgtacccgagtccttctggcctgaccaaaatagcccaaccctgcccccccgaacttctcaccctgttgtgaagttctcttgtactgactgtgaacccatggtcatcgataagttgccattcgataaatacgaattggagccttccccactgacccagttcatactcgagcgaaaatctccacagacgtgctggcaggtgtacgtgtcaaatagcgcgaaatactcggaactggggcatccctttggttatttaaaagcttccaccgccctgaactgtgtgaatctgtttgttatgccctataattatcctgtcctgctacctctgctggacgatctgtttaaggtccacaaggctaagccaacactgaaatggcgacaaagctttgagtcctacctgaagacgatgcctccatactacctaggacctcttaagaaggccgttcgcatgatgggagcccctaatctgattgccgattccatggagtacggactgagctatagtgtgatctcttaccttaagaaactgagccagcaagcgaaaatcgaaagcgaccgcgtaatcggcagtgtcggaaagaaagttgtgcaggaaacaggcattaaggtgaggtcccgcagccatgggcttagtatggcttatcgcaaggactttcagcagcttctccagggcatcagcgaggatgttcctcatcgattactggacttgaatatgaaggaatatactgggttccaggtggctctgctcaataaggatctaaaaccccagacctttcggaatgcatatgacattccgcgcagaaacttactggaccacctgacacggatgaggtctaacttgctgaagagcacccgacgctttctgaaggggcaggatgaagatcaggttcacagcgttccaattgctcagatgggaaattaccaggaatacctcaagcaggtgccctctcctctccgcgagcttgatccagaccagcccagaaggctgcatacatttggcaatcccttcaagttggacaaaaagggcatgatgatagacgaggcagacgaattcgtcgccggacctcagaataaacacaaaaggcccggagaaccaaatatgcagggcattcctaaacgcaggcgctgtatgagccctctgttgcggggccgccagcaaaatccagtggtaaacaaccatatcggggggaaaggtcctcctgcacccaccactcaggcccagcccgaccttattaagcccctccccctgcataagattagcgaaaccacgaacgactcaattatccacgatgttgtagagaatcatgtggctgatcaactgtcttcagatatcacacctaatgcgatggataccgagtttagtgcaagctctcccgcctcccttttagaaagacctacaaaccacatggaggcactggggcatgaccacctggggaccaacgatttaacggtcggggggtttttggagaatcatgaggaaccccgtgacaaggagcagtgcgcggaagagaacataccagcctccagcctaaacaagggcaagaagctgatgcactgccgcagccatgaagaggtgaacactgagctgaaggcccagattatgaaggagatccgcaagcctggaaggaagtacgagagaatttttaccctgctcaagcatgtgcagggatcactccagaccaggttgattttcctgcagaacgtgattaaagaggcatcaaggttcaagaaacggatgttgatcgagcagctcgagaactttctcgacgaaatacaccggcgcgcgaatcaaattaaccatattaactccaactag

SEQ ID NO: 16044 - DNA, 2340 bp, synthetic construct
  source 1..2340: mol_type = other DNA; note = Synthetic coding sequence
atggctgattattctaacaagctgtactaccagctggagcaggagacaggaatccagacgggatacacccgaacagggagtatcttcctggcccagacacaggacaggctcatctcccttaaaaggataaatgccgggctgaatgtcatcggaattccgtccgagataatctcgcccaagaaagtggcggagttacatcatctgttgaacgtgcatgacttggtcggggccatgcacgtgccggaggatgccgtcgtgtcttccgccgatgtggctctggcgttggcaagcgctgcatcccagaacggtgttcagatctacgaccggacttcagtcctgcatgtgatggttaagaaggggcaagtgaccggggtcgaaacagataagggtcagattgaatgtcagtacttcgtgaattgcgcggggcagtgggcctacgaattggggctgtctaacgaagagccagtgagtatacctctgcacgcctgtgaacatttctatctgctaactcggcctctagagacaccacttcagtccagtaccccaacaattgtcgatgcagacggaaggatttatatcaggaactggcagggtggaatactaagcggtggttttgaaaagaatcccaagccaatctttacagaaggcaaaaatcagttggaaatccagaatctccaagaggattgggaccactttgaaccactcctctctagtctgctcagacgaatgcctgaattggaaacattagaaatcatgaaattggttaactgtccggagacgttcacaccggatatgcgctgcatcatgggagagagccccgccgtgcagggctactttgtgctagccggcatgaactccgctggcctttcttttggaggcggcgcgggcaagtacctggcagagtggatggtgcacgggtacccaagcgaaaacgtgtgggagctcgatctcaaacgctttggggcgctccagagctctcgtacctttctgaggcacagggtgatggaggtcatgcctcttatgtacgatctcaaagtgccccgatgggactttcagacagggcgtcagctaaggacatctcccctgtatgaccgcctggacgcccaaggagcaaggtggatggagaaacacggattcgagcgtcccaaatacttcgtccctccagataaggatcttctggccctggagcagtcgaaaacgttctacaagccagactggtttgacattgtcgagtcagaagtgaaatgctgcaaggaagccgtctgcgtgatcgacatgtccagcttcaccaaattcgaaataactagcacgggcgaccaggctttggaggtgttacagtatcttttctcaaatgacctagatgttcccgtgggccacatagtgcacacgggcatgcttaatgagggcgggggttatgagaacgattgtagtatcgcacgccttaacaaacgatccttttttatgattagtcccaccgatcagcaggtacattgctgggcatggttaaagaaacacatgcctaaagactctaacttgctgctggaggatgttacatggaagtacaccgctcttaatctcatagggccacgcgccgttgacgtgctgagtgagctctcatacgcaccgatgactccagatcactttccatccttgttctgcaaagagatgtctgtcggctatgctaacggtatccgcgtcatgagcatgacacacaccggagagccggggttcatgctgtacataccaatcgagtacgcactgcatgtgtataatgaagtgatgagtgttgggcaaaaatacggtatccgcaacgcggggtattacgccctccggtcacttcggattgaaaagtttttcgcattctgggggcaggatataaacaacctcacgacgcctctggagtgcggcagagaatcgagagtgaagttggaaaaggggatggacttcatcggtagagacgcactgctgcagcagaagcagaatggcgtgtataaacgactaactatgttcatcctggacgaccatgacagcgacttggacctgtggccctggtggggcgagccaatttatagaaatgggcagtatgtgggcaagacaacaagctcagcctattcctactccctggagaggcatgtgtgtctgggcttcgtacacaacttttctgaggacaccggggaggagcaggtagtaaccgcagactttattaataggggtgagtacgaaatcgatatcgctggctatagatttcaagccaaggctaaactgtatcccgtggctagtttgtttacgcagaaacggcggaaagatgacatggaactcagtgacctgcacggaaaatag

SEQ ID NO: 16045 - DNA, 1191 bp, synthetic construct
  source 1..1191: mol_type = other DNA; note = Synthetic coding sequence
atggccaccagagttgaggaggctgcccgcggaagaggcggtggcgcagaagaagcaacagaagccggcaggggcgggaggaggcgatccccgcgccagaaacttgaagagtccaggtctgtccaaaaacaaatgaagatcctgcagaaaaaacaggcacagattgttaaggaaaaggtgcaccttcagtcagagcactcaaaggccatactggccagatccaaactagaatccttgtgtagggagctacagaggcataataagactctgaaagaggagaatatgcaacaggccagggaagaggaagaaagacgtaaagaagccacagcccattttcaaatcacactcaatgaaatccaggcacagcttgagcagcatgatattcacaatgccaagttgaggcaggagaatatcgagctaggcgagaagctcaagaaactgatcgagcagtatgccctgcgtgaggagcatatcgacaaggtctttaaacataaagaactgcaacaacagctggtggacgcaaaattacagcagacgacacagctcattaaagaagcagatgagaagcatcagagggaacgcgagttcctactgaaagaggctacagaatctcggcacaaatacgagcagatgaaacaacaggaagtgcagctgaagcagcaactgagcctctatatggacaaatttgaggaatttcagacaacaatggcgaaaagtaatgaattatttacgacttttcgccaggaaatggaaaagatgacgaaaaagatcaaaaagctagaaaaggagactatcatttggcggactaaatgggagaataacaacaaggcgttactgcagatggctgaagagaaaaccgtgcgggacaaagagtataaagctctgcaaataaagctggagagactagaaaagctttgtcgggccctgcaaactgagcgaaacgagctcaatgagaaggtagaagtgctgaaagagcaagtcagcattaaagcagccattaaggcagccaatagagatttagcaacccccgtgatgcagccatgtacagcattggacagtcacaaggagttgaacacatcctctaaacgagccctgggagctcatctggaggcagaacctaagtcacagagatcagctgtgcagaagccgccgagtactggaagcgctcctgcaattgagagcgtggattag

SEQ ID NO: 16046 - DNA, 1443 bp, synthetic construct
  source 1..1443: mol_type = other DNA; note = Synthetic coding sequence
atggctggttacctgtcagagtctgattttgtaatggtggaagaaggatttagtacccgtgatctcttaaaagagctgactctaggggcgtcgcaggctactacagacgaagtagcagccttctttgtggccgacctgggcgccatcgtgcgaaagcacttttgcttcctcaagtgtctcccaagagtccgcccgttctatgctgtgaaatgcaactcctctcctggtgtccttaaggttctggctcaattgggcctgggcttctcatgtgcgaacaaagctgagatggaattagtgcaacacattggaatccctgcaagcaagatcatatgtgcgaacccttgtaagcagatcgcccagataaaatacgccgccaaacatggtatccagttactgagctttgacaatgagatggaattggcgaaggttgtgaagtctcatccgtccgccaagatggtactgtgtatagcaacagacgactcacatagcttgtcttgcctgagcctgaaatttggtgtatctctcaaatcgtgccgccacctcctggagaacgcaaaaaagcaccacgtggaggtggtgggtgtgagtttccatatcgggtccgggtgcccggatccgcaggcctacgcccaatctattgctgacgctagactggtgtttgagatgggcacggagctgggccataagatgcatgtattagacctcggcgggggtttcccagggactgagggcgccaaggtaagattcgaggagattgcttctgtgataaactcagcgctggacctgtactttcccgagggatgtggcgtcgacatctttgctgaattagggaggtactacgttactagcgcgttcaccgtggcggtgtcaatcatagccaagaaggaggtgctcctagatcagcccgggagggaggcccccctcccccccccgcatatcgccacttgcgctgccagtgagccgtccccaccagctgaggagaacggcagtacctctaaaactatcgtttaccacctggacgagggcgtctacgggatttttaactccgtgctgttcgataatatttgtcctaccccaatccttcagaagaagccttcaacggaacagcctctgtactcctcttctttgtggggccccgcagtcgatgggtgtgattgtgtggctgaaggcctgtggcttcctcagctgcatgtgggggactggctggtgttcgacaacatgggcgcctacaccgtaggcatgggaagtcccttctggggcactcaagcttgccatattacgtatgccatgtcacgcgtggcctgggaggcccttaggcgtcagctcatggcagcggaacaagaagacgatgtcgagggagtatgtaagccccttagctgcggatgggaaatcaccgatactctatgcgttggtcctgtgtttaccccggcgtccattatgtag

SEQ ID NO: 16047 - DNA, 3774 bp, synthetic construct
  source 1..3774: mol_type = other DNA; note = Synthetic coding sequence
atggcgcacttttcctctgaggaccaggccatgctccaggcgatgttgcgcaggttgttccagtccgttaaagagaagattaccggagcaccatcccttgaatgcgccgaagaaattctactccaccttgaggaaaccgacgaaaacttccataattatgaattcgtgaagtacttaagacaacacattgggaacaccctcggtagcatgatcgaagaagaaatggaaaagtgtacctccgatcggaaccaaggtgaagagtgcggatacgacactgtggtgcaacaggtcacaaagcggactcaagaaagcaaagagtataaagagatgatgcactacctcaaaaatatcatgatcgcggtggtggagagtatgataaataaatttgaggaagacgaaactaggaatcaggagcggcaaaaaaagatacagaaagagaagtcccattcctacagaacggataactgtagcgactccgactcttctctgaaccagtcttacaaattttgccaggggaagctgcagctgatacttgaccaacttgaccccggacagccaaaggaggtacgctacgaagccttgcaaacattatgctccgcccccccgagcgacgttctcaactgtgagaactggactactctgtgtgagaaactgacagtaagcctctctgaccctgaccctgttttctctgaccgaatacttaagttctgtgcgcaaacctttctactttctcccctgcacatgactaaagagatttacacttccctggccaaatatctggaatcatacttcttgtcccgcgagaaccacatccctactctgtctgccggggtagatatcacgaacccaaacatgaccaggctcctcaagaaggtaagactactgaacgaataccagaaggaggctccctctttctggatcagacatcccgaaaagtatatggaggagatcgttgagagtacgctatctctactcacagtaaagcataatcaaagtcacgtggtgtcgcagaaaattctggaccccatctacttcttcgcactagtcgacaccaaagcggtgtggttcaaaaagtggatgcacgctcattactccaggactactgttctgagactgttagaaacaaaatataagtctctggtgaccaccgccatccagcagtgcgtccaatacttcgaaatgtgcaagacaaggaaagctgacgaaacactcggccattctaagcactgccgcaacaagcagaaaacgttttactatctaggtcaggagctccagtacatttactttatccactctttgtgtctgttaggcagacttctgatttacaaacagggccggaaactgttcccaatcaagttgaagaacaagaaaggcctggtgtctctgatcgacctgctcgtgctctttacacagctgatatattactccccttcatgcccaaaaatgaccagcgccgctcattccgaaaactatagtcccgcatcaatggtcacagaagtgctgtggatcctttctgatcagaaagagtgtgccgtcgaatgtttgtacaataatatagttatcgagaccctgctgcagcccatacataacctcatgaaagggaatgaggcctctccaaactgcagcgaaactgcactaatccatatcgcaggcattctggcccggatcgcctctgtcgaagagggcctaatcctgctactgtacggggcaaacatgaatagcagtgaggaatcgcccacaggcgctcacataatcgcccaattttcgaaaaagctccttgacgaagatatttccattttcagtggctcagagatgctgcccgtggtcaagggagcctttattagtgtgtgcagacacatatactcaacttgcgagggactccaggtactgatcacttataacctgcatgagtcgattgcaaaggcttggaaaaaaacatcactcctgtccgagaggattcctaccccagtggaggggagcgatagtgtctccagtgtgagtcaggaatctcagaacattatggcgtgggaagacaatctgctcgacgatctccttcacttcgccgctacacctaaggggctcctgctgttgcagcggactggcgcgatcaatgaatgcgtgacctttatttttaaccggtatgcaaagaagctccaggtgtccaggcataagaagtttgggtacggggtccttgtgacaagagtagccagcacagccgcaggaggcattgctctgaagaagtctggcttcatcaatgagctgattacagagttatggagtaacctcgaatatggacgcgacgatgtgagggtgacacatcctaggaccactccggtcgatcccattgaccgcagctgtcaaaagagttttctcgccctggtcaatctgctcagctatcctgcgatttacgaactcgtcagaaatcaggacctgccaaacaaaacagagtatagcctcagagaggtgcccacatgtgtcatcgatattatcgatcggctaatcatcctcaactctgaggcaaagataagatccctctttaattacgaacaaagccacatattcgggctgcgtgacttcattatcgatggcttatcagtagaacgcaatcatgtattggttcgcatcaacctagtaggcgggccgctagagcggatattaccaccgcgcctcctggagaagtcagataatccatacccctggccaatgttcagttcttacccccttcccaattgctatctatcagatattactcgcaacgctggcattaaacaagacaatgatttggataagttgctcctttgcctgaaaatctcagataaacagactgagtggattgaaaactgccaaagacaattttgtaagatgatgaaggctaagccagacattatcagcggggaggccttgattgagttgctggaaaagtttgtactacaccttactgagtccccgtccgaatgttattttccgtctgtcgagtacactgcgaccgatgcaaatgtgaaaaatgaatccttgtcctctgtacagcagctcggcatcaaaatgactgtccgttacggcaaattcctaagcctcctcaaggacggagccgagaatgatctgacctgggtcttgaagcactgtgaacgcttccttaaacaacagcagacatcaattaagtcttcccttctttgccttcagggaaattacgccggacacgattggttcgtgtcatctctcttcatgataatgctaggtgacaaggagaagacctttcagtttctgcaccaattcagccgtctcctgacctccgccttcctgtggctgccacgcctgcacatcagctcgtacctgcccaatgacacggtggagtcaggcattcaccccgtctatttttgttccacccactacatcgaaatgcttctgaaggcggagctgccgttagtctttagcgccttccacatgagtgggtttgcccccagccaaatttgtctccagtggatcacacaatgcttctggaattatctagactggatcgagatatgtcactacatagccacgtgcgtgttcctgggtccagattaccaggtctacatttgcattgctgttttcaagcacttgcaacaggacatcttacagcatacacagacgcaggatctccaggtcttcctgaaggaagaagccttgcatgggtttagagtcagtgactatttcgaatacatggagatcctcgaacagaattaccggacagtgcttctacgggacatgaggaatataaggttgcagagcacatag

SEQ ID NO: 16048 - DNA, 612 bp, synthetic construct
  source 1..612: mol_type = other DNA; note = Synthetic coding sequence
atggccaccccgtacgtcacagacgaaacaggagggaagtacattgcctccactcaacgacctgacgggacctggcgcaagcagagaagagtgaaggaaggatatgtcccgcaggaggaggtgccggtttacgagaataaatacgtcaaattctttaagtcaaaaccggagctgccacccggtttatcaccagaagccaccgctccagttaccccctctaggcccgagggaggcgagcccggcttgtccaagaccgcaaagaggaatcttaaacgaaaagaaaagagaagacagcagcaggagaagggcgaggcagaggccttgtcccgcacactcgacaaagtcagcctcgaagagaccgctcagctgccgagtgcaccgcaaggaagccgtgccgcccccactgcagcttccgaccagcctgactctgctgccactacagagaaagccaagaagataaagaatcttaagaagaagctgagacaggtcgaggagctgcagcaaaggattcaggctggggaagtgtcacagccaagtaaagaacagctggagaaacttgctcgcagacgcgcactggaggaagagctggaggacctggaactagggttgtag

SEQ ID NO: 16049 - DNA, 729 bp, synthetic construct
  source 1..729: mol_type = other DNA; note = Synthetic coding sequence
atggctgctgtgaaggcgtccacctctaaggccacaagaccgtggtattctcatcctgtgtatgctcgatattggcaacattatcaccaggctatggcttggatgcagtcccatcataacgcctacaggaaagccgttgaatcttgttttaacttgccctggtacttgccttccgctttgctgccgcagtcttcctacgataacgaggcagcttacccacaaagcttctatgatcatcatgtcgcatggcaggattacccttgtagtagttctcactttcgacggtcaggtcagcacccccggtattcatctagaatccaggcttccactaaagaagatcaagccctttccaaagaggaggagatggagactgagtcagacgccgaagtagagtgcgacttgtccaacatggaaatcacagaggagctgcgccaatattttgccgaaaccgaacgtcaccgggaggagcggagaagacagcagcaactggacgctgagaggcttgactcatatgtgaatgccgaccatgacttgtactgtaatacacggcgcagcgttgaagctccaacagagcgacctggcgagaggcgacaggccgaaatgaagcgcctctacggcgattctgctgccaaaattcaggccatggaagccgctgtgcagctttccttcgataaacattgcgatcggaagcaaccaaaatactggcctgtcatcccactcaaattctag

SEQ ID NO: 16050 - DNA, 738 bp, synthetic construct
  source 1..738: mol_type = other DNA; note = Synthetic coding sequence
atgatcggtgtatccttcgaggaagcaaagtccataattacaggggcaaagcttagtacgcgcctggaaagcgcttgggaaatcgcatttatccggcagaagtctgacaacattcagcctgagaacctgagctgtaccagtctgattgaagcaagtggtgagtatggtccacaggcctcaacgctttcactgttttcctctcctcctgaaattctgattcctaagaccagcagtacaccaaaaacaaataatgatatcttgagctcttgcgagatcaaaacgggttacaacaagaccgtgcagatccctatcactagcgaaaattctacagtgggattatccaatactgacgttgcttcagcttggactgagaattacgggctccaagagaaaatctcccttaatccctctgtgagattcaaagcagaaaaactggagatggccctgaactacttgggaatacagcccaccaaagagcaacaccaggcactgagacagcaggtgcaagccgatagcaaagggacagtcagctttggggatttcgtgcaggtggcacgcaacctcttctgtctacagttagacgaagtcaatgtcggggctcatgagatcagcaatattctagattcccagcttttgccatgcgattcatcagaggcggatgagatggagcgtctcaaatgtgagagggacgatgccctgaaagaggttaacacattaaaatggccaggacaaaactag

SEQ ID NO: 16051 - DNA, 1020 bp, synthetic construct
  source 1..1020: mol_type = other DNA; note = Synthetic coding sequence
atgatggactcacagctggtggctggggtcgcgtttaaaaagacattcagttacgccggatttgaaatgcagcctaagaaatatcacaatcccaagatcgccctgctgaacgtggagctcgagttaaaggccgaaaaagataacgctgagatccgggtccacacagtggaggactatcaagccattgtggatgcagagtggaacatcctgtatgacaagttagagaagatacaccacagcggggccaaagtcgtcctgtcaaaattacccattggggacgtagcgactcagtacttcgcagacagagacatgttttgcgctgggagagttcccgaggaagacttgaaaagaacaatgatggcatgcggagggagcattcaaactagcgtgaatgcactcagcgcagacgtcctaggtcgatgtcaggtgtttgaggagactcagatcggaggtgaaaggtataacttctttaccgggtgtcctaaagctaagacatgtaccttcatcctacgtggaggggccgaacagttcatggaggagactgaaaggtctctccacgatgcaatcatgatcgttcgtagagctatcaagaacgactccgtcgtcgccggaggaggtgctatcgaaatggagctctctaagtacttgcgcgattattcccggaccatcccagggaagcagcagttgctgataggcgcatatgcaaaggctctggagatcattcctcggcagctctgcgataatgcagggttcgacgcaaccaatattctaaacaaattgcgggccagacatgctcagggggggacatggtatggcgtagatataaacaacgaagacattgctgacaatttcgaggctttcgtgtgggaacctgccatggtgcggattaacgccttgactgccgctagcgaggccgcctgcctcattgtgtccgtcgatgaaaccattaagaacccccggtccactgtcgacgcccctactgccgccggcagagggaggggacggggtagaccacattag

SEQ ID NO: 16052 - DNA, 768 bp, synthetic construct
  source 1..768: mol_type = other DNA; note = Synthetic coding sequence
atggcatcctccgatctggagcaactctgcagccatgtgaatgagaaaatcggcaatattaaaaagactttatctctaaggaactgtggtcaggagccgactttgaagactgtcctgaataagatcggcgacgagatcattgtcattaacgaactcctcaacaagctcgagctggagattcagtaccaggagcaaaccaacaattcgttgaaagaactctgcgaatctcttgaggaggactacaaggacatcgagcatctcaaagaaaatgtgccctctcatctcccccaggttaccgtgacgcaaagttgtgtgaaggggtctgacctcgaccccgaagagcccatcaaggtcgaagaaccggagcctgtgaagaagcctccgaaagagcaacgctcgattaaagagatgcctttcattacatgcgacgaatttaacggcgttccgtcttatatgaagtcacgactgacctacaaccaaattaacgatgttatcaaagaaattaataaagccgtgattagtaaatataaaatcctacaccagcccaagaaaagtatgaatagcgtgacccgtaacctctatcataggtttatcgacgaagagactaaggataccaagggaaggtacttcatcgtcgaggctgacatcaaagaatttacaaccctcaaggccgataagaagttccacgtccttcttaatattcttaggcactgcaggcggctatcagaggtccggggcggtggacttaccaggtatgttatcacctag

SEQ ID NO: 16053 - DNA, 441 bp, synthetic construct
  source 1..441: mol_type = other DNA; note = Synthetic coding sequence
atggttaattcttgttgtggatctgtgtgcagcgaccagggttgtgaccagggactttgtcaagaaacctgctgccgccccagctgctgccagacgacctgttgctgcccatcttgtgtggtatctagttgttgtaggccctcctgctctcagaccacctgttgtcagactacctgctgcaggccttcttgttgccatcctgtttgttgccagaccacctgtaggccatcatgtggcgtatcgtcatgctgtcggcccctctgttgtcagacgacatgtcacccatcttgcggtatgtcatcatgctgccgaccgttatgttgccagacgacatgcagacctagctgcggagtgagcagctgctgcaggcccctttgttgccagactacttgctgcagagccacctgttgtcgcccctcttgttgtggctcctcctgttag

SEQ ID NO: 16054 - DNA, 1296 bp, synthetic construct
  source 1..1296: mol_type = other DNA; note = Synthetic coding sequence
atgacaagcgactgtagcagcacacactgtagtcctgaatcttgcggaaccgccagcggctgtgccccggccagcagttgttcagtcgaaaccgcctgccttccagggacatgcgctacatctcgatgtcagaccccgagctttttgtcccgctctcgcgggttgacaggttgtctcctcccttgctattttaccgggtcatgcaattcgccttgtctagttggcaattgcgcttggtgtgaggacggggtcttcacctccaacgagaaagagaccatgcagttcttgaatgacaggctggcaagctacttagaaaaagtccgttcacttgaagagaccaatgcagagctagagagcaggatacaggaacaatgcgagcaggacatccctatggtctgtcccgactaccagagatacttcaatacgatcgaagatctccaacagaaaatcctgtgcactaaggccgagaactctaggctcgcggttcagttagacaattgcaagctcgcaaccgatgacttcaagagtaagtatgagtctgagctgagcctgaggcaactactggaagcagacatcagttctctccatggaatcctggaagagttgactctttgtaagagcgatctcgaagcccatgtggagtcgctgaaagaagacctcctatgtctgaagaaaaatcacgaagaagaagtcaatctgttgcgcgaacagttgggcgaccgtctaagcgtggagcttgacaccgcccctacactcgacctcaatcgtgttcttgatgagatgcgctgtcaatgcgaaactgttctagccaataacaggagggaagcggaggagtggctagcagtgcagaccgaggagctgaatcagcagcagctgtcctccgctgaacagctccagggatgccagatggaaatcttggagctgaagagaacagcttcagccctggaaatcgagctgcaggctcagcagtctctgaccgaaagtttggagtgtacagtcgccgagaccgaggctcagtactctagccagctcgctcagatacagtgcctgattgacaacctggaaaaccaattggctgaaattcgatgtgatctggagcgtcagaaccaggaataccaggtgctgctggatgtcaaggctcgtctggagggggagataaatacctattggggcctgttagactcggaggactcccggctaagttgcagcccatgctctaccacctgcaccagcagtaacacctgcgaaccttgtagtgcctacgtcatctgtaccgttgaaaattgttgcctttag

SEQ ID NO: 16055 - DNA, 471 bp, synthetic construct
  source 1..471: mol_type = other DNA; note = Synthetic coding sequence
atggggtgttgtggatgctctggcggatgtggcagtggttgtggtggatgtgggtcaggcagtggagggtgtggttccggatgtggtggctgcggttcctcgtgttgcgtgcccatatgttgctgcaaacctgtttgttgctgcgttcccgcctgctcttgcagcagctgcggaagctgcggcggatccaagggtggttgcggctcatgtggctcctcgaagggcggttgcggctcttgtggttgctcccagtcaaattgctgcaaaccttgctgcagtagcagcggttgcggcagcttctgttgtcagagttcctgctctaagccatgctgctgccagagttcatgctgccagagctcttgctgcaaaccatgttgttgtcagagctcatgttgtcagtcatcgtgctttaaaccatgctgctgtcagtccagctgctgtgtgccagtctgctgccagtgcaaaatatag

SEQ ID NO: 16056 - DNA, 609 bp, synthetic construct
  source 1..609: mol_type = other DNA; note = Synthetic coding sequence
atggggtgttgcggctgttcaggcgggtgtgggagcggttgcggcggctgtggtagtgggtgtgggggatgcgggtcgggttgcggcggatatggcagcgggtgcggcggatgcggaagtagttgctgtgtgcccgtgtgttgttgcaagcctgtctgctgttgtgtacccgcatgttcctgtagcagttgtggcagctgcggcggcagcaagggcgattgcgggagctgcggcggcagtaaaggcgggtgcggctcctgcggagggtccaagggagggtgcggtagctgcggcggctcgaagggtggctgcggcagttgtggcggttcaaaggggggatgcggctcctgtggcggtagtaagggcgggtgtggttcatgcggcgggagtaagggaggatgcggctcttgcggctgtagccagtgcaactgttgcaagccgtgctgttgttcctccggatgcgggagctgttgccagtcttcgtgctgtaacccttgctgctgccagagctcgtgctgcgtgcctgtatgctgtcagagcagctgttgtaagccttgttgctgtcagtcatcatgctgcgtgcccgtgtgctgccagtgtaagatttag

SEQ ID NO: 16057 - DNA, 498 bp, synthetic construct
  source 1..498: mol_type = other DNA; note = Synthetic coding sequence
atgggctgctgcggctgtagtgagggctgcgggagtgggtgtggaggctgcggaagcgggtgcggaggatgcgggagtggctgtggaggatgtggtagttcgtgttgcgttcctgtgtgctgctgcaagcccgtctgttgttgcgttcccgcatgtagttgctccagctgcggtagttgcgggggttctaaggggggctgtggcagctgtgggggcagcaagggaggatgcggctcctgtgggggtagtaaaggcggttgcggctcatgtgggtgttctcagtgcagttgttacaagccatgctgctgttcatccggatgtggcagctcctgctgccagtcttcatgctgcaagccctgctgctgccagtcaagctgctgcaagccctgctgttgcagctccggctgtggttctagctgttgtcagtcttcctgttgtaatccgtgctgttcccaaagctcatgttgcgtgcctgtctgttgccagtgcaagatatag

SEQ ID NO: 16058 - DNA, 3105 bp, synthetic construct
  source 1..3105: mol_type = other DNA; note = Synthetic coding sequence
atggcctcagtgtttatgtgtggagttgaggatctcttattcagcgggagtcgctttgtctggaacctcaccgtcagtactctacgacgctggtataccgagcgtcttcgtgcttgtcaccaagtactcaggacctggtgcggactgcaagacgtctaccagatgaccgagggacgccattgccaggtgcacctcctcgacgaccgtcgcttggagctgttggtacagcctaaactccttgcccgcgagctgctggatctggtcgcttctcatttcaatctgaaggagaaagagtactttggtatcacgtttatcgatgatacagggcagcaaaattggctacagctcgaccacagagtgctggatcacgatctccctaagaaacccggtccaacaatcctgcactttgcggtgcgcttttatatcgaaagcatctcattcctgaaagacaagaccactgtcgagctcttctttctgaacgctaaggcatgcgtgcataaaggccagattgaagtggaatccgagacaatttttaaattggccgccttcattctgcaggaggccaaaggagactatacgagcgatgagaacgcgcggaaggatctgaaaaccctgcctgcattcccaaccaagaccctccaggaacacccatcattggcttactgtgaagatagagtgatcgaacattacctgaagattaaagggttaactcgaggacaggccgtggtccagtacatgaagattgttgaggcactccctacttacggggtacattattacgctgttaaggacaagcaaggcctgccctggtggctcggtattagttataaaggcatcgggcagtacgacattcaggataaagtcaagcctcgcaagctatttcagtggaagcagcttgagaacctgtatttcagggagaagaagttcgccgtggaggtgcatgacccgcgacgcatatctgtttctcgccgaactttcggccagtccggcctgtttgtacagacctggtacgccaactcatcccttattaagagcatttgggtgatggccatcagccagcatcagttctacctcgaccgcaaacagtctaaggcaaagatccctagcgccaggtcattggatgagattgcaatggatctcaccgagacaggcacgcaaagagctagcaaactggtgactctcgagaccaagagtcagttcatcatggccagtaacgggtctttgattagttctggctcccaggatagtgaggtgagcgaagaacagaagcgcgagaagatactggagctaaagaagaaggagaagcttctgcaggaaaagcttctcaaaaaagttgaagaacttaagaagatctgtctccgagaagcggagttgaccgggaagatgcctaaagaatacccgctgaatatcggcgagaaaccaccacaggtgagacggcgggtgggaaccgccttcaagcttgatgacaacttgctaccaagcgaagaagaccccgctctccaagagttagagtccaattttcttattcaacagaaactcgtcgaggccgcaaaaaagctcgctaacgagccggatttatgcaagacagtgaagaaaaaacgcaaacaggattacactgacgcgatgaaaaagctgcaggagattgaaaatgctatcaacgaatacagaatacggtgcggcaaaaaaccttctcaaaaggccactgtactgcccgaggatatcattccgtctgagagtagcagtttatcagataccacaacatatgacgacccttcagacgcttttacttttcctggccagaggtcttcttctgttcctcattccccacgtatcctgccgcctaagtcactgggcatcgagcgcattcatttcaggaaatcctccattaatgagcagtttgtggacaccagacagtcaagagaaatgctatcgacccactctagtccctacaagactctggagagacgcccccagggaggccgttccatgcccactacgcccgtactgactaggaatgcctattccagcagccatctcgaacctgaatcctcttctcaacactgccgccagcgttctgggagcctagaatcccagtctcatctgttgagcgagatggacagtgacaagccattcttctcccttagcaaatcccaacggtcaagctccacagagatccttgacgacggcagttcgtatacatcacagtcttctacagaatattattgcgtgactcccgtcacaggcccttactataccactcagaccctggatacaaggactcgaggaagacggcggtcaaagaagcagaacgtgtcaacaagtaacagcggatctatgccaaacctcgcccagaaggacagccttaggaacggggtgtactcaaagtcccaggagcctccaagctctagttactacattgctggctatactccctatgccgaatgcgatttctattactcaggggggtatgtgtatgagaacgatactgagggacagtacagtgtcaacccctcatacagatcttcggctcactacgggtacgaaaggcaacgagactatagtagatcatttcacgaagacgaagttgaccgcgtgcctcacaacccctatgccacacttagattgccccgcaaagccgccgctaagtctgagcacatcaccaagaacatccataaggcccttgttgcagaacatctccgcggctggtaccaacgcgcttcagggcagaaagatcagggccacagcccacagaccagctttgattctgatagaggatcacaacgctgcctcggcttcgctggcctgcaggttccctgtagtcccagcagtcgggcatcttcgtattccagcgtatccagtactaacgcgtcggggaattggaggacacagttaaccatcggtctgtcggattatgagacgcctgcccatagttcctacacctcctgttatggcaacgtctataatcctctgccctctccctctcgacagtacactgaaatctcacagctggacggaaccgacggtaatcaactggaggataacctagaatctagcgagcagcggttattctggcacgaggattctaaacctggaactttggtgtag

SEQ ID NO: 16059 - DNA, 501 bp, synthetic construct
  source 1..501: mol_type = other DNA; note = Synthetic coding sequence
atgctttcacagtcttgcaatctggatcccctgactgagacctatggtatcccattttatctccaatatctggcgcactggccggaatattttattgtggcggaggcccctggaggggaactgatgggatatatcatgggaaaggccgaaggatctgtcgcgcgggaggagtggcacggccatgtgacggccttgagtgtggcccctgaattccgccgcctcggcctcgcagccaagctgatggaattattggaggaaatcagtgaaagaaaggggggattctttgttgaccttttcgtgagagtctctaatcaggtggcagtcaacatgtataagcagcttgggtacagtgtgtacagaaccgtaattgagtactactccgcctcaaatggagagcccgatgaagacgcttacgacatgcgcaaggctctgagccgagacactgaaaagaaaagtatcatccctcttcctcacccagtacgtcccgaggacatagagtag

SEQ ID NO: 16060 - DNA, 399 bp, synthetic construct
  source 1..399: mol_type = other DNA; note = Synthetic coding sequence
atgcgggcgtcgccttgtatcagccagcccgccgccagctggcacccacgtccaagtgctctgcggccaaccgccggttccgggccagacacccgcactcccgggacggtggaggatggcagcgctccctgtccagccttccgatctccagctgtgagcccttgtggcgaggaaccgtgttgcttccagatttctccggctgaagagaccctggaactgggtaggctcgtatcaccaggaaactgcgatactctttctccgcgggccgcgggattctatgcttgtcatgtgaggtcccttatcccctgtaggagtacgaaaggtcgatggccacttaccgccagtgctgcaggcctgtccagacacgcgcagtgcgggccctctctgggcttgggttag

SEQ ID NO: 16061 - DNA, 375 bp, synthetic construct
  source 1..375: mol_type = other DNA; note = Synthetic coding sequence
atgagggcatctccatgcatttctcaacctgccgcttcttggcacccacggcccagcgcactgaggcccaccgcaggctctggccccgacacaagaacccccggaaccgtggaagacggaagcgccccatgccctgccttccggtctcctgccgtgtcaccatgtggcgaagagccttgctgtttccaaattagtccagcggaggaaactctggagctgggaaggctcgttagccctggaaattgtgacactctttccccccgcgctgctggcttctatgcttgccacgtccggtctctcattccatgtaggtctactaaagggcgatggccactgaccgcttctgccgcgggattaagctctttctccggctag

SEQ ID NO: 16062 - DNA, 336 bp, synthetic construct
  source 1..336: mol_type = other DNA; note = Synthetic coding sequence
cttatggatctggacagcggggacgtgaagcgccgcgtgcacttattcgagactcaaagacgtacaaaggaggaagatcccatcatccctttctctgatggtcccatcatcagcaaatggggggccatttcaaggtcaagtaggaccgggtaccataccactgaccctgttcaagccactgcatctcaggggtctgctacaaagccaattagcgtctcaggcggcgtacacatggcaacacgtccgcaccatcagcacaccatgcttaaaggcacagactcccttctcctgatatatcttgtcatcgagtccatcccagtgttggggactttttag

SEQ ID NO: 16063 - DNA, 399 bp, synthetic construct
  source 1..399: mol_type = other DNA; note = Synthetic coding sequence
atgagagccagtccatgcatcagccaacccgccgcaagttggcatccgaggccgagtgcattgaggccgaccgccggctctggccccgatacccgtactcccggcacagtagaggatggatctgccccttgtccagcctttcgcagtccggccgtgagcccctgcggcgaggaaccttgctgctttcagatatctccagctgaagaaacactggagctcggaagactggtctcaccagggaactgcgacactctaagtccccgtgcagcaggattctacgcctgccacgtccgctctctgattccttgcagatctactaagggacgatggccccttaccgctagcgcagctgggctgtctcgccatgctcaatgcggacctagcctggggttggggtag

SEQ ID NO: 16064 - DNA, 375 bp, synthetic construct
  source 1..375: mol_type = other DNA; note = Synthetic coding sequence
atgcgggccagcccatgcatctcacagcccgccgcctcctggcaccctcggccaagcgccctcaggcctacagcaggttcaggtccagacacacgtacgcccgggactgtggaagatggctctgcaccctgtccagcatttcgtagccccgctgtgtctccgtgcggggaggagccttgttgcttccaaatttcaccagccgaggaaaccctggaactcggacggctggtgtctcccggaaattgcgataccctgtctcctcgggcagccggtttttacgcctgccacgtgagatctctcataccctgcaggtccaccaagggtcgctggcccctgacggctagcgcagccggactttcctctttcagcggctag

SEQ ID NO: 16065 - DNA, 1038 bp, synthetic construct
  source 1..1038: mol_type = other DNA; note = Synthetic coding sequence
atgttgcccaatacgggaagactagcgggttgcacagtctttattaccggagcttccagggggattggcaaggccatcgcactgaaagccgctaaagatggagctaacattgtgatcgctgccaaaactgcgcagccccaccctaaactgctgggcactatctacaccgccgctgaggagattgaagctgtgggcggtaaggcattaccgtgcatagtggacgtgagagacgaacaacaaatcagcgctgctgtggaaaaggccatcaagaagttcggcgcctacacaatagcgaagtacggcatgtcaatgtacgtcctgggaatggctgaggaatttaagggggagatagctgtcaatgccttatggcccaagacagctatacacacggcagcaatggacatgcttgggggacccggaatagaatcccaatgccggaaggtcgacatcatcgcagacgcggcttactccatcttccagaaaccaaagagctttaccggcaactttgtaatcgatgagaatatcctgaaagaggaggggattgagaacttcgatgtatatgccatcaagcccggacaccccctgcagccggatttttttctggatgaataccccgaggcagtctctaagaaggtcgaaagcactggagctgtgccagaatttaaggaggagaagctccagttgcagcctaagccaaggtcaggggccgtggaagagacttttcggatagtgaaagattctctatccgatgatgttgtcaaggccacccaggctatctacctgtttgagttatcgggggaggatgggggtacctggtttcttgacctgaaatcaaagggagggaatgtcgggtatggagagccctccgaccaagccgatgtcgtcatgtcaatgactaccgatgatttcgtgaagatgttctccggcaaactgaaaccaacgatggcattcatgagcggtaagttgaagataaagggcaatatggctctggctatcaaactcgagaagctaatgaatcaaatgaacgcgagactgtag

SEQ ID NO: 16066 - DNA, 1257 bp, synthetic construct
  source 1..1257: mol_type = other DNA; note = Synthetic coding sequence
atgttacccaatactggtaggcttgcaggatgtacagtattcatcacgggggcatccaggggaatcggcaaagcaattgcattgaaggctgcgaaagacggtgcgaacatcgttatcgctgccaaaacagctcaacctcacccaaaactcctgggcactatttataccgctgctgaagagatagaggctgtcggtggtaaagccctcccatgtattgtggatgtaagagacgagcagcaaatctcagccgctgtggagaaggccatcaagaaatttggcgggattgatatcctggtgaataatgcgtccgcaatcagtctcaccaacactctcgacacaccaactaagcgcttagacctgatgatgaacgtgaacacacggggtacttacctcgcctcaaaggcatgcatcccttatctcaagaaaagcaaagttgcccatatactgaatatcagcccaccactcaacttgaatcccgtctggttcaaacagcattgcgcttacaccatagcgaagtatggcatgtcaatgtatgtgctgggcatggccgaagaatttaaaggagagattgccgtgaatgctctgtggcccaagaccgccattcacactgcagctatggacatgctcggcggacctggcattgagtcacagtgtcgtaaggtcgatatcatcgcagatgcagcctactccatattccagaaacccaagagtttcacaggtaactttgtcatcgacgagaacattctgaaagaagaaggtatcgagaacttcgatgtatacgccattaagcccgggcaccctctgcagcccgatttttttctggatgagtaccccgaggccgtgtcaaaaaaagtcgagagcaccggagcagtcccagaatttaaagaggagaaactgcaattgcagcccaaacctcgcagtggagccgtcgaagaaacatttaggatcgtgaaggactctttgtcagatgatgtcgtaaaagctactcaggctatatacctgtttgagctgagtggggaggatggaggcacgtggttcctggacctgaagtctaagggagggaacgtgggctatggagagccatcagaccaggccgacgttgtcatgagcatgactacagatgacttcgttaagatgtttagcggaaagttaaagccaacaatggctttcatgtctggaaaattgaagatcaaaggcaatatggcactggcaataaagctggagaaattgatgaatcagatgaacgccagactttag

SEQ ID NO: 16067 - DNA, 1077 bp, synthetic construct
  source 1..1077: mol_type = other DNA; note = Synthetic coding sequence
atgcctggttgcgagttgccggtgggcacatgccctgatatgtgtccagcagcagagagagcccaaagggagagggaacatcgtctgcacagactggaagtggtccccggatgccggcaggacccccccagggccgacccgcagagggccgtgaaggagtattcaagacccgctgctggcaagccaagaccccctcccagccagctgcggccgccatcagtactgcttgcgacggtgcgctatctggcaggggaggtggctgagtccgctgacattgccagggccgaggtggctagttttgtggctgaccgtctgcgggcagtattgctcgacctggccttgcagggtgcaggggacgcagaggctgcagtagttctggaagctgctctcgccacgttgctgacagtggtcgccaggctggggcccgacgcagcaagaggcccggccgacccagtgttgctgcaagctcaggtccaggaggggttcggtagcctaagaaggtgctacgctcgaggggctggaccccacccacggcagcccgccttccaggggctgttcttgctatataacttggggtccgtggaagcgcttcatgaggttctccagctcccagccgctctccgagcctgcccccctctgcggaaggctctagccgtggacgctgctttccgtgaggggaacgcagctagactgtttcggttgctgcagactctgccctacctgcctagctgtgctgtccagtgtcacgtaggtcacgcacgaagagaagctctggcccgctttgctagggctttttctacacctaagggccagaccctgcctctcggattcatggtgaatcttctcgctctggacggactgagagaagccagagacctgtgccaagctcacgggctgcctctcgacggcgaggaacgagtggtgttcctaagggggcggtacgtggaagagggcctcccgccggcatctacttgcaaagtattagtggaatcgaagttgcgcggcaggaccctggaagaggttgtgatggctgaggaggaagatgaggggacagaccgacctggtagtccagcatag

SEQ ID NO: 16068 - DNA, 150 bp, synthetic construct
  source 1..150: mol_type = other DNA; note = Synthetic coding sequence
atgtcaagttgcgtgagttcacagcctagttctaatcgcgccgccccgcaagacgagctaggcggacggggttcctcatcaagcgaaagccagaagccctgtgaggccctgcgcgggttgtcatctctctccatccatctcggtatgtag

SEQ ID NO: 16069 - DNA, 2598 bp, synthetic construct
  source 1..2598: mol_type = other DNA; note = Synthetic coding sequence
atgccagctgtatctctcccacctaaagagaatgccctatttaagcgcatcctgcgctgttatgagcataagcaatatagaaatggtctgaaattttgcaagcaaatactttctaatcctaaattcgctgagcacggggagacattagctatgaaaggattgacactgaattgcctggggaagaaagaagaagcttatgaactcgtacgcagaggattgagaaatgatctcaaatcccatgtgtgttggcatgtctacggactcttacaaaggtctgacaagaagtacgatgaagctatcaaatgctataggaacgccctgaagtgggacaaggacaacctccagattctccgtgatctgtcactgttacagattcaaatgagggatcttgagggttatagggagacccgctaccaactcctacagctaaggcctgcacagcgggccagctggataggctatgctatcgcctatcacctactggaggattatgagatggccgccaagatcctggaggagttccgcaagactcagcagacttcacccgacaaagtcgattatgagtatagcgagctgctgctgtatcagaatcaggtgctcagggaggcagggctctacagggaagcccttgaacacttgtgtacttacgaaaagcagatatgcgacaagcttgctgtagaagagacaaagggagagctcctgttgcaactatgtcgccttgaggacgcagccgatgtgtatcgaggattgcaggagagaaaccctgaaaattgggcatactacaagggcctggaaaaagctttgaaacccgccaatatgctagagcggttgaagatatatgaggaggcctggactaagtatcccaggggtctggttcctcgccggctgcctctaaatttcctgtccggcgaaaaatttaaggaatgtttagataaatttttacggatgaatttcagcaaaggttgtccaccggtgttcaatactctgaggtcactgtacaaggataaggagaaagtagccatcattgaggagctggtggtcggttacgagacttccctgaaaagctgtagactctttaacccaaacgatgacggaaaggaggaacctcctactacactgctctgggtgcagtattatttagcacagcattacgacaagatagggcagccttccatagcgcttgaatacatcaacacagccatcgagagcacccctaccctgatcgagcttttccttgtgaaagccaaaatctataagcacgccggcaatataaaggaggcagcgaggtggatggatgaggcgcaggccttggatactgcggatcgctttattaatagcaaatgcgccaaatacatgctgaaggctaacttgattaaggaggccgaggagatgtgcagtaagtttacacgggaaggcacatcagctgtggagaacctaaatgaaatgcagtgcatgtggtttcagaccgagtgtgcccaggcttataaggctatgaacaaattcggcgaagcccttaaaaagtgccacgagatcgagagacacttcattgagataaccgatgatcagttcgatttccatacctattgtatgaggaagataaccctgcgcagttatgtggatttgctgaagctcgaggatgtgcttcgacagcatcctttctactttaaagcagcccgcatcgccattgaaatttatctcaaattgcatgacaacccgctcaccgacgagaataaggagcatgaagccgatactgctaatatgagcgataaagaattgaagaaactgagaaataagcaaagacgcgcccagaaaaaagcacagatcgaggaagagaaaaaaaatgctgaaaaggagaagcagcagaggaatcaaaaaaaaaagaaggacgatgacgatgaggagattggggggccgaaggaagaacttattcctgaaaagttggccaaggtcgagactccgctggaggaagcaataaagttcctcacccctctgaaaaaccttgtgaaaaataagattgagacccacctgtttgcattcgagatttacttccggaaggagaaattcctccttatgctgcagtcagtcaagagggcattcgcaatcgacagttcccatccttggttgcacgagtgcatgattcgccttttcaataccgtgtgcgaatctaaggacctgagcgatacagtgaggacagtcttgaagcaggagatgaaccggctctttggggcaacaaaccctaagaacttcaatgaaaccttcttgaaaagaaattcagactcacttcctcacaggttatccgctgcaaaaatggtgtactacctcgacccctccagtcagaagagagcgatagagctcgctacgactctagacgaaagcctcactaatcgcaatctccaaacttgtatggaagtactggaggctctttatgatggaagcttgggagactgtaaagaagcggccgaaatttaccgagctaattgccacaagttgtttccttatgcccttgccttcatgccacccggttacgaagaggatatgaaaattactgtgaatggcgactcctccgcagaggctgaggagcttgcaaatgagatatag

SEQ ID NO: 16070 - DNA, 1797 bp, synthetic construct
  source 1..1797: mol_type = other DNA; note = Synthetic coding sequence
atgggaggatgtttctctaaaccaaagcccgtcgagctcaaaatcgaggttgtcctcccagaaaaagagcggggaaaagaggaactgtcggcgtctggcaaaggtagccctagagcctaccagggcaacgggaccgcacgccatttccacaccgaggaacgactcagcactccccacccctacccttccccacaggactgcgtcgaagcggctgtgtgccacgtgaaggatcttgagaatggacagatgagagaagtggaacttggctggggtaaagtgctattggtaaaggataacggggaattccacgcacttggccacaaatgcccccattacggagcaccgctggttaagggggtgttgagtagggggcgagtgcgatgtccttggcacggcgcatgcttcaacatttctactggtgatctggaggattttcccggattggatagcctacacaaattccaggtgaaaatcgagaaagagaaggtctatgtccgtgcctcaaagcaggcgctgcagctgcagagaagaaccaaggtgatggctaagtgcattagcccttcagcaggctattcctcctcaactaatgtgctgattgtcggggcaggcgctgcaggattggtgtgtgccgaaacgctaagacaggaggggttcagtgatcgaatagtattatgcacactcgacagacatctcccttacgaccggcccaaacttagtaagtctctggacactcaaccagagcaacttgccctgagacccaaggagtttttcagagcctatggaatcgaggtcctcacagaggcacaagtcgtgaccgttgacgtaagaaccaaaaaggtggtgttcaaagatgggtttaagctggagtactcaaagctgctccttgcccctggatcttctccaaagactctgtcctgtaaaggtaaagaggtcgagaacgtgtttaccatcaggacgccggaagacgctaaccgggtagtaagactggcccggggcagaaatgttgtcgtggtcggagccggctttctcgggatggaagtagccgcgtacctcacagaaaaggcacacagcgtgtcagtggttgagctggaggagactcccttcagaaggttcctgggagagagagtggggcgcgcgctgatgaagatgttcgaaaacaatagggtgaaattttacatgcagaccgaggtttccgaacttagagggcaagaggggaagctcaaagaggtggttctaaaaagctctaaagtggttcgagccgacgtgtgcgtcgtgggtataggggccgtgccggccacaggattcctaaggcagtcgggaattggactggattcgcgagggttcattcctgtgaataagatgatgcagacaaatgtgccaggggtgttcgccgccggggatgccgtgaccttcccgctggcctggagaaacaacaggaaagttaacataccccactggcagatggctcacgcccagggacgcgttgctgcccagaacatgctggcacaggaggctgaaatgagcacagtgccctacctgtggacagcaatgttcggtaagagcctgaggtatgcaggctatggcgagggattcgatgacgtcatcattcagggtgacctagaagaactgaagttcgtggctttctataccaaaggagatgaagtcattgcggtggcaagcatgaactatgatcctatagtctccaaagtagcagaagtcttggcgtcgggcagggccatccggaaaagagaggtcgaaacaggcgatatgagctggctcaccggaaaaggctcctag

SEQ ID NO: 16071 - DNA, 1818 bp, synthetic construct
  source 1..1818: mol_type = other DNA; note = Synthetic coding sequence
atggggggctgcttttcaaaacccaagcccgttgagctcaaaatagaagttgtgctccctgaaaaagagagaggaaaggaagagttaagcgcctccggaaagggctccccacgggcataccaaggtaacgggacagcccgccactttcacactgaagaaagattatcgacacctcacccgtacccatcaccacaggactgcgttgaagctgccgtttgccatgtgaaggatcttgagaacgggcaaatgcgggaggtcgagctggggtggggaaaggtgcttctagtgaaggataatggcgaatttcatgctctcgggcataaatgcccacactatggcgccccgcttgtcaagggggtcctgagtcgcggtcgcgtgcgatgcccatggcatggagcctgcttcaacataagcacaggagacctggaggacttccccggtctcgattctctgcataaattccaggtgaaaattgaaaaggaaaaagtctacgtgcgtgctagcaaacaagctctgcagctgcagaggaggacaaaagtaatggccaagtgcatttcacctagcgccggctattcctcctccacaaatgtgctaattgtgggggccggtgctgccggcctcgtgtgcgccgagactcttcggcaagaaggcttctcagacagaatagtgctgtgcacgctcgatcggcacctaccctatgatcggccgaagctctctaaatctctggacacacagccagaacagctcgcactccgtcccaaagagtttttccgtgcttacgggatcgaggtactgacagaggcccaggtggtcacagtcgatgtgcggaccaagaaagtggtcttcaaagacgggtttaagctcgagtattctaaactgttgctcgctcccgggagctccccaaaaaccctgtcatgtaaagggaaggaagtagaaaatgtttttaccatcagaaccccggaggacgctaatcgtgttgtcagacttgcaagaggcaggaacgtcgtcgtcgtgggtgcggggtttctcgggatggaggtggcagcctacctcacggaaaaagctcacagtgtgtccgtggtggagttggaggagacccccttcaggagatttttgggcgaaagggtgggtagagctctgatgaagatgttcgagaataatcgcgtaaaattttatatgcagaccgaagtcagtgaattgagaggccaggaaggaaaattgaaggaagtcgtgctgaaatcttccaaagtggttagagctgacgtatgcgtggtgggcattggggccgttcccgcgaccggatttcttaggcaaagtgggatcggtctggactcccgcgggtttattccagtcaacaaaatgatgcagacaaacgtcccaggcgtctttgcagccggagatgcggtcacctttcccctagcatggcgaaacaaccggaaagtcaacataccacactggcagatggcccacgcccagggccgcgtcgcggcccagaatatgctggctcaggaggcagaaatgtctaccgtgccctatctctggactgccatgttcggcaagtctcttagatatgccggctacggggaggggtttgacgatgtgatcatacagggtgatctggaggaactgaagtttgttgctttctataccaaaggagacgaggtgattgcagtcgctagcatgaactacgaccccattgtgagcaaggtggcagaggtcctggcctcagggcgtgccatcaggaaaagggaggtggagttattcgttcttcattcaaaaactggagacatgtcttggctgactgggaagggcagttag

SEQ ID NO: 16072 - DNA, 1374 bp, synthetic construct
  source 1..1374: mol_type = other DNA; note = Synthetic coding sequence
atgaaccagccctgcaactcgatggaaccgcgtgtgatggacgatgacatgctcaaacttgcagtgggggatcaaggtcctcaggaggaagctggtcagctggctaagcaggagggcatactttttaaagatgtcctttcactgcagctcgactttcggaacatccttcgcatagacaatctttggcagttcgagaaccttcggaagctgcagctggataacaatatcatagaaaaaattgagggattggagaaccttgcacacctggtgtggctagatctaagcttcaacaacatagaaacgatagagggcctcgatactcttgtcaatttggaagatctgtctctctttaacaaccgaatctctaagatcgatagtctcgacgctctagtgaaattgcaagtactcagtttggggaataatcgcatcgacaacatgatgaacattatttatctgcgaaggttcaagtgtctgaggactttatctttgagccgcaaccctatttcagaggctgaggattacaagatgtttatttgcgcttatctgcccgaccttatgtatctcgattatagaagaatcgatgatcataccaaaaaactggctgaagccaagcatcagtactctatcgatgaactcaagcaccaggaaaacctgatgcaggcacagttggaagatgagcaagctcagagagaagagctggaaaagcataagaccgcctttgtagaacacctgaacgggagcttcctcttcgacagcatgtacgccgaggactctgagggaaacaacttatcttacctgcctggagtgggggagctcctagagacatataaggacaaattcgtgatcatctgtgtaaacatattcgagtatggactgaagcaacaagagaagaggaagactgagctggacaccttcagcgaatgcgtacgggaagctattcaggagaatcaggagcagggcaagcgaaaaattgccaaatttgaggagaagcacctgtcttctctgagtgcgatccgtgaagagctggagctgccaaacatcgaaaagatgatccttgagtgctcagccgatatttcagaactgtttgatgctctcatgacccttgaaatgcagctcgtggagcagctggaggaaacgatcaatatgtttgagagaaatatcgtcgacatggtaggccttttcatagagaatgtgcagagcctcatggcccagtgccgcgaccttgaaaatcaccaccatgaaaagttactggagatatccatcagtaccctggaaaagatcgtggagggcgacctggatgaggacctgcccaatgacctacgggcaggcagattccagaagtttaattatgtcgaggcatctggcactttttag

SEQ ID NO: 16073 - DNA, 1374 bp, synthetic construct
  source 1..1374: mol_type = other DNA; note = Synthetic coding sequence
atgaatcaaccctgcaacagtatggaaccgcgagttatggatgatgacatgctaaagctcgctgttggagatcagggtccccaggaggaggccggccagctggcaaagcaggaagggattctgtttaaagacgttctgtctctccagttggacttccggaacattttgagaatcgacaatctgtggcagttcgaaaacctccgaaagttgcaactggacaataacataatcgaaaagatagaaggccttgaaaatctggcccacctggtctggctggacttaagtttcaacaacatcgagactattgaaggcctcgacaccctggtgaacctggaggatcttagtttatttaacaatcggatctccaagattgatagtctggatgctctagtgaaattacaagtgctgtcactgggcaataaccgtattgataacatgatgaacattatctatctccgacgattcaagtgcctgaggactttaagcctaagccgtaatcccatcagcgaggccgaagactacaaaatgtttatatgcgcctacctgccagatctcatgtatttggattatagacgaatcgatgaccacacgaagaagttggccgaggccaaacaccaatactctattgatgaactgaaacaccaagaaaacctcatgcaggcacagctggaagatgagcaagctcaacgggaggaactggaaaaacacaagacagcttttgttgaacatctgaatgggtctttcttgttcgacagcatgtacgctgaggattcagaagggaacaacctgagctatctgcccggcgtcggcgagctactcgagacgtacaaagacaaatttgtcattatctgtgttaatatatttgagtacggcctcaaacaacaggagaaacggaaaactgaactggacaccttcagcgaatgcgtgagagaggccattcaggagaatcaggagcaaggcaagaggaaaatcgcaaaattcgaagagaagcacctctctagcctgagcgcgatcagggaggaactagagcttcctaacattgagaagatgattttggaatgctcagctgacatctctgagctgtttgatgcgctgatgacccttgagatgcagctcgtggagcagctggaagaaacaattaacatgttcgaaaggaatatagtggatatggttgggctatttatcgagaatgttcagtccttaatggctcaatgtagggatctggaaaaccatcaccacgagaagcttcttgagattagcatctcaactctagaaaagatcgttgagggggatcttgacgaagacttaccaaatgatctgcgggcgggacgcttccaaaagtttaactatgtggaagcaagcgggacgttctag

SEQ ID NO: 16074 - DNA, 1572 bp, synthetic construct
  source 1..1572: mol_type = other DNA; note = Synthetic coding sequence
atgaaccaaccctgtaactctatggagcctagagttatggacgatgacatgctgaagcttgccgtgggggatcaggggccccaggaggaagctggacagttggcgaagcaagagggtatactgtttaaagatgtcctgtcgttacagcttgactttagaaatattctgcgcatagataatctctggcagttcgagaatctaagaaagctccagttagacaacaacatcatcgaaaagatcgaaggcctagaaaacctcgctcatctggtgtggcttgacctatccttcaataatatcgagacaattgagggactagacaccctcgtaaacctcgaagacctgtcactatttaacaatagaatcagtaagatcgatagcttggatgcactcgtgaaactgcaagtcctctccctaggaaataatcgcatcgataatatgatgaacatcatttatctgaggcgtttcaaatgtctgcgaacactgtcactgtcaaggaatcccatctccgaggcagaggactataagatgtttatttgtgcgtacctgcccgatttgatgtatctcgattaccgcaggatcgatgatcacacaaagaaattggcagaggccaagcaccaatactcaatcgatgaactcaaacatcaggaaaacttgatgcaggcacaactcgaggatgagcaggctcagcgcgaggagcttgaaaagcacaagaccgcctttgtggaacatttaaacgggagctttttgtttgactcaatgtatgctgaggacagcgaaggtaataatcttagctaccttcccggagtgggagaactgctggaaacgtataaggataaatttgtgatcatttgtgttaatattttcgagtacggattaaagcagcaggagaagcggaaaacagaactggatacatttagtgaatgcgttcgcgaggctatacaagagaatcaggaacagggaaagcgaaagatagccaagttcgaggaaaaacatctgagctctctgtcagctattcgggaggaactggaattaccaaacattgagaaaatgatcttggagtgtagtgcagacatcagtgaactcttcgacgctctgatgacattggagatgcagctcgtggagcaactcgaagaaactattaatatgtttgaaagaaacatagtggacatggttggcctgtttatcgagaatgtccaatctcttatggctcaatgcagagacctggagaaccaccatcacgagaagctcctggagatatccatctccaccctggaaaaaatcgttgagggcgatctcgacgaagatttgcccaatgaccttagggcgttgtttgtggacaaagacactattgttaatgccgtaggggcttctcacgatatccacctcctcaagatagataaccgcgaagatgagctggtaactcgcatcaatagttggtgcactcgattgatcgaccgcatacataaggacgagatcatgagaaatagaaaacgagttaaagagattaaccaatacattgatcatatgcagagcgaactggataatctcgagtgcggggacatcctggattag

SEQ ID NO: 16075 - DNA, 1572 bp, synthetic construct
  source 1..1572: mol_type = other DNA; note = Synthetic coding sequence
atgaaccagccctgcaatagtatggagcctcgcgtaatggatgacgacatgctcaagctcgcggttggtgatcagggcccacaggaggaggcaggccaactcgccaagcaggaaggaatcctgttcaaggacgttctatctctgcagttggattttcgaaacatcctgagaattgataacctgtggcagtttgaaaacttacgaaagttacagctggacaataatatcatcgagaagatcgagggcctagaaaatcttgcacacctggtctggctcgacctgtctttcaataatatagaaaccatagaaggactggacacattggtaaatctggaagacctgtccctgtttaataatcggattagtaagatcgatagcctggatgccctcgtgaagttgcaggtactgtcactgggaaacaacaggatcgacaatatgatgaacataatctatctaaggagatttaagtgcctcaggaccctctctctctctaggaatcctatatctgaggcagaagactataagatgttcatctgcgcttacttgcctgatctgatgtatctggactatcgcaggatcgatgatcacaccaaaaaacttgcagaagccaaacaccaatatagcatagatgagctcaagcaccaggaaaacctgatgcaggcccaactggaggacgaacaagcccaacgggaggaactggagaaacacaagacggctttcgttgagcacctgaatggcagcttcttatttgatagtatgtacgcagaggatagtgagggtaacaacttgtcctatcttccgggggttggcgagctgctggagacctataaggataagttcgtgataatttgcgtgaacatcttcgagtacggcctgaaacaacaagagaaacgaaaaaccgaactcgatacctttagtgagtgcgtccgggaagccattcaggagaaccaggagcagggcaaacggaaaatcgcaaagtttgaggaaaaacacctgagctcattgtcagctatcagggaggaactggagctcccaaacattgagaagatgatcctggagtgttccgcggatatttcagaactgtttgacgctctgatgactttggaaatgcagctggtggaacaacttgaagagacaataaatatgtttgagcgaaatatcgtggacatggtgggtcttttcatcgagaacgtccagtccctgatggctcaatgccgcgatctggaaaaccatcaccatgagaagctattggaaatatctatcagcacgctcgagaagatcgtcgagggagacctagacgaggatcttccgaacgatttacgtgccctttttgttgataaagacaccatcgttaacgctgtgggcgcaagccacgacatccacctgctgaaaatcgacaatagggaggatgagctggtcacaagaattaattcatggtgtactcgcctgatcgatcgtattcacaaagatgaaataatgagaaacaggaaacgcgtgaaagaaatcaaccaatacatagaccacatgcagtccgaactcgacaatctggagtgcggagacatattggactag

SEQ ID NO: 16076 - DNA, 1842 bp, synthetic construct
  source 1..1842: mol_type = other DNA; note = Synthetic coding sequence
atggcgaccatccccgactggaagcttcagcttttggcccggaggaggcaggaggaagctagcgtccgagggagagagaaagcagagcgggaaagattgagtcagatgcctgcttggaagagagggctactggagcgtcggcgtgctaagctaggtctgagcccgggtgagccctctccagtcctcggcacggttgaggccggcccgcctgatccagacgagtctgccgtactgctcgaggccatcgggccagtgcatcaaaacaggtttattagacaggagcgccaacaacagcagcaacagcagcaacggtccgaggagctgcttgccgaacggaagccgggtcctctggaggcaagagaacgacggccaagtccgggcgaaatgcgagatcagtcccccaagggacgagaatctcgggaagaacgcttgtcccctagagaaaccagagaacgccggctagggattggcggcgctcaggaacttagtctgcgtcctctggaagcaagagactggcggcaaagccctggcgaagtgggcgacagaagctccaggctgagtgaggcgtggaagtggaggttatctcctggcgagacccctgagagaagcctccggttggcggaatccagggaacaatctcccagacgcaaagaggtagaatccaggttgagccccggtgagagtgcctatcagaaactcgggctgacagaagcccacaagtggcgcccagactcccgggagagccaagaacagagcctggtgcagctggaggcaacggagtggcgccttcgttcaggagaggaacggcaggattattcggaagaatgtggaaggaaggaggagtggccagtgcccggagtggcacctaaagaaactgccgaactgagtgagaccctcactcgggaggcccagggaaatagcagcgcaggggtcgaagcggcggagcagcgtccagtagaggacggcgagcgaggaatgaaacctacagaggggtggaagtggaccctgaacagcggtaaggccagagagtggactcctagggacatcgaagcccagacgcagaaacccgaacccccagagagcgcggagaagttgctggaatcacccggcgttgaggctggagagggggaggccgagaaggaggaagcaggagcccagggcagacctctgcgggcgctccaaaactgttgctccgtgccgtctccccttcctcctgaagacgctggaactgggggcctaagacaacaggaggaagaagccgtggaacttcagccaccaccaccagcgccactgtcacctcccccccctgccccaactgcccctcagccaccaggagatcccctgatgagtcgcctgttctacggcgttaaagccggccccggcgtcggggctcccaggcgctctggacacacatttaccgtcaaccctaggcgctccgtgccaccagcgacaccagccacacccaccagccccgccaccgttgacgcagcggttcctggggctgggaaaaagcggtatcccactgctgaagagatactcgtacttggtggttatctccgcttgtcccgatcctgtcttgcgaagggctcacccgagcgccatcataagcagctgaagatcagcttttcagagaccgctttggaaaccacttatcaatatccaagtgagagcagcgtcttggaagagttaggccccgagcccgaagtcccttcagccccaaacccccctgcagctcaacccgatgacgaggaagacgaggaagaactgctgcttctccagccagagttgcagggtgggctgaggacaaaggctttgattgtggatgagtcctgcagaagatag

SEQ ID NO: 16077 - DNA, 390 bp, synthetic construct
  source 1..390: mol_type = other DNA; note = Synthetic coding sequence
atggcggagctcattcaaaaaaaactccagggcgaggtcgaaaaataccaacagttgcagaaggatctgtccaagagtatgagtgggaggcagaagctggaagcccagttaactgagaacaacattgtgaaggaggagctcgcattgcttgacgggtcaaacgtcgtcttcaaattgctgggccctgtgcttgtgaaacaagaactcggtgaggctagggctactgtgggtaagcgccttgactacattacggcggagatcaaacggtacgagtcccaacttcgggacttagaacgccagtccgagcagcagcgcgagaccctggcccaactccagcaggagtttcagagagctcaagctgcaaaggcaggcgcgccaggaaaagcctag

SEQ ID NO: 16078 - DNA, 390 bp, synthetic construct
  source 1..390: mol_type = other DNA; note = Synthetic coding sequence
atggcggagctgatacagaagaagctccaaggggaggtggagaagtaccagcagttacaaaaggacttgtccaagtccatgtcgggacgccagaagttagaggcccaactgaccgagaataatatagtgaaggaggaattggctctcctggacgggtccaatgtggttttcaagctcttggggcccgttctggtgaaacaggaattgggcgaggcccgcgccacagtggggaaacgcctggactatattaccgcagagataaaacgctacgagtcccagctacgagacctcgagcgccagagcgagcagcaacgcgaaaccctcgcccagttgcagcaagagtttcagagggcccaagcagccaaggccggggctccgggcaaggcgtag

SEQ ID NO: 16079 - DNA, 4128 bp, synthetic construct
  source 1..4128: mol_type = other DNA; note = Synthetic coding sequence
atggtgccaggagaggaaaatcaactggtgcccaaggaagacgtcttctggcgctgcaggcagaacatatttgatgaaatgaaaaagaaattcctccagatcgagaacgccgccgaggagccacgggtactgtgcatcatacaggacaccactaactccaaaactgtcaatgagcgaatcactctgaatctgcccgcatcaactccggttaggaaactgtttgaagatgttgccaacaaagtaggctacatcaatgggacttttgacttagtgtggggaaacggcatcaatactgccgatatggctccacttgatcacacttctgacaaaagtctcctggacgccaatttcgaacctggaaagaagaacttcttacacctaacagataaagacggcgagcagccacagattttgttggaggactccagtgccggcgaagattctgtccacgatagatttattggaccccttcccagggagggcagtggcgggagcactagcgactatgtttcgcagagctattcatattccagcattctcaacaagtccgaaaccggatatgtcggtttggtaaaccaggccatgacttgctacctgaactctcttctgcagactctgttcatgacccctgagtttcgcaacgcgctttacaaatgggagttcgaggagtccgaggaggacccagtcaccagcataccatatcagttgcagcggctgtttgtgctactacagacatctaagaagagagccattgaaactaccgatgtaacacgatcgtttggttgggactcatcagaagcgtggcagcagcacgacgtgcaggagctctgcagggttatgttcgacgcccttgagcagaagtggaaacagactgagcaggccgacctgatcaatgaactctaccagggcaaactgaaagattacgtgcgatgtttagagtgtggttacgagggttggcgtattgacacgtaccttgatatccccctcgtgattcggccgtacggctcttcccaagctttcgcatccgttgaagaagccctgcacgcgttcatacaacccgagatcctcgacggcccgaaccagtatttttgtgagcggtgcaagaagaaatgcgacgctcgaaaaggtttgcgcttcttgcatttcccctacttattgactctgcagctgaaacgcttcgactttgactataccaccatgcatagaataaaactcaacgacaggatgactttccccgaagaactcgacatgtccacattcatcgatgtcgaagacgagaaatccccacaaaccgagtcgtgtaccgatagcggagcagagaatgaaggtagctgccactcagatcaaatgagcaatgatttttccaatgatgacggagtcgacgagggtatatgtctggagactaacagtggcacggagaaaatcagtaaaagcgggctcgagaaaaacagcctgatctatgaactatttagcgtgatggtgcattccgggagcgctgcgggaggccattattacgcctgcatcaagagtttcagcgacgagcagtggtatagtttcaatgatcaacatgtttctcggatcacccaggaagacatcaagaagacacatgggggaagttctggctcacgcgggtactattctagtgcttttgccagtagtactaatgcctatatgctcatctatcggctgaaagacccagcccgtaacgccaaatttcttgaggtagacgagtacccggaacacattaagaacctcgtgcagaaggagagggaacttgaggagcaggagaagcgccagagagagatcgaacgcaacacatgtaagatcaagctgttttgtttgcatccaacaaagcaggtgatgatggagaacaaactcgaagtccataaggataagacactgaaggaggctgtggagatggcctataagatgatggacctcgaggaggtcatccctcttgattgttgtcgcttagtgaaatacgatgagttccacgactatctggagcggagttacgagggtgaggaagacacacctatgggtctccttctgggcggagtgaagtccacatatatgttcgacctgttgttggagacccgaaagccagatcaggttttccagtcgtataagcccggcgaagtcatggtgaaggtccacgtggttgatttgaaagccgaatccgttgcagccccaatcacagtccgtgcgtatctgaaccaaactgtgacagagttcaagcagctcatctccaaagcaatccacttacctgccgaaacaatgcggattgtgcttgagagatgctacaatgatttacgactcctctccgtttcctcaaagactctcaaggctgaggggttttttcgaagcaataaagtctttgtggagtcctcggagactttggactaccagatggcttttgccgatagccacttatggaaactcttggatagacacgctaacactattcgcttattcgtgctgctgcctgaacaatcccccgtgagctactctaagcgcacagcttaccagaaagcgggaggggacagcggaaacgttgatgacgattgtgagagagtcaaagggccagtgggaagcctgaagtcagtggaagctattctggaagagtcaacggagaaactgaagtctctgagcctgcaacagcagcaggacggggacaacggcgacagcagtaagagtacggagacttcagatttcgagaacatagagtcaccgctgaatgaaagggacagctcggcatcagttgacaacagggagttggagcagcatatccagactagtgatccagagaacttccagtccgaggaaaggagcgattccgacgtgaacaatgatagatccacctcctcagtcgactctgatattctgagttcttctcactcatccgacacattatgtaacgccgacaacgctcagatcccactcgcgaatggcctcgattctcattcaatcacaagttcccgcaggaccaaggccaacgagggcaagaaagaaacgtgggacactgcagaagaggattcaggcacggattccgaatatgatgaatcggggaaatctagaggcgagatgcagtacatgtacttcaaagcagaaccctatgccgcagatgaaggaagtggcgaggggcacaagtggctcatggtccacgtggacaagagaatcactttggccgcttttaaacagcacctcgagccctttgtgggtgttctgtcaagccattttaaagtgttcagggtgtacgcctcaaaccaggagttcgagtcagtgcgactgaacgagacacttagttcgttctctgatgacaataagataactattaggctggggagggctctaaaaaagggcgaataccgggttaaggtgtatcagttactggtcaatgaacaagaaccatgtaagttcctgctggacgcggtgtttgccaagggaatgaccgtccgacagagtaaggaggaattgatcccccagctccgagagcagtgcgggttggagctgagcatagacagattcagacttcgcaagaaaacctggaagaacccggggaccgtgttcctggactaccacatctacgaggaagacatcaatatttcatcaaattgggaggtgttccttgaggtactcgatggggttgagaaaatgaagtcaatgagtcaactggccgtgctgagtcgccggtggaagccgtctgagatgaagctcgatccattccaggaagtcgtgctagaatcgtcaagtgtcgacgaattgcgagaaaaattgagcgagattagcggcatccctctggacgacatcgagttcgctaaaggtagaggaacgtttccatgcgacatctccgtgttagacatacaccaggacctcgactggaatcctaaggtgtcaacactgaacgtctggcctttatacatctgcgacgacggagccgtcatcttttaccgggataagaccgaagaactcatggagctgacagatgagcagagaaacgagctcatgaaaaaggaatcttctcgcctgcaaaaaacagggcatcgcgttacttactcccccaggaaagagaaggccctcaaaatctacctcgatggggctcctaataaggatcttacccaggattag

SEQ ID NO: 16080 - DNA, 600 bp, synthetic construct
  source 1..600: mol_type = other DNA; note = Synthetic coding sequence
atgaggactgcggaccgagaagctcggcccggactgccctccctgttgctacttctgttggccggggccggcctctccgccgcctcccccccagcggccccaaggttcaacgtgtcactggactccgtgcccgaactgcgctggctgcccgtcctgagacactacgacctggacttggttagagccgcaatggcccaggtgatcggggatcgtgtccccaaatgggtgcacgtactcattggcaaggtggtcctggagctcgaaagatttctgcctcagccattcacgggagagattcgcgggatgtgtgacttcatgaatttgtccctagcagactgcttgctcgttaatctcgcctacgagtcgtcagtgttctgtacatcgatagtagctcaggacagcagaggacatatctatcatggcaggaacctggattatcccttcggaaacgtactacgcaagctcaccgtcgatgtccagtttctgaagaatggacaaatagctttcacgggcacaacatttatcggctatgtggggctgtggacagggcagtctcctcataagtttacagtaagcggcgatgagcgagacccacattag

SEQ ID NO: 16081 - DNA, 972 bp, synthetic construct
  source 1..972: mol_type = other DNA; note = Synthetic coding sequence
atgcgtacagccgatagggaagctagaccaggacttccttccctgctgcttctcctgctggctggggctggactatccgccgcatcacccccggccgcccccaggtttaatgtgagtctcgacagcgtccctgagttaaggtggctgcccgtgctccgacactacgacctcgacctggttcgagctgcaatggcacaagtaatcggcgacagggttcccaagtgggtacatgtgctgattgggaaagtggtgctggagctcgaaaggttcttaccccagccttttactggggaaattcgtggtatgtgcgatttcatgaacctgtcactggccgattgcttactggtcaacctcgcttatgaatccagcgtgttttgtacatcaatcgttgcccaggattccagaggacatatataccatggtcggaacctcgactatccatttgggaacgtcctccgtaaactgactgtggacgtgcaattcctcaagaacggtcaaatcgcattcaccggaactacattcatagggtacgtcggtttatggacagggcaaagcccacacaaatttacagtgtccggggatgaaagagacaaagggtggtggtgggagaacgccatcgcggcgctctttaggaggcatattccggtgagctggctcataagagccaccctcagtgagtctgagaacttcgaagctgcagtgggtaagcttgctaagacgccacttattgctgacgtgtattacatcgtcggagggacctcccccagagagggcgtggtcatcacccggaaccgagacggccccgcagacatttggcctctcgatccccttaatggagcctggtttagggtagaaactaactacgaccactggaaaccagccccaaaagaagatgataggcgcacatcagctattaaggctctgaacgctacgggacaagctaatttgagtttggaagccctcttccagtag

SEQ ID NO: 16082 - DNA, 4539 bp, synthetic construct
  source 1..4539: mol_type = other DNA; note = Synthetic coding sequence
atggccgctgccgctggaaaccgcgcctcatcctcaggatttcccggtgctcgggcaacaagccccgaggctgggggtggcgggggcgcactcaaagcatcgtccgcccccgctgccgcggctgggctcttacgggaagctggctcaggcggaagagaacgcgcggattggagacgcaggcagcttcggaaggtcaggagcgtcgagctggatcagctcccagaacaacctctgtttctggctgcatccccaccagcatcaagcacctctccctctccggagcctgcagacgctgccggctccggtacaggtttccagccagtggctgtgccacctccacacggggctgcatctcgcggtggggcccatttgaccgagtcagtggcagcccctgactcaggcgcctcttcacccgcggccgctgaacccggggagaaacgtgcccccgcagccgagccatccccggccgcagcccccgccgggcgcgagatggaaaacaaggagacacttaagggcctccataaaatggacgatagaccggaagagagaatgatccgggagaaattaaaagctacctgcatgcctgcctggaaacatgaatggttggagaggagaaatcgccgcgggccagttgtggtgaagccaatacctgttaagggggatgggtctgagatgaatcacttggctgcagagagccctggtgaagtccaagcttccgccgctagccccgcctctaagggccgacgaagccccagtccgggaaatagccccagcggtaggaccgtcaagtccgaaagtcctggggttcggcgcaagagggtgtcacccgtccccttccaatccggacgcattacgccccctaggagagccccatcccccgatggcttcagcccatattccccagaggagaccaacaggcgcgttaacaaggtgatgcgggcccggctgtatttgctgcagcagatcggcccaaacagtttccttataggcggggacagtcctgacaataagtatagagtgtttatcggtccgcaaaattgttcatgcgcgcgcggcacattttgcattcatctgctgttcgtcatgctgcgggtcttccagctggaaccatctgatccaatgctgtggcggaaaaccctgaaaaatttcgaggtggagtctctctttcagaaataccattcaaggcgctcttcaaggatcaaggccccctctcgtaacaccatccagaaattcgtctcccggatgtcgaactctcatacactttcgagcagttctacctccacatcctcatcagagaactcaattaaggacgaggaggagcaaatgtgtccaatttgcctgctcggaatgctggatgaggaatccctgacagtttgcgaggatgggtgtaggaacaaattgcatcaccactgcatgtctatttgggctgaggaatgtcggagaaaccgcgaaccactgatttgtcctctgtgcagatccaaatggcggtcccatgacttttattcacatgagctgtcctctcccgtggactcccccagttcactacgcgctgcgcagcagcaaactgttcaacaacagcctctggccggcagccgcagaaaccaggaatccaatttcaatctgactcattacgggacacaacagattcctccagcttataaggacttagccgagccttggatccaggttttcggcatggaattggttggctgcctgttttctcggaattggaacgttcgcgaaatggccctcaggcgcctctcccatgatgtgagcggggcacttctgttggcgaatggtgagtccaccggaaacagcggaggtagctctggctcctctccatctggtggtgccacatccgggagcagtcagaccagcatcagtggtgatgtggtcgaggcatgctgctcggtgctgtcaatggtgtgtgccgatccagtttataaagtttatgtggccgcattaaaaaccctgcgcgctatgctagtttatactccttgtcatagtttggctgaacggattaaacttcagcggcttttacaaccggtggtggatactatcctggtgaagtgcgcagatgctaattctaggacctcccaattgagcatttcaacgctcctggagctgtgcaaaggacaggctggcgagctagccgttgggagagagattctgaaggctggtagcataggaattggaggagtggattacgtgttaaattgcatcctgggtaaccagactgagagtaacaactggcaggaattgctcggccgtctgtgtctgattgatcggctgctgctggagtttcccgccgagttctacccccacatagtaagcactgacgtgagccaagccgagccggtggagattcggtataagaaactactcagtctgctgacattcgccttgcagtctatcgacaattcacattcaatggtggggaaactgagcaggcgaatatacctcagctcagcccggatggtcaccaccgtaccccacgtattctccaagttgctggagatgctgtccgtgtcgtctagcacacatttcacacggatgagacgtagactgatggccatcgcggatgaagtggagatcgccgaggccatccagttgggtgttgaagacaccttggatggccagcaggacagctttctccaggcttctgttcccaataactacttagagacgactgagaattcctcacccgaatgcaccgtccacctcgaaaagactggcaagggactttgcgcaacgaaactaagcgctagcagcgaagacatcagtgagcggctggcaagtatctcggtcggtccaagtagtagtaccacgactacaaccactactactgagcagcctaaacctatggtacaaactaaagggagaccccacagtcagtgccttaactctagcccactgagccaccacagccagctgatgtttcccgcattgtctacaccgtctagtagcacaccatcagtgccggccggcacggccacagatgtatctaaacaccggctccaaggctttatcccctgccgtatccccagcgcctctccacagacacagcgcaagttctccttacagttccaccgcaactgtcctgagaataaggatagcgacaagctcagcccagtattcacccaaagtaggcccctgccatcaagcaacatccaccgaccgaaaccctcaaggcccacacctggtaatactagcaagcagggagatccctcaaagaatagtatgacgctggatctgaacagttcatcaaaatgcgacgatagctttggctgctcaagcaactccagcaacgccgtaataccctcagacgagaccgtcttcacaccggtggaagagaagtgccgactggatgttaataccgagctgaactctagcattgaagatctattggaagcaagcatgccctcgagcgacaccacagtaaccttcaagagcgaggtggcagtactcagccctgaaaaagcagaaaacgatgacacctacaaggacgacgtgaaccacaaccagaaatgcaaggagaagatggaagccgaagaagaagaggcccttgcaatcgccatggcaatgtcagccagtcaagacgcactgcccatagtgccccagctccaggtggagaatggtgaggacattatcatcattcaacaagatactcctgaaaccctccccggccacacaaaggctaaacagccctatagggaggacaccgaatggcttaaggggcagcaaattgggctgggcgcctttagttcatgttatcaggcccaggacgtgggcacagggactctcatggcagttaaacaggttacttacgtgagaaatacatcatcagaacaggaagaggtggtggaagccctgcgggaagaaattcgtatgatgagccatctgaaccatccaaacattatccgaatgctaggagcgacttgtgaaaagagtaattacaatctgttcatcgagtggatggccggcggtagcgtggcacatctcctgtcgaaatacggagcattcaaggaatccgtagtgatcaattatactgagcaactcctgcgggggctatcgtatttgcacgagaaccagataattcatagggacgtcaagggggcaaacctgttgatcgattctactggtcaacgcctccggatagccgactttggggccgctgctcgtctggctagcaagggaactggcgctggcgagtttcagggccagctgctaggaactatagcctttatggcccccgaggttctcagaggacagcaatatgggaggagctgcgacgtgtggagcgtggggtgtgccattatcgagatggcctgtgccaagccgccttggaatgcggaaaagcactccaaccacctggccctgatatttaaaatcgctagcgcgacaaccgccccaagtattccaagccacctttccccaggtctccgtgacgtggctctgcgatgcctcgagctgcaacctcaggaccgacccccgtctagggagcttcttaaacatcctgtgtttcgaacaacgtggtag

SEQ ID NO: 16083 - DNA, 2274 bp, synthetic construct
  source 1..2274: mol_type = other DNA; note = Synthetic coding sequence
gcagacgggggggactcacaagccttccggtgtacgagctgtggccatgcgggaacgacacctgctccacgcgaagccctcagtccggccgatgcccacgtgggaagaggattcgccgaaagagagccaatacccgcacaagggctgttagtcctggctgtgctgtcggacggcgccggcgatcacatccggcagcgcctgttaccccccctgctccagatcgtgtgtaaaggattagaagacccgtcacaggtcgttcgtaatgctgcgctcttcgctttagggcagttcagcgagaatctccagccacacatctcatcttattctagagaggtgatgccgctgctgctggcatacctcaaatctgtccctctgggacacacacaccacctagcgaaagcttgctacgccttggagaattttgtagagaacctgggtccaaaagtacagccctacctgcctgaattgatggaatgtatgttacaactgctgcgaaacccgagtagtccccgggccaaggagctcgctgtgtctgctttaggtgccatcgccaccgccgcccaggcatccctgttaccttactttcccgccatcatggaacatctgagggagtttctcctgacaggtcgcgaggacctgcagccagtgcaaatccaaagcctggaaacattaggggtgctcgcgcgcgctgttggcgaaccgatgcgccccctggccgaggagtgctgccagctaggtcttggactgtgtgaccaggtggatgatcctgatctgagacgatgtacttactctctgtttgctgccctgtccggcctgatgggggaaggactcgcaccacacttagaacagatcactaccctgatgctgctctcactgcgctctacagaggggatcgttccgcagtacgatggctcttcttccttcttgctgttcgacgatgaatcagatggagaggaagaagaagagctcatggacgaggatgttgaggaagaagacgattccgagatctctgggtattctgtagaaaatgccttcttcgacgaaaaggaggatacgtgcgcagccgtgggtgagatctcggtcaacacatccgtggcctttctgccttatatggagagtgtgtttgaggaggtctttaaattgctcgagtgtccccacctgaatgtgcgcaaagctgctcatgaggcactcggccagttctgttgtgccctacacaaagcttgtcaatcttgccctagcgagccgaatacagctgctctacaggccgccctggctagggtggtgcctagttatatgcaagccgtgaaccgggaacgagagcgccaagtggtcatggccgtgctcgaagccttgacaggtgtgcttagatcctgcggcacgttaacgctgaagcctcctggacggctcgctgagctctgcggggtcttgaaggctgttttgcagcggaagaccgcatgccaggacacagatgaggaagaggaggaggaggacgacgaccaggctgagtacgacgccatgctgttggagcatgccggtgaggctattcccgctctggctgcggccgctggcggcgatagctttgctcccttcttcgccggatttcttcctctcctggtctgcaagacgaagcaggggtgtaccgtggctgaaaaatcctttgccgtgggcaccctggctgaaaccatccagggtctgggagctgctagcgcccagttcgtatcaaggctgctgccagtcttgctgtctacagcccaggaggctgatccggaggtgagaagcaatgctattttcggtatgggagtcctggctgagcatggaggtcatccagctcaggagcacttccccaagctgcttggactgctcttccctttgctggcacgcgagcgccacgatcgggttcgggacaatatctgcggggccctggctcggctacttatggcttctcctactcgcaaacctgaaccccaggtactagccgccttgctgcacgccctcccgctgaaggaggacctagaggaatgggttaccataggccgtcttttctccttcttgtaccagtcttcccctgatcaagtcattgacgtagccccagagttgctcaggatttgctctctcattctcgccgacaataaaatccccccagatacgaaagccgccctgttgttgctcttaacctttttggcaaaacagcataccgactccttccaggccgctctgggcagtcttccagtcgataaagctcaggagctacaggcggttctggggctttcctag

SEQ ID NO: 16084 - DNA, 1812 bp, synthetic construct
  source 1..1812: mol_type = other DNA; note = Synthetic coding sequence
atgggggtcattcctgaaggccctctatgggtgagcggcagcgatgataatctttccggtacgtctggcatggaggttgacgacagagtgagtgccttggagcagcggctccagctgcaggaggacgaattggctgttctgaaggccgctcttgccgatgccctgcggagactgagagcttgcgaagaacagggagccgcgctgagggccagaggtactccaaaaggccgcgcaccaccacggttagggactactgcttcagtgtgccagctgttgaaaggcctgcctaccagaacacccctgaatggcagcggccccccacgccgcgtcggcggctacgcaaccagcccttcctctccaaaaaaagaggctacaagcgggagatcttcagttcgcaggtacctgtcacccgaacggcttgctagcgtgcgtcgggaggacccgcgtagcaggacaaccagctcttctagcaactgttctgcaaagaaggagggcaagacaaaagaagtgatttttagcgtggaggatgggtctgttaaaatgttcctgagaggccgaccagtgcccatgatgatccctgacgaactagctcccacgtactcactcgataccaggtccgaactgccttcatgtaggctcaagcttgagtgggtttatggatacagaggaagggattgccgagcaaacctctacttactccctacaggcgagattgtgtactttgtcgccagcgtggcggtgctctatagtgtcgaagaacagaggcagcgacactatttggggcacaatgatgatattaagtgtttagctatccatccggatatggtgacaatcgctaccgggcaagtggccggtaccactaaagagggcaaacctctacctccacatgtgcggatttgggactctgtgtctctgtccacattgcatgttctggggctcggggtctttgacagagctgtgtgctgcgtggggttttctaaatctaatggtgggaacttgctgtgtgccgttgacgagagtaatgatcacatgctgtcagtttgggactgggcaaaggaaacaaaggtcgtcgatgttaagtgcagtaacgaagccgtcctagttgccacgttccacccaactgaccccacagtcctaattacgtgcggcaagtcacatatttatttctggacacttgagggaggatccctttccaaaaggcagggcctgttcgagaagcacgagaagccaaaatacgtgctttgcgtgacattcctggaaggcggtgatgtcgtgacaggcgattctggtggcaatctgtacgtttggggaaaaggcggaaataggatcacccaggccgtcctgggcgctcacgatggtggagtcttcggcctgtgcgcgctgcgagacgggactctcgtgtccggaggcgggcgagaccggagggtcgtcctgtggggtagcgattattccaaactgcaggaagtggaggtcccagaagactttggcccagtgcggaccgtagcggaaggacacggtgacactttgtacgtcgggacgacccgaaacagcatattacagggtagtgtccacactggattttcactgctggtgcagggtcatgtggaggagctttggggtctggccacacatccatctcgggcacagtttgtaacgtgtggccaggataaactcgttcatctgtggtcctccgacagtcaccagccgctgtggtcaaggattatagaagtggaaagccgcagtgttacacaggcaggggggcagtggcacgacttgggcagtcttcagccaccaccacccgggttcaagtag

SEQ ID NO: 16085 - DNA, 996 bp, synthetic construct
  source 1..996: mol_type = other DNA; note = Synthetic coding sequence
atggccgagggcggaggaccagaaccaggggaacaggagcggagatcaagcggccccaggcctccatccgccagagatctgcaactcgccctggccgaactgtacgaagacgaggtaaaatgtaagtctagcaagagtaaccgcccgaaagcaacagtcttcaaaagcccacgcactccaccacaacggttttactcttccgaacatgaatatagcgggttgaacatcgtcagaccgtctactggaaagattgtaaacgaactgtttaaggaggcgagggagcacggcgccgttcctcttaatgaggcaactcgagctagcggggacgataagtctaagtcctttactggtgggggttaccgcctcggatcctccttctgtaagcgttcggaatacatttatggggagaaccagttgcaggacgtgcagattctattgaaactctggtccaatggcttctctttagacgatggcgaactccgtccctataatgaaccaaccaacgcccagttcctggagtcggtgaagcgcggcgaaattccacttgagctgcagagactggtgcacggcggccaggtaaacctggatatggaggaccatcaagaccaggagtacatcaagccgaggttacggtttaaggcctttagcggagagggccagaaactggggtcacttacccccgaaatcgtttcaacaccttcaagcccagaagaggaggataagagcatcctgaacgcggtagtgctgattgacgactctgttccaacaactaagatccagatccgtcttgccgatggcagccggttgattcaacgatttaatagcacccatagaatcctggacgtgagaaacttcatcgtccaaagccgcccagaattcgcagcactagacttcatcctcgtgacctccttccccaacaaggagctgactgacgaatccttaaccttgctggaggctgacatcctgaatactgtgctgctgcagcagctgaagtag

SEQ ID NO: 16086 - DNA, 2064 bp, synthetic construct
  source 1..2064: mol_type = other DNA; note = Synthetic coding sequence
atggatggcggcgcgctgacagatacctccctcaccgactcatacttcagcacttcctttatcggcgtgaacggctttgggtcccctgtggagacaaaataccctcttatgcagagaatgaccaattcttcatcatcaccctccctgctcaacgacagtgccaaaccctactctgctcacgaccccctcaccagccctgctagcagcctctttaatgatttcggcgccctgaatatctcacaacgcagaaagacacctaacccaaccgcctcagagtttatccccaaaggcggcagtacttctcgcctctctaatgtctcgcagagcaacatgtcagctttcagccaagtgttctctcacccatcaatggggtcaccggccaccgctggcttggctcctggtatgtctctgagtgcgggcagcagtcccttgcacagtcccaagatcacaccacatacaagtcccgccccgcgacgccggtctcatacgcctaaccctgccagttatatggttcccagttcagcatcaacatccgttaataatcctgtgagccagaccccgagctccggccaggtgatccagaaggaaacagtaggggggaccacgtacttctacactgacaccacccccgccccgctcactgggatggtcttcccaaattatcacatatatccacctacggcaccccacgtggcctacatgcagccaaaagccaatgccccctcattctttatggctgacgaactccggcaggaacttatcaatcgccatctgataactatggcccagattgaccaggccgatatgcctgccgttccaacagaggtggattcatatcactcattattccccctggaacctctcccgccccccaataggatacaaaaatccagtaactttggttacatcacctcgtgttacaaggctgtcaattccaaagacgatctgccctattgcctgcgccgcatacacgggtttcgacttgtgaataccaagtgtatggttctggtggatatgtggaaaaagattcagcacagcaatattgtcaccttgcgagaagtcttcacaactaaggccttcgccgaaccgtccttggtcttcgcttatgattttcacgcggggggggagacaatgatgtcccgccatttcaatgatccgaatgctgatgcatacttcacgaaacggaaatggggacagcatgaggggcccttgccacggcagcatgcaggactcttgccagagtccctaatctgggcttatattgtgcagctgagctcggcgttacgcacaatacacaccgctggcctggcatgtcgcgtaatggatcctacaaagatcctaattacaggtaagacccgcctgcgcgtgaattgcgtgggggtcttcgatgtactgacgttcgataatagccagaacaataacccgcttgccctgatggcccagtatcagcaagcagacctgatctctctcggcaaagttgttctggcattagcgtgtaactcgctggcaggaattcagagggagaatctgcagaaggccatggaactggtgaccattaactatagtagcgacctgaaaaacctcattctgtatctgctgacagatcaaaatcgcatgaggtccgttaacgatattatgccaatgatcggggcacgattctacacacagcttgatgctgcacagatgagaaatgacgtaattgaggaggatctcgctaaagaagtgcagaatggccggctgttcagattgctggctaaattgggcaccattaatgagcgacccgagttccagaaggatccgacttggtccgaaaccggcgaccgatacctgcttaagctgtttagagaccatctgtttcatcaggtcaccgaagctggcgccccctggattgatctgagccacattatttcctgcttgaataagcttgacgcgggcgtacctgagaaaatatccctaatctcccgcgacgaaaagagtgtcttagttgtgacctactctgacctcaaacgctgcttcgagaacaccttccaggaattgattgctgccgcgaacgggcagctgtag

SEQ ID NO: 16087 - DNA, 6951 bp, synthetic construct
  source 1..6951: mol_type = other DNA; note = Synthetic coding sequence
atggatggagtgtcctccgaggccaacgaggaaaatgacaatatcgagcgcccggttcgccggcgccactcaagcatactcaagccaccccggtcccccctccaggatctgagggggggaaacgagcgggtgcaggaaagcaacgctttgcggaacaaaaaaaactcccgccgagtgagtttcgccgatacaatcaaagtcttccagactgaatctcacatgaaaattgtcagaaagagcgaaatggaagagaccgagaccggggagaacctcctgctgatccagaacaaaaagctggaagacaattactgcgagattaccgggatgaacaccttactttcagcccctatacatacccagatgcagcagaaggaattttctatcatcgagcatacccgggagagaaagcacgctaatgaccagacggtgatattctctgacgaaaatcagatggatcttacttcttcccacactgtcatgatcaccaaaggtctgctggataatcccattagcgagaagtcgacaaagattgacaccaccagcttccttgccaatctgaagttgcataccgaggattctcgcatgaaaaaagaagtgaacttctccgtggaccagaatacgagtagtgagaacaaaattgatttcaacgactttatcaaacggctcaagacaggaaaatgtagcgccttcccagacgttccagataaggagaattttgaaattccgatctatagcaaggaacctaactcagcatctagcactcatcagatgcacgtgtcccttaaggaagacgagaacaactccaacatcacaagactctttcgtgagaaggacgacggcatgaatttcacacagtgccacactgcgaatattcagacactgataccaacttcatccgagactaatagtagggaatctaagggcaacgatatcaccatctacgggaatgatttcatggacctgacatttaaccacaccttacagatcctgccggcaactgggaatttttccgaaattgagaatcagacacagaacgccatggatgtcaccaccggctatggaactaaggcaagtgggaataagactgtgttcaaatctaaacaaaacactgcctttcaggacttaagcattaatagtgccgacaagatccatattacacggtctcacataatgggggccgagacccacatcgtgtctcaaacatgcaatcaggatgcccgtattctagccatgactcctgaatcaatatactcgaacccatctatccagggttgtaaaaccgtattctactcctcatgcaacgatgcaatggagatgacgaaatgcctctctaacatgcgcgaagagaaaaacttgttgaagcatgactcaaattacgcaaagatgtactgtaatccggacgctatgtcttcccttactgagaagacaatttacagcggagaagagaatatggacattaccaaatcgcacactgtagccattgataaccagatttttaaacaggatcagtcaaacgttcagatcgctgccgccccaacccccgaaaaggaaatgatgctgcagaatctgatgacgacctccgaggacggcaagatgaatgtgaattgtaactccgtgccgcacgtatctaaggagcgcatacagcagtcattgagcaatccactgtctatcagcctgactgaccgaaagaccgagcttctgtcaggagaaaacatggatcttaccgaaagccacacttccaacctgggctctcaagtacctttggccgcctacaatctcgcgccagagtccacatccgaaagccattctcagagtaagtcgtctagcgacgagtgtgaggagataacaaagtcccgcaatgagccgtttcagagatcagacattatagccaaaaactccctgaccgacacttggaacaaggataaggattgggtactgaaaattttgccctatctcgataaggactcaccacagtcagccgattgcaatcaggagatcgctaccagtcacaacatagtctattgtggaggcgtcctggacaagcagatcacgaaccggaacaccgtttcatgggaacagtcccttttttctacaacaaaacctctgtttagtagtggccagttttctatgaagaaccacgatactgctatttcctcacatacagtgaagtccgtcttgggtcagaactctaaactggctgagccgttgcggaagagccttagcaatccaaccccagactattgtcacgacaaaatgatcatatgctccgaagaggagcagaatatggacttaaccaaatcccacactgtcgtcattgggtttggtccctcagagctgcaagagctcggaaagaccaatctggagcatacaactgggcaactcactactatgaatcggcaaattgctgtaaaggtggagaaatgtgggaagtctcccattgaaaagtctggcgtgctgaaatccaattgcataatggacgtgcttgaggacgaaagcgtccagaagccgaagttcccaaaggagaaacagaacgtgaaaatctggggcagaaaaagtgtaggcggcccgaagattgacaaaactatcgtttttagtgaagatgataagaacgatatggatatcactaaatcgtacactatcgaaattaaccatcgtcccctgctggaaaaaagggactgccatctcgtgccccttgccggtacctccgagaccatcctctacacatgccgacaggacgacatggagattacacgaagccataccaccgccctggagtgtaagactgtctcacccgacgagattaccacgagaccaatggacaaaacagtagtttttgtggataatcacgtggagttggaaatgacggaaagccatacagtgttcattgattatcaagaaaaagagagaacagatagacccaatttcgaattaagtcagcggaaatcccttggaacacccaccgtgatttgtacgcctactgaagaaagcgtgttctttcccggtaacggtgaatcagatagactcgtggctaatgattcacagctcacaccactggaagaatggtcaaacaatcgcggacctgtggaagtggctgataacatggagctttccaagtcagcaacatgcaagaacatcaaagacgtgcagtctccaggctttttaaacgagcccctatccagcaaaagccagagaagaaaatccctgaaattaaagaacgataagactatcgtgttcagcgaaaaccataagaatgacatggatatcacccagtcttgcatggttgaaatcgataacgagtccgctcttgaggacaaggaggatttccaccttgccggggcttcgaagacaatcctttactcttgtggccaggatgacatggagatcacccgttctcacaccacggccttggagtgtaaaaccctgctgccaaacgagatcgccatccgccctatggacaaaaccgtgctcttcaccgacaattactccgatctggaggtgaccgatagccacaccgtgtttatagactgccaggccacggagaaaatccttgaggagaacccgaaatttgggatcggcaaaggcaaaaacctgggtgtgtcctttcctaaagacaactcttgtgtgcaagaaatagctgaaaaacaggccctcgcagtgggcaataaaattgttctgcacacagagcagaaacagcagttattcgccgctacaaacaggactaccaatgagattatcaaattccacagcgcagcaatggacgaaaaggttattggaaaggttgttgaccaagcctgcaccctggagaaagcacaagtcgagagctgccagctgaacaatcgcgacaggaggaatgttgatttcactagcagccatgctacggctgtctgtggttcttcggacaattattcctgcctgccaaatgtgatctcctgtaccgacaacctggagggaagcgcaatgctgctttgtgacaaggacgaagagaaagctaattattgcccagtgcagaacgacctggcgtacgctaatgatttcgcatccgagtactatctggagagtgagggacagcccctgagtgctccttgtccgctgctcgagaaagaggaagtgatacagacgagtactaaaggccaactcgactgtgttataacactacacaaagatcaggaccttataaaggacccacggaacttactcgctaatcaaacacttgtgtatagccaggacctgggcgaaatgacaaaactgaactcaaaacgagtcagctttaaattacccaaagaccaaatgaaggtttatgttgatgatatttacgtgattccccagccacatttttccaccgaccagccacctctccctaagaagggacagtcttcgattaataaagaggaagtgatcctgtctaaggcgggcaataagagtctcaacattatagaaaatagcagtgcccccatctgcgaaaataaacccaagatcttgaattccgaagagtggttcgcagccgcatgcaagaaggagttgaaggagaatatacagaccacgaattataatactgcccttgatttccacagcaacagcgacgtgacaaagcaggtaatacagacgcacgtcaatgctggagaagcccctgacccagtgatcacctctaacgtcccatgcttccactccattaagcctaacctgaataacctgaatgggaagaccggcgaatttctggcctttcagacagttcaccttccgccgctcccggagcagctgcttgagttgggtaacaaggcgcataacgacatgcacattgtgcaggcaactgagatacacaatataaacatcatctccagtaacgccaaggactcccgagacgaggaaaacaagaagagtcacaacggagccgaaaccacctcactacctccaaagacagtgtttaaggacaaggtgagacgttgctcactcgggatctttctgcctcggttaccgaacaagaggaactgctccgtaactggcatagacgatcttgagcaaattccagccgataccacggatataaaccatctagaaacgcagcccgtcagttcaaaggactcagggatcggaagtgtcgccggtaaattaaatctgtccccaagtcagtatatcaacgaggagaatctacccgtttaccctgatgagataaacagcagtgatagtattaatatcgaaaccgaggagaaggccctcattgagacctatcagaaggaaataagcccttacgaaaataaaatggggaagacctgcaactctcagaaacgtacatgggtgcaagaagaagaggatattcataaggaaaagaagatccgtaagaacgaaatcaagttctccgatacaacgcaggaccgagaaatcttcgaccaccataccgaggaggatattgataagtccgccaatagtgtgttgatcaagaacctgtctagaactccatcgtcctgttcgtcttcgctggattctatcaaggccgacggaacaagcctggacttttcaacctacagaagttcccaaatggaatctcaattcctgcgggatacaatatgcgaagagtctctcagggaaaaactacaggatggccgtattaccatccgtgagtttttcattttgctgcaagtgcatattctgatccagaagccaagacagtccaatctccctggtaatttcactgtcaacacccctccgacccccgaagacttgatgttgtctcaatatgtctatcgccctaaaatacagatctacagggaagattgcgaagcaagacgacagaaaatcgaggaacttaagctgtcggcatcgaaccaggataagctgcttgtggatatcaacaagaatctttgggaaaagatgcgtcactgcagcgacaaggaactgaaagcatttggaatttaccttaataaaataaagtcctgttttacaaaaatgaccaaagtgttcactcaccaggggaaggtggctctctacggaaaactcgttcaatccgctcagaatgagagagaaaaactccagattaagatcgacgaaatggacaaaattttaaagaagatcgacaattgcctgacagaaatggaaaccgagacaaagaatcttgaagatgaagagaaaaataaccctgtggaggagtgggattctgagatgcgggccgcggagaaggagcttgagcagttgaaaacagaggaggaggaactacaacggaatctcctggaactcgaggtgcagaaggaacagacactggcacagatcgactttatgcagaagcaacgcaatcggaccgaggagctcctggatcagctgagcctgtcggaatgggatgtagtcgaatggtctgacgaccaagctgtctttacgtttgtttatgataccattcagctgactatcaccttcgaggaatcggtggtggggttccccttcttagataagaggtaccgcaaaatcgtggatgtcaatttccagagcctgcttgacgaggaccaggccccaccgagctcactgttggtacacaagctgatttttcagtacgtggaggagaaagagagctggaaaaaaacctgtacgacccagcatcagcttcccaagatgctggaggaattctctctggtggtgcatcattgtcgtttactgggggaggagattgagtacctcaaaagatggggacccaattataatttgatgaacatagacataaacaacaatgaattaagactgttattttcatccagtgctgccttcgccaaattcgagatcaccctatttcttagcgcatattacccgtcagtgcccttgcccagtaccatccaaaaccatgtagggaatacaagccaagacgatatcgcaacaatcctgagcaaagtccccctggagaataactatctgaaaaatgttgttaaacaaatttaccaagatctctttcaggattgtcatttctaccattag

SEQ ID NO: 16088 - DNA, 714 bp, synthetic construct
  source 1..714: mol_type = other DNA; note = Synthetic coding sequence
atgggctgctgcggctgctctggcggctgtgggtcaggctgtggagggcgcggtagcggttgtggcggctgcggatccggctgtgggggctgtgggagcggttgcggcggatgcggtagtggctgcgggggctgcggcggatgcggctcagggtgcgcaggttgcggaggatgcggaagtggttgttgcgtgcccgtgtgctgttgcaaacctatgtgctgttgcgtgcctgcttgtagttgttcaagctgtgggaaaggtgggtgcggcagctgcggggggagcaaacgcggttgcgtgtcctgcggcgtctcaaagggcgcatgtggctcttgcggtggcagcaaaggcgggtgtggatcatgcggagggagcaaagggggttgcggatcgtgcggtggtagcaaaggaggttgcggatcctgcggcggatcaaagggagggtgtggctcctatgggtgtagccaatcctcttgctgcaagccctgctgctgttcctccggatgcggatcttcctgctgtcagagctcgtgctgcaaaccctactgctgtcagtcctcatgctgcaagccatattgttgccaaagcagttgctgcaagccctgctcatgcttctctggctgcggctccagctgttgccagtcctcctgctacaagccgtgttgctgccaatcgtcttgctgcgtcccggtctgttgccaatgtaaaatttag

SEQ ID NO: 16089 - DNA, 717 bp, synthetic construct
  source 1..717: mol_type = other DNA; note = Synthetic coding sequence
atggggtgcagtgggtgcagcggaggatgtggctcttcctgtggcggatgtggctctagctgcggcgggtgtggctccgggtacggaggttgcgggagcgggtgttgcgtgcctgtgtgctgctgtaagcccgtttgctgctgtgtccccgcctgctcttgcagcagctgcgggtcctgtggcggcagcaagggtgtatgcggcagttgtggcggctgcaaaggcggctgtggaagttgcggaggcagcaagggcggatgcgggagttcctgctgtgttccagtttgctgtagctcctcttgcggatcatgcggtggttctaaaggtgtctgtggcttcagaggaggctcaaaaggtgggtgcggctcatgtggatgttcacagtgtagctgctataagccctgttgttgctcttctggttgtggttcatcatgctgtcaatcttcctgttgcaagccaagctgtagtcagagctcatgctgtaagccctgttgttctcagtcttcgtgctgtaagccgtgttgttgctcatcagggtgtgggtcttcatgttgccagtcttcctgctgcaagccgtgttgcagtcaaagtagctgttgtaagccatgctgctgctcatcaggttgtggcagcagctgttgccagtctagctgttgcaagccatgcagtagtcagagttcttgctgtgtgcctatttgctgccaatgcaaaatttag

SEQ ID NO: 16090 - DNA, 1473 bp, synthetic construct
  source 1..1473: mol_type = other DNA; note = Synthetic coding sequence
atgaatggggccctagatcacagcgaccagccggaccccgatgctattaagatgttcgtgggacagattccacggtcctggtccgagaaagaactaaaagagctatttgaaccatacggagctgtttatcagataaatgtccttcgggaccgtagtcaaaatcccccccagtcaaaaggatgttgctttgtgaccttctataccagaaaggcagccctggaagctcagaacgctttgcacaatattaagaccctccctggtatgcaccatcccatccagatgaaacctgctgattctgagaagtcgaatgctgtggaggatagaaagctttttatcggcatggtgtcgaaaaaatgcaatgagaatgacatccgcgtgatgttctcaccgtttggacagatagaggaatgccgcatcttgcgcggccctgacggactatcgagaggctgcgcattcgtgactttctcaacgagggctatggcccaaaatgccattaaggccatgcaccagtcacagacaatggaaggatgctcgtctccaattgtggtgaagttcgccgatacacagaaagacaaggagcagcgtcggctacagcagcagctggcccaacagatgcagcagcttaatactgccacctgggggaacctcacgggtcttggagggcttaccccccagtatttagctctgctgcagcaggcgacaagcagtagtaacttaggggctttttcaggcattcaacagatggcaggtatgaacgctcttcagctccagaatctggctactcttgccgccgctgccgccgccgcccaaactagcgcaacaagcacgaacgctaaccccctctcaactactagttcagctctgggagccctgacttctcccgtagccgccagtaccccgaattctacagcaggtgcagccatgaacagcctaacatctctaggaaccctgcagggacttgccggggcaacagtcggcctcaataatataaatgccctggccgtggctcaaatgttaagcgggatggccgccctgaacgggggtcttggcgccactgggctgactaacggaacagcaggcactatggatgcgctgacccaggcctactccggaattcagcaatacgcagctgcggcgctgcctactctgtacagtcagtccctccttcagcaacagagcgccgcaggcagccaaaaggaaggcccagagggcgctaatctgttcatctaccatcttcctcaggaattcggagaccaggatatactgcaaatgtttatgccgttcggaaatgtgattagcgctaaggtatttattgacaaacagacgaacctgagtaaatgcttcgggttcgtgagttacgataaccctgtgagcgcccaggctgccattcaggccatgaacgggtttcagatcgggatgaagcggctcaaagtccagctgaagaggtcaaaaaatgatagtaaaccctactag

SEQ ID NO: 16091 - DNA, 5826 bp, synthetic construct
  source 1..5826: mol_type = other DNA; note = Synthetic coding sequence
ttactgacgagcgtgctgatgccctccttcggatactttatacgcagccctgagaagcgggagccaatcgccctgatacggaagtccgacgtctctcgtggcaatctggagaaagagatggcccacctgaatcacgatctctattcaggtgacctgaacgaacagtctcaggctcaattgtcagaaggatctattaccctccaagtggaagccgttgagtctaccagtcaggtcgacgaaaacgacgtcacgctaaccgctgacaaaggaaagaccgaggacacattcttcatgtctaataagccgcagcgatacaaggataaactgcccgattcaggcgatagtatgctgagaatatctaccatcgcttccgccatagctgaggcatcagtgaacaccgaccctagtcagctagcagcaatgatcaaagctctgtccaataagaccagggacaaaactttccaggaagatgagaaacaaaaagactattctcacgtgcggcactttctcccgaatgatctagagaagagtaacggttcgaatgccctggacatggaaaagtatctcaagaagacggaggtgtctcggtatgaaagcgccctcgagaacttctccagggctagtatgagtgacacttgggatctttctctccctaaagagcagacaacacaagatattcacccagttgatctgtcagctacaagcgtgtcagtaagggcacctgaagagaatactgccgctatcgtttacgttgaaaacggggagtctgagaatcaagagagtttccgcaccatcaattcctccaattccgtcacgaacagagagaacaattccgccgtagtcgatgtgaagacatgtagcatcgataataaacttcaggacgtgggcaacgacgagaaggcgacatccatttcaactccctccgatagttattcttccgtgcggaatcccagaattaccagcctgtgcctcctgaaagattgtgaagagatcagggacaaccgagaaaaccagcgacagaacgagtgcgtgtcagagatttcaaattccgagaagcacgtgacttttgagaaccataggattgtgtctccgaagaactccgacctgaaaaacaccagccctgaacacggtggtaggggcagtgaagacgaacaggaaagttttcgaccatcaacatcaccattgagccacagttctccatctgagatctctggcacttcatcttccgggtgcgccttagaatcatttgggtccgcagcccagcagcagcagcctccttgcgagcaggagctcagccctctggtgtgcagcccggcaggcgtttcgaggctgacatatgttagtgagcctgagtcctcctatcccactaccgccacagatgacgcactggaggatcggaaatccgatattaccagcgagctcagcacgaccatcatccagggttcgccagctgccctggaggaaagagctatggaaaaactgagggagaaggtcccctttcagaaccgcggaaaggggactctgtcctctattatacagaacaatagcgacacccggaaagctacagagactacaagcctgagtagtaagcctgagtacgtcaagcctgattttaggtggtcaaaagacccctcttccaaaagcggaaacctgctcgagacatctgaagtggggtggacctccaaccccgaagagctggatcctatcagattagcattacttggtaaaagcggcctatcgtgccaggtaggctccgctacatctcacccggtgagctgccaggagcctattgatgaggaccaaaggattagcccaaaagataagtctacagctgggagagaattcagtggacaggtaagtcaccagacgacgagtgagaaccaatgcacacctattccatcaagtaccgtccattcgtccgtggctgatatgcagaatatgcctgccgccgtgcatgctctactgacacaaccctctctatccgctgcaccattcgcccagagatacctcggaactctcccctcaacaggtagtactaccctcccccagtgtcacgcaggtaatgctactgtatgcggcttctcaggggggttgccgtatccagcggtcgccggcgagcctgtgcagaattccgtggccgtgggtatttgccttggttctaatataggcagtggctggatggggacatcctctctgtgcaatccttatagcaataccctgaaccagaacctgctgagcaccactaaaccattccctgtgcccagtgtgggaaccaactgcggcattgagccatgggactccggtgtgacgtccgggttgggctcagttcgggtgccagaagagttgaagctgccacacgcttgttgtgttggaattgcaagccaaactctgctgtctgtgctcaatccaacggaccgatggctgcaggtgtccatcggtgttttgagcatatctgtcaacggggagaaagtggatctcagcacatatcgttgcttagtattcaaaaacaaggctattatcaggccgcacgcaactgaagaaattaaagtgctgtttattccgagcagtccgggcgtgtttaggtgcacattcagtgtggcttcttggccgtgcagtactgatgcagaaaccattgtgcaagccgaggccctcgcgagtacagtcacattaactgctatcgcggagagcccagtgattgaggtcgagaccgaaaaaaaagacgtcctggattttggagacctgacctatggcgggtggaaggcgttacccctgaaacttatcaatcggacccacgctaccgtgcccatccgtctgattatcaatgccaacgccgtggcatggcgctgcttcaccttttcaaaggagtcagtgcgcgcacccgttgaggtggccccgtgcgctgacgtggtcactagactggccggaccatctgtggttaaccacatgatgcccgcctcttacgatggccaagatcctgagttcttgatgatttgggtactgtttcacagtccaaagaagcagatcagttcaagcgacatattggactcagccgaggaattctccgccaaggttgacatcgaggtcgattctcccaatcccaccccggtactcagatcagtgtcactcagggccagggccggaatcgcccgtattcacgcaccccgggaccttcagaccatgcatttcctggccaaagttgcttcaagcagaaaacagcacctgccgctgaagaatgcaggcaatatcgaagtctatttggatatcaaagtccctgagcagggatcccatttctctgttgatccaaagaatttgttactcaagccgggtgaggagcacgaggtgatcgtgtcatttacccctaaagacccagaggcatgcgaggagcggatcctcaagatctttgtgcagccctttggcccacagtacgaggtggtgctgaagggcgaagtgatcagttcaggttccaagccactgagcccgggaccttgtcttgacatccccagcatcctcagtaacaaacaattcttagcttggggtggcgtgcccctgggaagaacgcagcttcagaaactcgctctacggaacaactccgcatccaccacacagcacctgagactgctgatcagaggtcaggatcaggattgctttcagttacagaacacgttcgggtccgagcagcgcttgacctccaactgcgagatcaggattcacccaaaagaggacattttcatcagtgtcctgtttgcgccaactcgcttatcgtgtatgctcgctaggctagagataaagcagctggggaatcgcagccagcccggaatcaaatttacaatcccactcagcggatatggaggaacatctaacctgatactcgaaggggtcaagaaactcagtgattcctacatggttacagtgaatggcctcgttcccggtaaagagagtaaaattgtgttctccgtcaggaataccggcagccgggctgcattcgtgaaggccgtcggatttaaagactcccaaaagaaggtcctgctcgatccaaaggtacttaggatcttccccgataagtttgtgctgaaggagcggacccaggagaatgttacgctgatctacaacccatcagatcggggcattaacaacaagacagccacggagttgagtactgtctatttgtttggaggcgacgagatctctcggcagcagtaccgcagagcacttctgcacaagccagagatgattaaacagattcttcctgagcacagtgtgctgcagaacatcaattttgttgaggcctttcaagatgaacttctcgtcactgaggtatatgatttaccacaacgtccgaacgatgtccagctgttctatgggtctatgtgtaagattattttatctgtgataggtgagttccgggactgtatctcctctagggagttcctccagccctccagcaaggcctcccttgagtccaccagtgacttgggggcctctgggaaacacggtggtaacgtttccctcgacgtcctcccagtaaagggtccacaaggatctccacttctatctagagccgcacgcccacccctggaccagctagcttccgaggaaccatggactgtgctgccggagcacctcatcctggtagccccaagcccctgcgatatggcaaagacaggcagattccagatagtgaacaactccgtccggctgttacggtttgagctgtgctggcccgcgcactgcctgactgtgacaccccagcatggttgtgtagccccggagagcaagttacagatcctcgtcagccctaacagctctctttcgaccaagcagtcaatgtttccatggtcaggtctcatatacattcactgtgacgatggccagaaaaaaatcgtaaaggtgcagataagagaggatttgactcaagtcgagctgctcaccagattgacgtctaaaccatttggcatcctttcacccgtgagcgagcctagcgtgagccacctagtaaagcctatgacgaaaccccctagcacaaaagtggaaattcgaaataaatcaataacatttcccacaactgagcccggcgagacaagcgagagttgtctggagttagaaaaccatggcactactgacgtgaagtggcacttgtccagcttggcacccccatacgttaagggcgtggatgaaagtggcgatgtgtttcgggccacttacgccgccttcagatgtagcccgattagtggcttattggaatcgcacgggatccagaaagtttcaattaccttcttaccacgcggacgcggggactatgcccaattctgggacgtggaatgccacccacttaaggagccccacatgaaacacactctgaggtttcagctatctggtcagtcaatcgaggcagagaatgagcccgaaaacgcttgtctgagtactgattctctgatcaagattgatcacctggtcaaaccccgaaggcaggctgtctctgaggcctccgcccgcatcccagagcagctggatgtcaccgccagaggtgtgtacgctccagaagacgtgtataggttccgccccacgtctgtgggggagtctaggacactaaaagtgaatctgcgaaacaattcttttataacccactcactgaagtttctgtcaccacgagagcccttctacgtcaagcattcaaaatactcgctaagagcacagcactacatcaacatgcccgtgcaatttaagcctaagtctgctgggaagttcgaggcactgcttgtgattcaaacagatgaaggcaagtccattgctataaggctcataggcgaagctctgggaaaaaactag

SEQ ID NO: 16092 - DNA, 111 bp, synthetic construct
  source 1..111: mol_type = other DNA; note = Synthetic coding sequence
atgtgctactacggcaactactatggaggatacggctacggcggtctgggctgtggttacgggagctgctgcggctgcggattcagaagactggggtgtggttatggatag

SEQ ID NO: 16093 - DNA, 528 bp, synthetic construct
  source 1..528: mol_type = other DNA; note = Synthetic coding sequence
atgtcttataattgctgtagtggaaatttttcatccagatcttgcggggattacttaagatatccagccagcagtaggggcttttcatacccaagtaatctcgtctactcaaccgatctctgcagtccgtcaacttgccaattgggctcctctctctatcggggatgccaggaaatttgctgggagcctacttcctgccagacttcatacgtcgagtcctcaccctgtcagactagctgttacagacctagaacaagtctgctatgttccccctgcaaaaccacatattcaggcagtcttggcttcggctcctccagctgtagaagccttggttacggatcccggtcttgttattccgttggctgtgggagctcaggggtgcgtagtctgggatacggaagctgtgggtttccctctctgggctatggcagtggattctgcagacctacctatctggcctcacgcagttgtcagtccccatgctataggccagcctatggttcaaccttttgcagatcaacctgttag

SEQ ID NO: 16094 - DNA, 324 bp, synthetic construct
  source 1..324: mol_type = other DNA; note = Synthetic coding sequence
atggggaaaaagagaaccaaggggaaaaccgtgcccattgacgacagttccgaaacccttgaacctgtgtgcagacacattcgcaagggcttggagcaaggtaatctgaaaaaggcgctcgtgaatgtggagtggaatatttgtcaggattgtaagaccgataacaaggtgaaggataaagccgaggaagagaccgaagagaaaccaagtgtgtggctctgcctgaagtgcggccaccaaggttgcggacggaattcccaggaacagcacgcgttgaagcactacctcaccccacgctccgagccacattgcctcgttttatag

SEQ ID NO: 16095 - DNA, 2469 bp, synthetic construct
  source 1..2469: mol_type = other DNA; note = Synthetic coding sequence
atgggcaagaagcgaacgaaagggaagaccgtcccgatcgacgattccagtgaaacccttgagccagtgtgccgacacatccgcaagggcctcgaacaggggaatttgaagaaggcccttgtgaatgtagaatggaacatatgtcaggattgcaaaacggacaacaaggtgaaggataaggcggaggaggaaactgaagaaaagccaagtgtctggttatgcctcaagtgcggacatcagggatgcgggcgaaattcccaggagcagcatgcactgaaacactacctgacaccaaggagcgagccgcactgcctagttttgagcctggacaattggagtgtttggtgctatgtgtgcgacaatgaggtccagtactgttcaagcaaccagttaggtcaggtggtagactacgtgaggaagcaggcctctatcactactcctaaacctgagaaagacaacggaaatatagagctggagaataagaaattggagaaggagtccaaaaatgagcaggagagagagaagaaggagaacatggccaaagaaaacccccccatgaactcgccttgccagattactgtaaaaggactgagtaatttggggaatacctgtttcttcaacgctgtgatgcagaacctgagccagacccccgtcctgcgggagctgctcaaagaagtgaaaatgtcaggaacaattgttaagatcgaaccacccgatctagcactcacagagccattagagataaatctagagccgcccggacctctgactctggccatgtcccagtttctgaatgagatgcaagaaactaaaaagggagtcgttacccctaaggagctcttctcccaagtctgcaagaaggcggtgagattcaaaggctaccagcagcaggattcacaggagctgctgaggtaccttctcgacgggatgagggctgaagagcaccagagggtcagcaaaggcatcctgaaggcttttggaaactcaaccgagaagctggacgaggagctgaaaaataaggtgaaggactacgaaaaaaagaagtctatgccaagctttgtggatcgcatcttcggcggcgaactgacaagcatgattatgtgtgaccagtgccggactgtgtctctcgtgcacgaatcattcttagatctcagtctccccgtgctcgatgatcagtctggaaagaaatcagtgaacgacaaaaacctcaagaaaaccgtggaagacgaggaccaggactccgaagaagaaaaggacaacgatagctatattaaagagcgatccgatatcccttcggggaccagcaaacatttacagaagaaagccaaaaaacaggccaagaagcaggcaaaaaatcaacgaaggcaacagaagatccaaggcaaagtgctgcatctgaacgatatttgcacaattgatcaccccgaggacagtgaatatgaggccgagatgagccttcagggagaggttaacattaaaagcaatcacataagccaagagggcgttatgcataaagagtactgcgtcaaccagaaagatctaaacgggcaggccaaaatgattgagtcggtcaccgacaaccagaaatcaacagaggaagtcgatatgaaaaacattaatatggacaatgaccttgaggtgctcacctcctcccccaccagaaacttgaatggcgcctaccttacggaagggtccaatggtgaggtcgacataagtaacggcttcaagaatcttaacctcaatgccgccctacacccggacgagataaatatagagattctgaatgactcacatactcctggtactaaagtatacgaggtcgttaacgaggacccagagactgcattttgtacgttagctaatcgggaggtgtttaacacggatgagtgctctatccaacattgtctgtaccaatttacccggaatgaaaaactgagggatgccaacaagctgttgtgcgaggtttgcacacgcaggcagtgcaacggccccaaagccaatattaaaggcgagcggaagcacgtctacaccaatgctaaaaagcaaatgctcatttctcttgcacctcctgtgctgacgcttcacctaaagaggtttcagcaggctggattcaatctgagaaaagtgaataagcatattaagttccctgagatccttgatctggctcccttttgcaccctgaagtgcaagaacgtggctgaggagaatactcgggtgctgtattcgctttacggtgtggtcgagcattccggaactatgcgctcgggccattataccgcctatgctaaggctcgaaccgcgaattcccacctgtcaaaccttgtacttcacggagatatcccgcaggacttcgagatggaatcgaaggggcagtggttccacatttcggatacacatgtgcaggcggttcctaccacgaaggtcctgaactctcaggcctatctactgttctatgaacgaattctttag

SEQ ID NO: 16096 - DNA, 2472 bp, synthetic construct
  source 1..2472: mol_type = other DNA; note = Synthetic coding sequence
atggggaagaaacgcaccaaggggaagaccgtgcctatcgatgactccagcgaaaccctggaacccgtttgtcgccatattcggaaaggcctggaacaggggaacctgaagaaagccctggtgaatgttgagtggaatatctgccaggactgtaaaactgacaataaagtgaaagacaaagcggaagaagagacggaagagaagccatccgtgtggctgtgtttgaaatgtggtcaccagggatgtggaaggaacagccaggagcagcatgctctgaagcattatctgacccctcgatctgagcctcattgtcttgtcttatccctggataattggagtgtgtggtgttacgtgtgcgacaatgaggtacaatactgctcctctaatcagctgggtcaggtggtggattatgtgcgaaaacaggcctccataaccactcctaaacccgctgagaaagacaacggaaacattgagctagagaacaagaagctggagaaagagtccaaaaacgaacaagagcgggagaaaaaggagaacatggcgaaggagaatccacccatgaatagtccgtgccagataacagtgaaggggctgtctaatctgggcaatacatgtttttttaacgccgtcatgcaaaacctgtctcagactcccgtccttagggaactcctgaaggaggtaaaaatgtccggaacaattgtgaaaattgagcccccggatctcgcactgaccgagcctctcgagattaatctcgagccgcctggccctttaactctggctatgagccagtttcttaatgaaatgcaggaaactaaaaaaggagttgtcacccctaaagagctatttagccaggtctgcaagaaggccgttcggtttaaagggtatcagcagcaggacagtcaagagctgctgcgctatctgttggatggaatgcgcgctgaggagcaccagcgggtttccaaggggatattaaaggcctttggcaatagcaccgaaaagttggacgaggaactgaagaataaagtcaaggactacgaaaagaaaaaatccatgccctctttcgttgaccgcatctttggcggagagcttacatctatgattatgtgcgaccagtgccgtactgtaagccttgtccatgagtcctttctggatttatcactccctgttctggatgaccagtccggtaagaagtccgtgaacgacaaaaatctgaaaaagacagtggaggatgaggaccaagatagcgaggaggagaaggataacgatagctatatcaaagagagatccgatatcccctctgggactagcaagcatttgcagaagaaagctaaaaagcaggctaaaaagcaagccaaaaaccagcggagacagcaaaaaatacagggcaaggtgctccacctgaacgacatttgtaccatcgatcaccccgaggactcagagtatgaggccgaaatgagcctccaaggggaggtcaatatcaagtctaaccacatctctcaagagggcgtcatgcacaaagagtactgcgtgaatcagaaggatctcaacggccaggcaaaaatgatcgagtccgtgacagataatcagaaatccacagaagaggtcgacatgaaaaatatcaacatggacaatgacttggaagtccttacgagcagcccgactcgaaacctgaatggcgcctacctgacagaggggtccaacggagaggtcgacatttcaaacggatttaagaaccttaaccttaatgctgccctacacccggatgagatcaacattgaaattctgaatgactcacacacccctggcactaaggtctacgaagtggtgaacgaagatcctgaaaccgccttttgtacgctggcaaaccgagaagtttttaacaccgacgaatgctctatacaacattgcctttaccagttcacccgcaacgaaaaattaagggacgctaacaagctgttgtgtgaggtgtgcacacggaggcaatgcaacgggcctaaagccaatatcaagggagagcgaaagcatgtgtataccaacgccaaaaagcaaatgctgatctctctggcgccccccgtgctgactctccatctgaagcgcttccaacaggccgggttcaaccttcgcaaggtcaacaagcatatcaagttccctgagattctggacctggcccccttctgtacactgaagtgcaaaaacgtggccgaagaaaataccagggtactgtactcactgtatggcgtggttgagcatagcggcacaatgaggtcaggccattacaccgcctatgccaaagcacgtacagccaattctcacctgagcaatctggtcctgcacggtgatatccctcaggattttgagatggagtcaaaggggcagtggtttcacatcagtgatacgcacgttcaggccgtgcccaccaccaaagtgctcaacagccaagcctatctgctgttctatgagcggatactctag

SEQ ID NO: 16097 - DNA, 1167 bp, synthetic construct
  source 1..1167: mol_type = other DNA; note = Synthetic coding sequence
atggatccaataaggtctttctgtggtaagctccggtcccttgcatccacactggattgtgagaccgcgcgcctccaacgggcactggatggcgaagagtcggactttgaggattaccctatgcgcatcttgtacgatctgcactcagaggtccagaccctgaaggacgacgtcaacatcctcttggacaaagcccgtttggaaaatcaggagggaatcgattttattaaggcaacaaaggtactgatggagaagaacagtatggatatcatgaagattcgggagtattttcaaaaatatggatacagccctcgggtgaagaagaatagtgtgcacgaacaggaggccatcaacagcgatccagagctgtccaattgcgaaaactttcagaaaaccgacgtgaaggatgatctgtcagacccccctgtggccagctcctgcatatccgagaagtcgccgcgttcacctcagctttcagatttcggcctcgaaaggtatattgtgtcccaggtgttgcctaaccccccacaggccgtgaacaattacaaggaagagcctgtgatcgtgacaccccctacaaaacagtcattggtcaaagtgctcaaaaccccaaagtgtgcactgaaaatggatgatttcgaatgcgtgactcctaagctggaacactttggaatttccgagtatacgatgtgtttgaacgaggattatactatggggctgaagaacgctaggaataataagagcgaagaggctatcgacaccgagagccgtctaaacgataacgtttttgccaccccttcccctattatccagcagctcgagaaaagcgatgccgagtacacaaattctcctttagtgccgaccttttgcaccccaggactaaagataccttccactaagaattcaatagcgctcgtgtctacaaactaccctctcagtaagaccaactcttcttccaacgatttagaggtcgaggaccgcacatcactcgtgctgaacagtgatacctgtttcgagaacctcacagatcccagttcacctacaatctcttcctacgaaaaccttctcagaacaccgaccccacctgaagtgactaaaattcccgaggacatcctgcagaagttccaatggatctacccaactcagaaactgaacaagatgaggtag

SEQ ID NO: 16098 - DNA, 1353 bp, synthetic construct
  source 1..1353: mol_type = other DNA; note = Synthetic coding sequence
atgcgcgagtgcatctcaattcacgtgggccaggccggcgtacagatcggcaatgcttgttgggagctttactgcctggagcacggcatacagcctgatggacagatgccatcagacaagacaatcggcgggggcgatgatagctttaataccttcttcagtgaaactggtgctggaaaacacgtgccgcgagccgtttttgtcgacctcgaaccaactgtcgtggacgaggtgcgcacagggacatatcggcaactatttcatcccgaacagctgatcacaggcaaggaagatgccgccaataattacgcccgaggtcactataccattggaaaggagatcgtggacctggtccttgaccgcatacggaaattggctgacctctgtacgggcctccaaggtttcctgatctttcatagctttggcgggggcaccggctcaggcttcgcctcactgcttatggaaagactgtcggtggactacggcaaaaagtctaagctggagtttgcaatctatcccgccccgcaggtatcaacagctgtggtggaaccgtacaattctatcctcacgactcacacaacactcgaacatagcgattgtgcctttatggtggacaatgaagccatatacgacatttgcagaaggaatctagatatcgaacgccccacttacaccaacctgaatagactaataggccagattgtgtcgtcaatcaccgcttctctgcggtttgacggggctttgaacgttgacctgacggagtttcaaactaatcttgtcccgtacccaaggattcacttcccattggcaacatatgcacccgtgatctctgcagaaaaggcgtaccatgagcagttgtctgtcgccgagatcacaaatgcttgtttcgagccagccaatcagatggtgaaatgcgaccctcgtcacggtaagtatatggcctgttgtatgttgtacaggggtgacgtggtgcctaaagatgtcaacgctgctattgcaacaataaagacgaagcggacaattcagttcgtagactggtgccccacaggattcaaagtgggcatcaactatcagccgcccactgtggtcccagggggcgacctcgccaaagtgcagagagccgtttgcatgctttctaacaccacagctatcgctgaagcttgggctaggctggaccataaatttgaccttatgtatgcaaaaagggccttcgtacattggtacgttggagagggcatggaagagggtgagttctccgaagccagagaagacctggctgctttggagaaggattacgaggaagtgggtgttgattccgtggaggccgaagcagaggaaggcgaggagtattag

SEQ ID NO: 16099 - DNA, 3378 bp, synthetic construct
  source 1..3378: mol_type = other DNA; note = Synthetic coding sequence
atgactgttgaacagaacgtattacaacaaagcgcggcacagaagcatcaacaaacattcctcaaccagcttagggagataacaggaattaatgacacacaaattctgcagcaggccctcaaggactcaaatggcaatctggagctggctgtggcctttctgactgcgaagaatgccaagacgccacagcaagaggagaccacttactaccagactgccctcccaggtaacgatcggtatatctcagtggggtcccaagccgatacgaacgtcattgacctgaccggtgacgataaggacgatctacagagggccattgccctgtcattagccgagtccaaccgagcatttcgcgagactggtataacagatgaagaacaggcgatatccagagtgctggaggccagcatagctgaaaacaaagcatgtctcaagaggacacccacggaggtttggagggacagtcgtaatccttacgatagaaagagacaagataaagctcctgtcggcctcaagaatgtcggaaatacctgctggtttagcgcggttattcagagcctgtttaacctgctggagtttcggagattggtacttaactacaagcctccaagcaacgcacaggacctaccacgtaaccaaaaggagcacagaaaccttccgtttatgcgggagctgcgttatctcttcgccctcttggtgggcaccaagcggaaatacgtggacccatccagagctgtggaaatcctgaaggacgcctttaaaagcaacgattcacaacagcaagacgtgtctgaatttacacacaaactcttggactggctggaggacgctttccagatgaaagccgaagaggagaccgatgaagagaaacctaagaaccctatggtcgaactgttttacgggcgtttcctggccgtgggggtgctggaagggaaaaaattcgaaaatacagaaatgttcgggcagtatccgttgcaagtgaatggcttcaaagacctacacgaatgcctggaggccgctatgattgaaggggagattgagtcactgcactcagaaaattcagggaagagtgggcaggaacattggtttacagaactgccgcctgtcctgaccttcgaactctcacggtttgagttcaatcaagctctgggtagacccgaaaagatacataataagttggagtttccacaggtgctttaccttgaccgctatatgcatcggaaccgagagatcactcggataaagcgcgaagaaatcaaacgcctcaaagattacctaactgtgctgcaacaacgcctagaacggtacttgtcgtacggcagcggccccaagcgattccctctagtcgacgtcctgcagtacgctctggagttcgcatcctcgaaacctgtctgtacaagcccggtggatgacattgatgcatcatctcctcctagcggttctatccctagtcagacactccctagtacgaccgaacagcaaggggctctgtcatcagaattgccaagtacaagtccctccagtgtcgcggccattagctccagatcggtaattcacaaaccatttacccagagccgaataccgcctgaccttcctatgcaccccgcaccccgacatattactgaagaggagctgtctgtcttagaatcgtgcctgcatcggtggcgcactgaaatagagaacgacacgagggatttacaggaatccatcagtcgaattcacagaaccatcgaactcatgtattccgacaagagcatgattcaagtgccttacagactacatgcagtgctcgttcacgaaggccaggcaaacgcaggtcattattgggcctatattttcgaccatcgagaatcaaggtggatgaagtacaatgacatagctgtaaccaagtctagctgggaagagctcgttagagatagctttggtgggtatcgtaatgcctcagcatactgcctgatgtacattaatgataaggcgcagttcctgatccaggaggaatttaataaggagacaggccaaccactggtgggcattgaaacactgccacccgacctgcgagacttcgtagaagaggacaaccaacgcttcgagaaggagctggaagagtgggatgcacaactggcccagaaagccctgcaggaaaagctcttggcttctcagaagctgcgagagtcggaaacatcagtcacaacagcccaggcggccggtgatcccgaataccttgagcaaccgagcagaagtgactttagtaagcacttgaaagaggagaccattcagatcataacgaaggccagtcatgagcacgaggacaagtccccggagactgttctccagagcaagcccgaaaacacaaccagccagcctctgagcaatcaacgtgtggtcgaggtagcaatcccacacgtgggaaagttcatgattgagagcaaagagggaggctacgatgacgagataatgatgacaccaaatatgcagggaatcattatggcgattggcaaaagtaggagtgtgtatgatagatgtggacctgaagctggcttcttcaaggccatcaagctagagtatgcccgattggtcaagttggcccaagaggatactcctcccgaaactgattatcgtttgcatcatgtagttgtctatttcatacagaaccaggctcccaagaaaatcatcgagaaaaccctgcttgagcagttcggggatcgcaacctttctttcgacgaacgctgtcacaacattatgaaagttgcgcaggcgaaactcgagatgattaaaccagaagaagtaaacctggaagagtatgaagaatggcatcaagattataggaagtttcgcgagaccactatgtacctcatcatcgggctagaaaactttcagcgcgagtcatatatcgactctctgctgttcctcatttgcgcctaccagaataataaggagttacttagcaaaggactgtacagaggccacgacgaggagctgatttcccattaccgcagggagtgcctgcttaagctgaacgaacaggcagccgaactcttcgagagcggcgaagaccgcgaggtgaacaatggcctcattattatgaacgaattcatcgtgccatttcttcccctgctgctcgtggatgagatggaggaaaaggatattctggccgtcgaggatatgcggaacaggtggtgcagttacctgggacaggaaatggaaccgcatctgcaagagaagctgactgactttctacccaagctactggattgctctatggagattaagagcttccacgaacccccaaagctgccttcctattcaacacacgagctgtgtgagcggttcgctaggattatgctgtcactgtccagaacccccgctgacggacggtag

SEQ ID NO: 16100 - DNA, 1608 bp, synthetic construct
  source 1..1608: mol_type = other DNA; note = Synthetic coding sequence
atggatcttcggcaggcatgccgaacgcctagccgtgacgaagccggtgtagaattgctgatgacttacttcatccagctgggtttcgttgagagcagattctttccaccgaccagacagatgggattgctctttacctggtacgattcgctcaccggcgttcccgtgtcccagcagaacctacttttagagaaagcctccgttttattcaacacaggggctctttatacacagattgggacccgatgcgatagacagacacaggctggactggaaagtgccatcgacgcatttcagagagcagctggagtgttgaattaccttaaagataccttcactcacactcccagttacgacatgagccccgctatgctgtccgttcttgtcaagatgatgttggcccaggcccaagagtccgtgttcgaaaaaatttccttacctgggatacggaacgagttttttatgctcgtgaaagtcgcgcaggaggctgctaaggtcggagaggtgtaccagcagttgcatgctgcgatgtcccaggctccagttaaggagaacattccatactcgtgggcatccctggcctgtgtgaaagcccatcactatgccgccctcgcacattacttcaccgcaatcctgttaattgaccatcaggtaaagccgggaacagatctcgaccaccaggaaaaatgcctcagccagctctacgaccatatgcccgagggcctgacacctctggccacactgaagaacgaccagcagaggaggcagttgggtaaaagtcatcttaggagggcaatggcacatcacgaggaaagtgttcgggaagccagtctttgtaagaagctgcggagtattgaagtgcttcaaaaagtgttgtgtgctgcacaggagcgatcccgcttaacatatgctcagcaccaggaggaggatgacctgctcaacctcatcgatgcaccctcagttgtggcaaagaccgagcaggaggtggacatcatccttccccagtttagcaagctgaccgtcacagatttttttcagaagcttgggcctctcagtgtgttcagcgctaataaaagatggacaccacctcgctcaatacgtttcacggccgaagagggagacctgggctttacactgcgcggaaatgccccggtacaggttcactttctggacccatactgtagtgcctctgtagccggcgcgcgcgagggcgactatatcgtttccatccagttggtggattgtaagtggctgactcttagcgaagtgatgaaactgctaaagagctttggagaggacgagatcgaaatgaaagtcgtaagtctgctggactctacctcctcgatgcacaacaagagcgcgacttactcagtaggaatgcaaaagacgtacagcatgatatgtcttgcgatcgatgacgatgacaaaaccgataagacaaaaaaaattagtaagaaacttagttttctgtcttggggcactaacaagaatcggcagaaaagtgcctccactctctgtttgccaagtgtgggagccgctcggccgcaggtgaaaaaaaagctgccaagccccttctctctccttaactctgacagttcctggtattag

SEQ ID NO: 16101 - DNA, 2952 bp, synthetic construct
  source 1..2952: mol_type = other DNA; note = Synthetic coding sequence
atggccccaaggttgcagcttgaaaaggcagcctggcggtgggctgagactgtccgacctgaagaagtaagccaagagcacatagagacggcttaccggatctggttggagccatgcattagaggggtctgccggcgtaattgcaagggcaatcccaactgtctcgtggggataggagagcacatatggctcggagagatagacgagaatagtttccacaatattgacgaccccaattgcgagaggcggaagaagaatagcttcgtgggtctcacaaacctgggtgccacttgctatgtgaatacattcctgcaggtgtggttcctgaatctggaattaagacaggctctgtatctatgtccaagtacctgttctgattatatgttgggagatggcatccaggaggaaaaggattatgagccccagaccatctgcgagcatctgcagtatctttttgcactgttacagaattctaaccggaggtatattgacccgtccggcttcgtgaaggctctcgggttggacacgggccagcaacaggacgcacaggagttctcaaaattattcatgagcctgctggaagatacacttagtaagcaaaagaaccctgatgtgcgaaatattgtacagcagcagttttgcggcgaatacgcatacgttacggtctgcaatcaatgtgggcgggaatcgaaacttctgtccaagttctatgagctggagctcaatatccaggggcacaaacaactgacagactgcatctccgagtttctcaaagaggagaaattggaaggtgataatcggtacttctgcgagaattgtcagagtaagcaaaacgccacgagaaaaatccgattgctgagcctaccatgtacactcaatctccaactgatgagatttgtctttgatcggcaaactggtcataaaaaaaaattaaacacctacatcgggttctcagaaattctcgacatggaaccctatgttgagcataagggtggctcctatgtgtacgagctctccgccgtgcttattcatcggggcgtgtctgcctattctggccattatatagcccacgtcaaggatccacagagcggcgagtggtacaagtttaatgacgaggatattgaaaaaatggagggaaaaaaactgcagctgggcatcgaggaggacctggctgagccaagcaagagccagacccgtaagcctaaatgcggcaaaggcacccattgctcgcgcaatgcctacatgctcgtgtataggttgcagactcaggaaaaaccaaacacaaccgtgcaagttcccgcctttctgcaggagctagtggacagagacaatagcaaatttgaggaatggtgcatcgagatggccgagatgcgcaagcagtccgtggataaaggaaaagctaaacacgaagaggtgaaggaactgtatcaaagattgccagccggagctgagccatacgagtttgtaagtctggaatggcttcagaaatggctggatgagtctactcccactaaacctatcgataatcacgcctgtttgtgttcccatgacaagttgcaccctgataaaatttcaataatgaagcgtataagcgaatatgcagctgacatcttttatagcaggtatggtggcggaccccgcctaactgtgaaagctctttgcaaagagtgtgtcgtcgagcggtgcagaattctgcgcctgaaaaaccaattgaacgaagactacaagactgttaacaacttattgaaggccgcggtgaaggggtccgacgggttttgggttgggaagtcatctctgaggtcttggagacagttagcactagaacagcttgatgaacaggatggtgatgcagagcaaagtaatggtaagatgaatgggtcgactctgaacaaagacgagtcgaaggaagagcgcaaggaggaagaggaactgaacttcaatgaggatatcctatgtccgcacggtgaactgtgtatcagtgagaacgagagacgcctggtatctaaggaggcgtggtctaagctgcagcagtacttccccaaagcccctgagtttccttcctataaagagtgttgctctcagtgtaagatattggagcgcgagggggaagaaaatgaggcgctccataagatgattgcgaatgagcaaaagacctcactgcccaacttgtttcaagataagaatcgtccttgcctcagtaattggccagaggacaccgacgtactttatattgtaagccagtttttcgtggaggagtggcggaagttcgtgcgtaaaccgacacgctgcagccctgtcagtagcgtcggtaatagtgctctgctgtgtcctcacggaggcttaatgtttacatttgctagtatgaccaaggaggactcaaaactcattgccctgatttggccttctgaatggcagatgattcagaagttattcgtggtggaccatgtcatcaagataaccaggattgaagtaggagacgtgaacccgtcagagacgcagtatatctccgaacccaaactgtgcccagagtgcagagaggggctgttatgccaacagcagagagatctgcgggaatacacacaggctactatctacgtgcacaaggtggtggacaacaagaaggtgatgaaagactcagctcctgaactcaatgtctcaagctctgaaaccgaggaggacaaggaggaagcgaagcccgacggagagaaagatcccgatttcaaccaaatcatgcacgcattttctgtggccccatttgatcaaaacctctctatcgatggaaagatactttctgatgactgtgcaaccctgggcaccctaggagtgattcccgagtcagtgattctcctcaaggccgatgaaccaatcgcagactacgcagcaatggatgatgtaatgcaggtttgtatgcctgaggagggctttaaggggacaggactgctgggccactag

SEQ ID NO: 16102 - DNA, 738 bp, synthetic construct
  source 1..738: mol_type = other DNA; note = Synthetic coding sequence
atgtcggtgtgcagttctgatctgtcatatgggtcaagggtgtgtctcccaggctcatgtgatagttgttctgattcatggcaggtcgacgattgccccgagtcctgttgtgaacccccctgctgcgcacccgctccttgcctgagcttagtgtgtacaccggtgagtcgcgtgtcctctccctgttgccgggtgacctgtgaaccgtccccttgtcaaagtggttgtacaagcagctgcactccaagctgctgccagcagtcgtcttgccagcctgcttgttgcaccagcagtccctgccaacaagcttgctgcgtcccagtgtgttgcaagaccgtgtgctgtaaacccgtgtgctgtatgcccgtgtgttgtggaccatcctcttcttgctgccaacagtcctcctgccagccagcttgttgtatatcatccccttgccagcagagctgttgcgttcccgtttgctgcaagccaatttgctgtgtgccggtatgctccggtgccagctccctgtgttgccaacaatctagttgtcagccagcctgctgcacaacctcgtgttgtagacctagtagctcagtgtcattactgtgcaggcctgtctgccgtcccgcacggcgggtccccgtgccatcgtgttgtgtacccacttcctcatgtcagccatcgtgcggccgacttgccagctgtgggtccctgctctgtaggcccacctgctcacgcctagcttgttag

SEQ ID NO: 16103 - DNA, 1098 bp, synthetic construct
  source 1..1098: mol_type = other DNA; note = Synthetic coding sequence
atggccgcatccactatgagcgtctgttcatctgacttatcttacggtagtagggtctgcctccctggttcttgtgatagctgttcagattcctggcaggtagacgattgtccagagtcctgctgtgagccgccttgttgtgcccccgccccctgtctgagcctggtctgcacccctgtctcccgcgtgagcagcccttgctgtcccgtgacttgcgagccatccccctgccagtctggttgcacttcaagctgcacaccttcgtgctgccagcagagctcgtgtcagctggcttgctgcgcatcgagtccttgccaacaggcttgctgcgtgccggtgtgctgtaagacagtgtgttgcaagccggtatgttgtgtctcagtgtgctgtggcgactcttcttgttgccaacagtcctcctgccaatcagcgtgttgcacttcctccccctgccagcaggcatgttgcgtgccagtatgctgcaaaccggtatgttctggcatatcttcttcctgctgccaacagtcttcttgtgtctcatgcgtgagctcaccttgctgtcaggccgtttgtgaacccagtccttgccagtccggctgcacttcgagctgtactccttcctgttgccagcagagctcatgtcagcctacctgttgtacatccagtccgtgtcaacaggcttgttgcgtgcctgtctgctgtgtgcccgtctgctgcgtcccaacctgctctgaagatagtagctcatgctgtcagcagtcttcatgtcagccagcatgctgtaccagctcgccctgtcagcacgcctgctgtgtgcctgtctgttctggagcaagcacctcctgttgtcagcagtccagctgtcagccggcttgttgtaccgcctcctgctgccgccctagttcatccgtgagcctactgtgccacccagtctgcaaatcaacatgttgcgtcccggttcccagttgtggggcctcagcatcaagctgccagccttcttgttgtcggactgcttcctgtgtgagcctgctgtgtcgcccaatgtgttctcggccagcatgttacagcctttgtagcggtcagaagagctcatgctag

SEQ ID NO: 16104 - DNA, 816 bp, synthetic construct
  source 1..816: mol_type = other DNA; note = Synthetic coding sequence
atggccgcgtgtacgatgagcgtctgttcaagcgcatgttctgactcgtggcgggttgatgactgtcccgaaagttgttgtgaacccccttgcggcactgccccatgcctgaccctcgtctgcacccctgtgtcctgcgtctctagcccttgttgccaggccgcttgcgaacctagcccctgccagtccgggtgtacaagcagctgtacgcccagttgctgtcagcccgcctgctgtgcctcatctccgtgccagcaggcatgctgtgttccggtgtgctgcaaacccgtctgttgtttgcccacatgctccaaggactctagctcatgttgccagcaatctagctgccagcccacctgttgcgcttcttccagttgtcaacaatcatgttgcgttcccgtctgttgcaagcctgtgtgttgcgtgcccacttgcagcgaagactcaagttcatgttgccagcacagctcttgtcaaccaacttgctgtacctcctccccctgccagcagtcttgttacgtgcccgtgtgctgtaagcctgtttgcttcaagccaatttgctgcgtacctgtttgttctggggcctctacgtcctgttgccagcagtcctcttgccagcctgcttgttgcactacttcttgttgccgcccctcttctagcgtaagcctcttgtgcaggcccatctgccggccggcttgctgcgttcccattagctcatgctgtgcccccgcctcttcatatcaggcctcctgttgccgcccagcgtcctgcgtctctctgctttgcaggcctgcctgctcccgcttagcatgttag

SEQ ID NO: 16105 - DNA, 1206 bp, synthetic construct
  source 1..1206: mol_type = other DNA; note = Synthetic coding sequence
atgagcgtatgctcaagcgacttatcgtactcttcgcgcgtatgcttgcccggctcctgcgattcatgtagtgactcttggcaggtcgacgattgccccgagagttgctgcgagcccccatgttgcgcccccagttgttgtgcccccgccccttgtctgagcctggtatgtacacctgtcagtagggtttcttcaccttgttgccctgttacctgtgagccgtctccctgtcagagtgggtgtacctccagctgtactccctcatgctgtcagcagagctcatgccagctcgcttgttgtgctagtagcccctgccagcaggcctgctgcgtaccggtgtgttgcaaaaccgtctgctgcaaacccgtgtgctgtgtaccggtgtgttgcggggattccagctgctgtcaacagtcgtcctgtcaatctgcgtgctgcaccagcagcccttgccagcaggcctgctgtgtgcccatatgctgtaaaccagtgtgctcaggtatttcatcatcttgctgccagcagtcttcatgtgtgagctgtgtgtccagcccctgttgtcaagccgtatgcgagccaagcccttgtcagagcggttgtataagttcttgcacgcctagctgctgccaacagagcagctgtcagcctgcctgttgtacaagcagctcctgccaacaggcctgctgtgtgcccgtgtgttgtaagacagtgtgctgcaaacccgtgtgttctgaggattcctccagctgctgccagcaatcttcttgtcagcctgcttgctgcaccagtagtccctgtcagcaggcgtgttgtgtccccgtgtgttgcaagcctgtatgctgtaaaccggtagggtcggtgccaatatgctctggggcgagctctctttgttgccagcagtcaagctgccaacctgcctgttgcacttctagccagtcgcagcagggctgttgcgtaccggtatgctgcaaacctgtgagctgtgtgcccgtgtgctcaggagcgtcgtcctcttgttgccaacagtcatcttgccagcccgcgtgctgcactacatcatgctgccggcccagcagctcagtgagccttctgtgccggccggtatgccgacctgcctgctgcgtccctgtgccttcttgttgcgcacccaccagttcctgccaacctagctgctgtcggcctgccagttgtgttagtttgctgtag

SEQ ID NO: 16106 - DNA, 849 bp, synthetic construct
  source 1..849: mol_type = other DNA; note = Synthetic coding sequence
atggcagcctccactatgtccgtgtgttcgtccgcatgttccgacagctggcaggtggacgcatgcccagagagctgctgcgaacctcactgttgcgctttaagttgctgcgctcccgcaccttgcctgactctcgtctgcacccccgtcagccgggtttcgagtccctgctgtcaggccgcttgcgaaccatctccctgtcagtctggctgtactagcagctgtacacctagctgttgccagcagagctcttgtcagcctgcatgctgcacatcctctccttgtcagcaggcttgttgtgtgcctgtgtgctgcaagcctgtgtgttgtctccccacctgctccaaagattcttcgtcatgctgccaacagtccagttgccagcccacgtgttgtgcctcctccagctcgcagcagagttgttgcgtgcctgtttgctgtaagcccgtgtgttatgttccgacgtgtagtgaagactcatcgtcttgttgccagcaaagttcttgccaccccgcctgctgtacttctagcccttgtcaacaggcctgctgtgtgcctgtgcgatgcaaacctgtatgctgtaagccaatctgctgcgtccctgtgtgtagtggcgcatctacttcatgctgtcaacagtcatcatgtcaaccagcctgctgtacaacgagctgctgccggcccagctcatccgtatctctgctgtgtaggcccgtctgccggcccgcctgctgcatgcctgttagctcttgctgtgctccggcttctagctgtcaggctagctgctgcagacccgcctcttgcgtctccttgctgtgccgcccagcctgctcccgccccgcttgctag

SEQ ID NO: 16107 - DNA, 891 bp, synthetic construct
  source 1..891: mol_type = other DNA; note = Synthetic coding sequence
atggcatccagcccactcccggggcctaacgacatactccttgcctcaccctcttctgcatttcagccagatacactctctcagccccgcccaggacatgcaaaccttaagcctaatcaagtgggccaggtgatcctttatggtattcccattgtgtctctggtcatagatgggcaggaacgactttgcctggctcagatcagcaacacacttctgaaaaacttcagctataatgaaatccacaatcggagggtggcactaggaatcacctgcgtccagtgtacaccggtacagcttgaaatcctgcgccgagctggggctatgcccatcagctcaagaaggtgcgggatgattactaagcgggaagctgaacggttgtgcaagtcgttcctgggcgagaacagaccaccaaaacttcctgataactttgcattcgatgtgagtcatgaatgtgcctggggttgcagggggagcttcatccccgctagatacaactctagtagggccaagtgtattaagtgctcttactgtaatatgtacttttctccgaacaaattcatcttccactcacacaggacgcctgatgccaagtatacccaacccgacgccgccaactttaattcctggcgcagacatctcaagcttacagataagtccccacaggatgagctcgtttttgcttgggaggacgtgaaagctatgtttaatgggggatctaggaaacgtgcactccctcagcccggtgcgcatcctgcctgtcacccgttatcctccattcgcacccggtctatcgccttttctagccaaacactgatgctgcttgaagagattttcggcgaaaaggatcaggaggattacatgcggattaatgaggacaacatttggctgtag

SEQ ID NO: 16108 - DNA, 5346 bp, synthetic construct
  source 1..5346: mol_type = other DNA; note = Synthetic coding sequence
gttaagaaaatccatcgtcatcgccttagtccagccacggagaagggcgcagcatcctccggggaaggcgacaaggatcccccccctcccgctcatgaggatatcgctgtgaaaggaaccgctactgccgccggcacaggacccggtaccggcgcagcagctgccgctgcggccgcagtgcctcccccgcatccagcggcagcagccgctgcggccgctgcagccgccgccgcggccgctgcagcagtcccaccacctcacccaaacattcgcgcactgcagactcaagctccccagcagattccacggggtcctgtgcagcagcccctcgaggacagaattttcacccctgctgtgagtgccgtatatagcactgttacccaggtggccaggcaacctggcacccccaccccctcgccttacagtgcgcacgagataaacaagggccaccccaacctggccgccaccccacccggccacgcatcaagccctggcctcagccaaactccttacccatcaggacagaacgccggacctacaacactcgtgtaccctcagacgccgcagaccatgaactcacagccgcagaccagatccccggtgatcttcagcccatctcaattttttcaacgccctcagattcagccgccaagggccactatcccaaacagcagtccgagcattcgtcccggtgcccagacgccaacggctgtttaccaggccaaccagcatataatgatggttaaccatcttcccatgccctaccctgttccacagggccctcagtattgcataccgcagtacagacactctggcccaccttacgttggaccaccccagcaataccccgtgcagccacccgggcccgggccgttctatcccggacccggccccggtgatttcccaaatgcttacggtactcccttttatccttcacaacctgtgtaccagagcgctcctatcattgtgccaacacagcagcagccccctccagctaaacgagagaagaagaccatcaggatccgcgatcccaaccagggaggtaaggatatcacggaagaaatcatgtctggagggggcagtagaaatcccaccccccccatcggtcgtccaaccagcactccgactcccccacagttgccatctcaggtgccagagcatagccccgtcgtctacggtactgttgagtcagcccatcttgccgccagcacgcctgttactgcagctagcgatcaaaagcaggaggagaaacccaaaccagatcctgtgctgaagtctcctagtccagtgttgcgattagtcctgagcggggagaagaaggagcaggaggggcaaacctcagagacaactgctatagtgagtatcgccgagctgcccctccccccaagccccaccacagtgtccagcgtcgcaaggtcaaccatcgccgctcccacatccagtgccctctcttcacagccgatatttaccacggcgatcgatgatcggtgtgaattgagcagcccgcgagaagacaccatacctatccccagcctcacatcctgcacagaaacgagtgatcccttgcctaccaatgagaacgacgatgacatctgcaagaaaccatgtagcgtggcacccaatgatatcccgctggtcagtagcacaaatctgatcaacgagataaatggcgtctctgaaaaactgtcagcaaccgagtccattgtggaaattgtaaaacaggaggtgctacctctgactctggagctcgaaattttagagaacccgcctgaagagatgaagctggagtgcattcccgcaccgatcaccccctcgacagtgccttcattccctccgacacctccaactccccccgcgagccctccccatacaccagtgatagtgccagccgcagccacgacagtaagcagcccgtccgcggcaataacagtgcagagagtgctggaggaagacgagtctatcagaacttgtctgtctgaagatgcaaaggagatacaaaacaagatcgaggtcgaagccgacggccagactgaggagattcttgatagccagaatctgaattcccgccgctccccggtgcctgcacagatcgcaattacggtcccaaagacctggaaaaaaccaaaagaccgcactcgcacaaccgaagaaatgttggaggctgagctcgagcttaaagctgaagaggaactgagcatagacaaggtcctagagagtgaacaggacaaaatgtcccagggcttccatccggaaagagacccctccgatctcaagaaagttaaggctgttgaagagaacggcgaggaggccgaacctgtgcgaaacggagcagagagtgtgtctgaaggcgagggcatagacgctaactcaggctcaaccgatagcagcggcgatggcgtgaccttcccctttaaaccagaatcttggaagcccaccgacacagaaggcaaaaaacagtacgacagagagttcctgttggactttcaatttatgccagcatgcatccaaaaacccgaggggctgccgccgatcagtgatgtcgtattagacaaaattaaccagcctaagctcccgatgcgcaccctggacccaaggatcctaccgagaggccccgattttacacctgcctttgccgatttcgggagacagacacctggtggaagaggggtaccccttctaaatgtagggagcaggcgtagccagcccggccagagacgtgagcccaggaaaatcattacagtttcagtgaaagaggacgtgcacctgaaaaaagcggagaatgcgtggaagccctcacagaaacgagactctcaagccgacgatccggagaacattaaaacgcaggagctgttcaggaaagtgcggtccatcctgaataaacttacacctcagatgtttaatcaactgatgaaacaggtttctggcttgaccgtggacactgaggaacggctgaagggcgtgatagacctcgtgtttgaaaaagcaattgacgagcccagcttcagtgtagcctatgccaacatgtgccggtgtctggtgactctaaaagtccctatggcagataagcctggtaatactgttaattttcgcaagctgctactgaataggtgccagaaggagttcgaaaaggataaggccgatgacgatgtgttcgagaaaaagcagaaggagctggaagctgcctcagcacctgaggagcgcactagactccatgatgaacttgaagaggcgaaggacaaagcccgcagacgctcaataggcaacatcaaatttatcggcgagctgtttaaactcaagatgttgaccgaggccattatgcacgactgcgtggtaaaactcctaaaaaatcatgacgaggaatcattggagtgtctttgccggcttctcactacaatcggcaaggacctggacttcgaaaaagctaagccacgaatggaccagtattttaatcagatggaaaagatagtcaaagagcgaaagactagttcacgcatacgatttatgctgcaggacgtaattgatctacgcctgtgcaactgggtttctcgcagagcagaccagggaccaaaaaccatcgagcagatccacaaggaagctaagatcgaagagcaggaggaacagagaaaggtgcagcagttaatgaccaaggagaaacgacgacccggcgtgcagagagtcgacgaaggcgggtggaatactgtgcagggagccaaaaactcccgagtgctggacccatccaaattcctgaagatcacaaaacccacaatagatgaaaagatacagttagtaccaaaagcgcaactcggatcttggggtaaaggctcctccgggggcgctaaagctagcgaaacggatgccctccgctccagcgccagctctttaaatagattctccgccctgcaacctccagcccctagcggaagcactccttccactcccgtcgaattcgactcacgccgcactttaacgtctcgcggctccatgggccgagagaagaacgacaagcccctaccctccgccacagccagaccaaatacgtttatgcgggggggctctagcaaagatcttctggacaaccaaagtcaagaggaacagcgccgcgaaatgctggagaccgtgaaacagctcacggggggtgtcgatgtggagaggaattcgacagaggctgagcgtaataaaacaagggaatctgccaaacctgagatcagcgctatgagcgcacatgataaggcagcgctgtctgaggaagagctcgagcggaaaagcaaatccattatagatgaattcctgcatataaacgacttcaaggaagccatgcagtgtgtggaagaactcaatgctcagggcctccttcatgtgtttgtgagggtgggagttgagagcaccctagaacgttctcaaataacacgtgaccatatgggacagctgctctaccaactggtgcaatcagaaaagctatcaaagcaggactttttcaagggatttagcgagacactcgagcttgccgacgacatggctatagacatacctcatatctggctgtatctcgcggaactagtgacacctatgttgaaggagggtggcatctccatgcgcgagctgaccattgagttctctaagcctctcctgcccgttggccgtgccggtgtactcctcagcgagattttacacctcctgtgcaagcagatgtcacataagaaagtgggagcattatggcgcgaggccgatttgagctggaaggactttctgccagaaggcgaagatgtgcataatttcttgcttgagcagaagttagacttcatcgagtcagattccccctgttcttccgaagccctctctaagaaggagctgagcgccgaagagctgtacaagcgtctggaaaagctcatcatcgaggataaggccaacgacgagcaaatctttgattgggtggaggcaaatctcgacgagatccaaatgagttcccctaccttcttgagggccttgatgactgcagtgtgtaaagcagccattattgccgattcttctacctttagagtcgacactgccgtgatcaagcaacgagtacctattctcctgaagtatttggactcggatacagagaaggagcttcaggctctgtacgccttgcaggctagtatcgtaaagctggatcagccagctaatctgctccgcatgtttttcgattgcttgtatgatgaagaggttatttctgaagacgccttttacaagtgggaaagctccaaagatccagctgagcagaacgggaagggggtggctcttaaatcagtgacagccttttttacctggctgcgggaggctgaggaagaatccgaggataactag

SEQ ID NO: 16109 - DNA, 4758 bp, synthetic construct
  source 1..4758: mol_type = other DNA; note = Synthetic coding sequence
atgaattctcagccccaaacacggtcacccttttttcaaaggccacaaattcagccgccgagagcgactattcccaattccagcccatctataaggcctggagcccagacccccactgcagtttatcaggcgaaccaacatatcatgatggtgaatcacctccccatgccttatccagtgcctcagggcccgcagtactgcatccctcaataccgccactcaggccctccctacgttgggccaccgcaacagtatccagttcagccccctggacctggtccattttaccccggccccgggccaggagattttcctaacgcctatggcacccccttctatccatctcagcctgtgtatcagagcgcacccatcatcgtacctacacagcaacagccacctccggccaagcgggaaaaaaaaactattcgcataagggaccctaatcagggggggaaagacattaccgaggagatcatgtccggaggcggttctcgaaacccaacccctcctattgggaggcctaccagcacgcccaccccccctcagcagctaccgtctcaagtccctgagcatagtcccgtagtgtatggcacggtggagtcagctcatctcgccgcttccacacccgtaacggccgcgtcagatcaaaaacaggaggagaaacccaagccagacccagtgctgaaatcaccatccccagttctgcgcctggtcctgagtggggagaaaaaggaacaggagggacagacatctgaaaccaccgcgatcgtgagtatagctgagctaccgctcccaccctcccccactacagtgagctcggtcgccagaagtaccattgccgcaccaacatcctccgcgctgagttctcagcctatctttacgacagcaatcgatgacaggtgcgagctttcttctccacgggaggacacaattcccataccttctttgacctcttgcaccgagacctccgatcccctccccacgaacgagaatgacgacgatatttgcaaaaaaccttgcagtgtcgcccccaatgacattcccttagtgagctctacaaatctgattaacgagataaacggggtctccgagaagttgagcgcaactgaatctatcgtggagatcgtcaagcaggaggtcctgccgctgacgcttgagctggagatcctcgaaaatccgcccgaggaaatgaaactagagtgcatacccgcacccatcactccttccacagttccatccttcccccctaccccccccacaccaccagcatcgcctcctcacacacccgtgatagttcccgcagctgcgaccacggtgagctcaccatctgccgcaataacagtgcagcgggtcctggaagaggacgagtctataaggacctgcctctcggaggacgctaaggaaatccagaacaagatcgaagtggaggccgacggtcaaaccgaggagattctggacagccagaacctcaactctagacgttcaccggtgcccgctcagattgctatcacagttcccaagacttggaaaaagcctaaagacagaactagaactaccgaggaaatgctagaggctgaattggagctcaaggctgaggaagagctgtccattgacaaggtgctagagagcgaacaggataagatgtctcaggggttccatcccgagcgtgatccatctgacttaaaaaaggtgaaagcagtggaagagaacggtgaggaggctgaacccgtgcgcaacggtgccgagagcgtgtcagaaggcgaagggatcgatgcgaattctgggagtacggatagctccggagatggcgtgactttcccatttaagcctgagtcttggaaacccactgatacagaagggaagaaacagtacgacagggaattcctgctcgattttcaatttatgcccgcttgcatccagaaacctgaagggttgccccccatcagcgacgttgtgctggataagattaaccaacccaaactgccaatgcgtactctggacccaagaatcctgccaaggggccccgactttactcccgcctttgccgatttcggcagacaaaccccaggcggaaggggggttcctctgctgaatgtgggctctcgccgaagccaaccaggacagcgcagggaacctagaaaaatcataacggtttcagtaaaggaagatgtccatctcaagaaggcagaaaatgcctggaagccatcccaaaagagggacagtcaagctgatgaccctgaaaacattaagacccaggaactgtttagaaaggttcgcagcattctcaacaaactgacaccacagatgttcaatcagctgatgaagcaggtgagcggcttaacagtcgataccgaggaacgcctgaaaggggtcatcgatttggtgtttgaaaaggctatcgacgaaccgagcttctctgtagcatacgctaacatgtgtcggtgtctggtcactttaaaagtgccaatggcggacaagccaggcaatactgttaactttagaaaactgctgctcaacaggtgtcagaaggaattcgaaaaagacaaggctgatgacgacgtcttcgagaaaaaacagaaagaattggaggccgcgtctgctcctgaagagaggaccaggctccatgacgagctggaagaagctaaggataaagcccgacggagatctatcgggaacatcaagttcatcggggagctgttcaagttaaaaatgctcacggaggccattatgcacgattgcgtggttaaattgttaaagaaccacgacgaggagtctctggagtgcctctgtagactcttaactactattggcaaggatctggactttgagaaagctaaacctcgaatggatcagtactttaaccagatggaaaagattgtgaaagaacgaaagaccagctcccggattaggtttatgctacaggacgtgatagatctgcggctttgtaactgggtaagccggcgcgccgaccaggggcccaagaccattgaacaaatccacaaggaggctaaaattgaggaacaagaggaacaacggaaagtgcaacagctgatgaccaaggaaaagcgcaggccaggcgtgcagagggttgatgaagggggatggaacaccgttcagggtgcaaaaaacagccgagtgcttgacccctctaaatttctcaagattaccaaaccaacgattgacgagaaaatccagctggtgcctaaagcacagctcggaagttgggggaagggtagctctggcggtgctaaggcctccgagacagacgcattgcgcagttcagcgtcttccctcaaccgctttagtgcgctgcagcccccagccccctctggctccactcctagtacccctgttgaatttgacagtcgcagaacacttacatccagagggtcaatgggacgggaaaagaatgacaagccgctgccctctgctacagcccgtcccaacacatttatgcgaggcgggtcctccaaggatttattggacaaccagtcacaagaggagcagcggcgcgagatgctggaaacagtaaaacaactaactgggggtgtcgacgtagaacgtaattcaaccgaagccgagcgaaataagacccgtgaaagtgcaaaaccagaaatttctgctatgagtgcccacgacaaggcagccctgtcagaagaagagctcgaacggaaatctaaatccataatcgatgaattcctacacattaatgactttaaggaggcaatgcagtgcgtagaggagttgaacgcgcagggtctactgcacgtgttcgtgcgggttggcgtagagtctaccttagaacggagccaaatcacccgggatcacatgggccaacttctctatcaactggtgcagtctgagaaacttagtaagcaagattttttcaagggattctccgagacgctcgaactggccgatgacatggccattgatattcctcatatatggctctacctggcggagctggtgacccctatgctcaaggaaggtggcatttcaatgcgagaactcactattgagttctctaagccactcctgcctgtcggaagggctggagtactgctttcagaaattctgcacctgctgtgtaagcaaatgtctcataaaaaggttggtgccttgtggagggaggccgatctgtcctggaaagacttcctaccggaaggggaagatgtgcataatttcctacttgagcagaagctcgactttattgaatctgactccccctgcagcagcgaggctctctccaagaaagaactgtcagcggaagagctgtacaaacgtctcgaaaagctgatcatagaagacaaggcaaatgatgaacagattttcgattgggtcgaggctaaccttgatgagattcagatgagttcgccaacgtttctccgggctcttatgacagccgtatgtaaagcagctataatagcagacagctcgacgtttcgggtcgatactgccgtgataaagcagcgtgtacctattctgctcaagtaccttgattccgataccgagaaggaattacaggccctttatgcgctacaggcctccatcgtgaagcttgatcaacctgcgaacctgcttagaatgttttttgattgtctgtacgatgaagaggtgattagcgaggatgccttctacaagtgggagtcttctaaggatcccgccgaacagaatgggaagggagtggctcttaagtcagttaccgcttttttcacgtggctacgggaagctgaagaagagtctgaagacaattag

SEQ ID NO: 16110 - DNA, 3087 bp, synthetic construct
  source 1..3087: mol_type = other DNA; note = Synthetic coding sequence
atggcctctgaagctgtcaaggtggttgtgcggtgccgcccgatgaatcagcgcgaaagggaactcagatgtcaacccgtagtcacagtggactgcgctcgggctcagtgttgcattcaaaacccgggcgccgccgacgaacctccaaagcagttcacgttcgacggtgcctaccatgtcgatcatgtaacagagcagatatataatgaaattgcatacccgttggtcgagggcgtgactgaggggtacaacggcacaatcttcgcatacggtcagacggggagcggtaaatcttttacaatgcagggccttcctgaccctccctcacagcgaggcatcatccctcgggcatttgaacacgtgtttgagtccgtgcaatgtgctgagaacacaaagttcctggtccgagctagttacctggagatctacaacgaggacgtgagggacctgctcggagcggacacgaaacaaaaacttgaattgaaagagcaccccgagaagggtgtgtatgtgaaaggactctctatgcatacggtgcattcagtggctcagtgcgagcatattatggagactggatggaagaacagatcagttgggtacactctcatgaacaaggactcaagcagaagccattccatctttaccatcagtatagagatgtccgccgtagacgaacgcgggaaggaccacttgcgtgcaggtaagttgaacctggtggacctcgctggctctgagcgccagtctaagactggggcaactggagagagactgaaggaggccactaaaatcaatctaagcctcagcgctcttgggaacgttattagcgcgctcgtggacggccgctgcaaacatgtgccctacagagattcgaagctgacgaggctgcttcaggacagccttggaggaaatacgaaaaccctgatggtcgcatgcctgagccctgctgacaacaattatgatgagactttgtccactctgaggtacgccaatcgagcaaaaaatatacggaacaagccaagaattaatgaggacccaaaggacgcactactcagggaataccaggaggaaattaaaaagttaaaggctatcttgacccagcagatgagcccctccagtttgagcgcactgctgagtagacaggtccctcccgatccagtgcaggtggaggagaagctcttaccacaaccggtcattcagcacgatgtggaagcagaaaagcagctgattagagaagagtatgaggaacgtctcgccaggcttaaggctgattataaggctgaacaggaaagcagagctcgactcgaggaggacattactgctatgagaaatagttatgatgtgcgcctttcaactctggaggaaaacctgcgcaaagaaacggaagccgtcctacaggtgggggtgctttacaaagcagaagtaatgtccagggctgaattcgcaagcagtgctgagtacccccctgcattccagtacgaaactgtggtgaagcctaaggtgtttagcaccacagatacactcccgagcgacgacgtgtcaaagacccaggtatccagtcgttttgcagaactgcccaaagtggagccctccaagtctgaaataagtctggggagcagcgagtcctcatccctagaagagacttccgtctcagaggcgttcccaggccccgaggagccctcaaatgtggaagtgtcaatgcctactgaggaatctcggagtcggtactttctggatgagtgcctgggccaggaggcagcagggcacttgctgggagagcagaactatctgccacaggaggagccccaagaagtgccacttcagggactcttgggccttcaggatccatttgctgaggtggaagctaagcttgcccgcctttcatccactgttgcaaggacagatgccccacaggccgacgttccaaaagtgccggtgcaggtgcctgcacccactgatttgcttgagccttccgatgcaagacccgaagcagaagccgccgatgatttccctccccggcccgaggtggacctggctagcgaagtggctctggaagtggtgcggacagccgagccaggcgtatggctggaagcccaagccccagtagcgctcgtcgctcagcccgagccactgcccgccacggccggggttaagcgtgaatcagtgggaatggaggtggctgtgttgaccgatgacccgcttccagtcgtggaccaacagcaagtgctagcccgtctgcagctcctggagcagcaggttgtaggcggagaacaggccaagaacaaagacctgaaggagaagcacaagagaaggaagaggtacgctgatgagcgcagaaagcaactggtcgctgctttacagaactcagatgaagatagcggcgactgggtgctgctgaatgtgtacgatagcattcaggaggaggtcagggcaaagtcaaagcttctggagaagatgcagagaaaattgcgggccgccgaggtggagataaaggatctgcagtcagaatttcagttagagaagatcgactatctggctacaattaggagacaagagagggatagcatgttgctgcaacagctgttggaacaagtgcagccactcattaggagagactgcaattacagtaacctagagaaaatcctcagggagtcttgctgggatgaagacaacggtttctggaagattcctcaccctgtgattaccaagacatccctgccagtggtctcgaccggtccacagaataaaccggcccgaaaaaccagtgccgccgataacggagagcccaatatggaggacgatcgatatcgactcatgctgtcgcgctcgaattcagaaaacatcgcatcaaactatttcaggagcaagagggcgagccagattctgagcaccgatgcacggaagtccctgacacaccataacagcccacccggcctaagttgtcctttgagcaataactcagccattccaccgactcaggcccccgaaatgccccagcctcgcccatttcggctggagtctctggacatcccgttcaccaaagccaagaggaagaagagtaaatctaactttggcagcgagccactgtag

SEQ ID NO: 16111 - DNA, 921 bp, synthetic construct
  source 1..921: mol_type = other DNA; note = Synthetic coding sequence
atgcggcagcatgatacacgaaacggtcgtattgtgctcatcagtgggcgccgctctttctgtagcattttcagtgtcctcccctatcgcgattccactcaagtgggcgacctgaagctggacgggggccggcagtcaactggcgccgtgtcactcaaagagatcatagggcttgagggggtggaattgggagccgatggtaaaactgtcagttacactcaatttctgctccctacgaatgcttttggtgccagaagaaataccatcgactcgactagttcgttttcacagttcaggaatctctctcataggagtctctcaattggccgggcaagtggaacacagggctcacttgacacaggttctgacctaggcgactttatggattatgacccaaatctgctcgatgacccacagtggccatgtggcaagcacaagcgggtgcttattttcccctcatacatgactactgtcatcgactatgtgaagccatccgatttaaaaaaagacatgaatgagacctttaaggaaaaattcccccacatcaagctgaccctgtccaaaattcgttcactgaagcgtgaaatgcgcaagttagcgcaagaagattgcggcttggaggaaccaactgtggctatggcattcgtatactttgagaagctcgctctgaagggcaaactcaacaagcagaatagaaaactatgtgccggagcttgcgtgctgcttgcagccaagatcgggtcggacctgaaaaaacatgaggttaaacacctaatcgacaaactggaggagaaattcaggctgaacagacgcgaactgatcgcattcgaattccccgtcctggtcgccctcgagttcgccctgcaccttcctgagcatgaggtgatgccacattacaggagactggtgcagtcatcctag

SEQ ID NO: 16112 - DNA, 2820 bp, synthetic construct
  source 1..2820: mol_type = other DNA; note = Synthetic coding sequence
atggcagcgcagccaccgcgtggtatcagattgagtgcactgtgccctaagtttctccacacaaacagcacctcccacacgtggccattttccgctgtcgccgagctgatcgacaacgcatacgaccctgacgtcaatgccaaacagatatggatcgataagacagtgattaacgatcacatctgtttgactttcactgacaacgggaacggaatgacatctgataaattacataagatgctctcctttggattctctgacaaggtcacaatgaatggccacgtgcctgtgggcctgtatggaaatggatttaagtccgggagcatgcgcctgggaaaggacgcaattgtgttcactaagaacggcgagagcatgtcagtgggcctgctcagccagacatacctcgaagtcattaaagcagagcacgttgttgttccgatagtggcttttaataaacaccgacagatgataaatctagcagaatcgaaggcctcgctggcagccatcctggaacatagcctcttctccaccgagcagaagctgctggccgagctagacgccatcataggaaagaagggcacccgcattattatatggaacctcaggtcatacaagaatgccaccgagtttgatttcgaaaaagacaagtatgatatacggatacctgaagacttggacgagatcacaggtaagaagggttataagaaacaggagcggatggaccagatcgcccccgagagcgactatagcttgcgcgcatactgcagtatcctgtacctgaaaccaaggatgcagatcattctgcgtggacaaaaggttaagacacagttggtcagtaagagcctggcctatattgaaagggacgtgtaccgtccgaaattcctgagcaaaacagtacggatcacctttggcttcaactgtagaaataaagaccactatggcattatgatgtaccatagaaatcggctgattaaggcttacgaaaaggtgggctgtcagctcagggctaacaatatgggcgtaggtgtcgtgggaattatcgagtgcaattttctcaagcctacacacaataagcaggactttgactatacaaacgagtatcggctcactatcaccgcattgggggagaagcttaacgactactggaatgagatgaaagtcaaaaaaaacacggagtaccccctaaatctgcctgtagaagacatacagaaaagacctgaccagacatgggtccagtgcgatgcatgcttaaagtggaggaaacttccagacggaatggaccagctgcctgaaaaatggtattgtagtaacaatcctgatccacaattccggaactgcgaagtgccggaggagccggaagatgaggacctggtccaccctacgtatgaaaagacctacaagaaaactaataaggagaagttccgcatccggcagccagagatgatcccacgaataaatgctgagctgctgttcagacccacagccctgtctacaccctctttttcctctccaaaagaaagcgtacctcgaaggcacctgtctgagggcaccaattcatacgccaccaggctgctgaacaatcatcaagtgcccccacagtccgaaccagagagcaattcacttaagcgaaggttgtctactcgaagctccatcctaaatgctaagaacagaagattgagctcccagttcgaaaacagtgtttacaagggggacgatgatgatgaagacgttataatccttgaggagaactccactccaaagcccgccgtggatcatgacatagatatgaagagtgagcaatcacacgtggaacagggcggagtccaagtggagttcgtgggcgactctgaaccatgtggccagacaggcagtacctcaacttccagcagccgctgtgatcaaggcaacaccgcagctacacagacagaggtaccgtctctggtggtcaagaaggaagaaacagtcgaggatgaaatagatgtgagaaacgatgccgtgattttgccatcttgtgtggaagccgaagcaaaaatccacgaaacccaggagacaactgataagtctgccgacgacgcaggatgtcaactacaggagctgcgtaaccagctgctgctcgtcacagaagaaaaagagaattacaaaagacagtgccatatgttcactgatcagataaaggtcctccagcagcgtattctggagatgaacgacaaatacgtgaagaaggagacttgtcatcagagcaccgagactgacgccgtgttcctgctcgagagtattaatggcaaaagcgagagcccagaccatatggtgagccaatatcagcaggccctggaagagatcgagagacttaagaaacagtgctctgctctgcagcacgtgaaagccgaatgctcgcagtgttccaataacgaatctaaatcggagatggacgagatggctgtacagcttgatgatgtgttcaggcaactggacaaatgtagtatcgaaagagatcagtataaatctgaggtcgaactcctcgagatggagaaaagccagatacggtctcaatgcgaggagttgaaaaccgaggttgagcagctgaaatcaactaaccagcagacagctacagatgtatccacctcctccaatatagaagagagtgtcaaccacatggacggtgagagcttgaagcttagatccctgagagttaatgttggacagctgctggctatgatcgttcctgacttggacctgcagcaggtgaactatgatgtggatgtagtggacgaaattttgggccaggttgtggagcagatgtccgagatatctagtacctag

SEQ ID NO: 16113 - DNA, 1149 bp, synthetic construct
  source 1..1149: mol_type = other DNA; note = Synthetic coding sequence
atgtccgcagcaaacccagaaactcctaattccacaatttcacgggaagcctccactcagagttcatctgccgccgcatcccagggctgggtcttgcctgagggcaaaattgtaccaaacaccgtgttcgtcggcggaatcgatgcacgtatggatgaaaccgaaatcggcagctgctttggccggtatggcagtgtaaaggaagttaaaatcattaccaaccgcacgggggtgtctaaaggctatggatttgtgtctttcgtcaacgacgtggatgttcaaaagatagtggggagtcagatccatttccatggaaaaaagctcaaactgggcccagctatccgcaagcagaagctgtgtgcaagacatgtgcaacctcgccccctagtggttaacccccctcctccaccacagttccagaatgtgtggcgcaacccaaatacagagacctacctgcagccacagattaccccaaatcccgttacacagcacgtgcaggcatacagtgcttatccacacagccctggccaagttattacagggtgccagctcctggtttacaactatcaggaataccccacatacccagactccgctttccaggtgacaactggataccaactcccagtgtataactatcagccatttcccgcctaccctcgcagtcctttccaggtgaccgctgggtatcaactgcccgtttacaactatcaggccttcccagcttacccaaattcgcccttccaggtggcaaccggatatcaattccccgtttataattaccagccattccccgcctatccatcctcgccatttcaggtgacagctggatatcagctgccagtttacaactatcaagcctttcctgcatatcctaactctccctttcaggttgcaacgggctatcagtttcctgtgtataattaccaagcgtttcctgcatatcccaattcccccgtccaggttactaccggatatcagctgcccgtgtacaattaccaggcatttcctgcttatcccaattctccattccaggtagcgacgggataccagttcccagtgtacaactatcaagccttccccgcctacccgaatagtcccgtacaagtcacaaccgggtaccagttgcctgtgtacaattaccagtag

SEQ ID NO: 16114 - DNA, 5058 bp, synthetic construct
  source 1..5058: mol_type = other DNA; note = Synthetic coding sequence
atgtccctgcctttctaccagcgctgccaccaacactatgacctctcttacagaaataaagatgtgaggtctactgtgtctcattatcagcgggagaagaaacgttctgccgtgtacacacaagggtcaacagcttacagctcacggtccagtgcagcccatcggagggaatcagaggcgttccggagagcctccgccagctcttcacagcagcaggcctcccagcatgcgctgagcagcgaggtttcccggaaagcggcatccgcctatgattatggcagctcacacggcttaactgactcctccctcttattagacgattattcctccaaactcagccccaagcccaaaagggctaaacactccctgttaagcggcgaagaaaaggaaaacttgcctagcgactacatggttcctatatttagcggtcgccagaagcatgtcagcggcatcacagataccgaggaggagcggatcaaagaggctgctgcctatattgcgcagcggaaccttctggccagcgaagaaggcatcaccaccagcaagcagtccaccgcgtccaagcaaacgaccgcatctaagcagtccactgcttctaaacagtctactgcaagcaagcagagcactgcaagccgccagtccaccgctagtaggcaatctgtagtgagcaagcaggctacttcagctctgcaacaagaagagacttctgaaaaaaagtcgaggaaggtagtcattagggagaaagcagagagactgagcttgcgaaagaccctcgaggagaccgagacctatcatgccaaactgaatgaggatcacctactccatgccccggagtttattattaagcctcgctctcacaccgtgtgggaaaaggagaacgtcaagttacactgttctatcgcaggttggccggaaccccgcgtgacatggtataagaaccaggtccccatcaatgtgcatgctaatcccggaaaatacatcatcgagtcacgctatggcatgcataccctggagataaacggctgcgacttcgaagatacagcccaatatagagcctcggccatgaacgtgaagggggagttgtctgcttatgcaagcgtggtcgtaaagaggtataagggtgagtttgatgagacccgattccacgcaggcgcttccactatgcccctatcttttggagtcactccctatggctacgcttcgcgctttgagatccacttcgatgacaagttcgatgtgtcattcgggcgggagggagagaccatgtccctcgggtgtagggtggtgatcactccagagatcaagcactttcagccagaaattcagtggtacagaaacggcgtgcctctatcaccttctaagtgggtgcagactctgtggtccggggaaagagccaccctgaccttctcacacttaaacaaagaggacgaggggttgtacaccatcagggtaagaatgggtgaatactatgagcagtatagcgcctacgtattcgtgcgagacgccgacgcagaaattgaaggcgctcccgcagctcctctggatgtgaagtgtctggaggccaacaaggattatattattatttcctggaagcagcctgccgttgatggaggtagccccattctgggatacttcatagacaagtgcgaggttggcaccgactcatggagccaatgcaacgacactcccgtgaaatttgccagatttcccgtcaccgggctcatcgaagggcggagctatatatttcgggtgcgagcagtcaacaaaatgggtattgggtttcccagtagggtgtccgaaccagtcgctgccctggatccagcagagaaggctcggctgaagagccgacccagcgccccctggacagggcagattatcgtaaccgaagaagaaccttcagagggcatcgtgcccggtccacctaccgatctgtcagtcaccgaggcaacacgatcctatgtcgtactctcttggaagccccctgggcagcgtggacacgagggaatcatgtacttcgttgagaaatgcgaggctggtacagagaactggcagagggtcaacaccgagctccccgtgaagagtccacgattcgccctctttgacctcgccgaaggaaaatcttactgttttcgcgtccggtgcagcaacagtgccggcgtgggagagccttctgaggctaccgaggtgactgtggtgggcgataaactggacattccaaaagcgccgggaaagattattccttcacggaatacagatactagtgtggtggtaagttgggaggagtcaaaggacgctaaggagctggtgggctattacattgaagcttctgtagcagggtcaggcaagtgggagccttgcaataacaatcccgtgaaaggatcacgcttcacttgccacgggctggtgaccgggcagtcttacatcttccgtgtgcgtgctgtcaacgctgctggcttgtctgaatactcccaggattcagaggccattgaggttaaagctgccattggcggaggtgtgagccctgatgtgtgccctgcactgtctgatgagcctgggggcctcacggcctctcgcggccgcgtgcatgaagcgtcccctcccaccttccagaaagacgcactgttgggaagcaagcctaacaaaccgtcactcccttcgagcagccagaacctgggccagacagaagtgagtaaggtgtccgagactgtgcaggaagaattgacacctcctccacagaaggctgctccccagggtaaatctaaaagtgacccactcaaaaaaaaaaccgatcgagctccaccttctcccccctgtgatatcacgtgtctagagagtttcagagacagcatggtgctgggatggaaacagcctgacaagatcggaggcgccgagattacgggttactatgtcaattaccgagaagttattgacggtgtgcctgggaaatggcgggaggccaacgtgaaagctgtctccgaggaggcatataagatctctaatttgaaagaaaatatggtctaccagttccaggtggccgctatgaacatggctgggctcggagcaccctccgccgtcagcgagtgtttcaagtgtgaggaatggaccatcgccgtgccagggccccctcactccttgaagtgctccgaggtacggaaagatagtcttgtactccagtggaagcctcccgtgcatagtggcaggacccccgtgactggctacttcgtggatttgaaggaagctaaagccaaagaagatcagtggcggggactgaacgaggctgccataaaaaatgtgtacctgaaagtcagaggtctcaaagagggagtcagttacgtcttccgggtgcgcgccataaatcaggccggcgtggggaaaccgtccgacctggctggacctgtagtggcggagaccaggccaggcactaaagaggttgttgtgaacgtggacgacgacggggtgatcagcctaaactttgagtgcgacaaaatgaccccaaagtccgagttttcctggtccaaggactacgtaagcaccgaggattctccccgtctggaagtcgagagtaaaggaaacaaaacaaaaatgacttttaaggatttagggatggacgacctagggatctacagttgtgacgtgacagacactgatgggattgcctcgtcttaccttattgacgaggaggaattgaaacgcctccttgcactctctcacgaacataagttccccacggtgccagtcaaatctgagcttgctgtagagatcttagagaaaggtcaggtgagattttggatgcaggcagaaaaattgagcgggaatgcaaaagtgaactatatcttcaatgagaaagaaatctttgaaggccctaagtataagatgcatatcgataggaacaccggtatcattgagatgtttatggaaaaactgcaggatgaggatgaagggacttacaccttccagctccaagacgggaaggctactaaccactctaccgttgtcctagtgggcgacgtgtttaaaaagcttcagaaggaagcggagttccaacggcaagagtggattaggaaacaaggacctcacttcgttgagtatctcagttgggaggtgaccggagaatgtaatgtgctacttaaatgtaaagtggcaaatataaagaaagaaacccacatagtgtggtacaaggatgagcgagagattagcgtcgacgagaaacacgacttcaaggatggtatatgtactttgcttattacagagttctctaagaaggacgccggaatctatgaggtgattctgaaggacgaccgtggcaaggacaagagcaggctgaagcttgtggacgaggcatttaaggaactcatgatggaggtgtgcaaaaagattgctctctccgctacagacttaaaaatccagtctaccgccgagggcatccaactatactcatttgtgacttactacgtggaggacctcaaagttaattggagccataacggctcggccataagatactctgatagagttaagaccggcgttacaggggagcagatatggttgcagattaacgaacccacgcccaacgacaagggaaaatacgtcatggagctgtttgacgggaagaccggtcatcagaagacagtcgatttgtcaggacaggcctatgacgaggcctacgccgaattccaacggttgaagaagagcctgctgttccaaaaggatagagcccgcgttctgggcggcctccccgacgtcgtcaccatccaggaaggaaaagccctgaatctgacatgtaatgtgtggggggacccaccgccagaggtgagctggcttaaaaacgagaaagctctggcaagcgatgaccactgcaaccttaagtttgaagcaggacggacggcatacttcacaatcaatggtgtgtcaaccgcagacagtggaaagtatggactcgtggtaaagaacaagtacgggagcgagacgtctgatttcactgtatcagtcttcatcccggaagaagaagccaggatggctgccctcgaaagcctgaaaggcgggaagaaggccaagtag

SEQ ID NO: 16115 - DNA, 3456 bp, synthetic construct
  source 1..3456: mol_type = other DNA; note = Synthetic coding sequence
atgatggccgcggccctcggcccccccgaagtcatcgcacagcttgagaatgctgcgaaggtgctaatggctcccccatcgatggttaataatgagcagcgccagcacgctgaacatatcttcctgtccttccgcaaaagtaagagcccattcgctgtttgtaagcatatcctggagaccagcaaagttgactacgtgctgttccaggctgcgaccgctatcatggaagccgtggttagagagtggattcttttggaaaagggttctatagaatcactgcgcacatttctccttacctatgtactccagagacctaatctgcagaagtacgttagggaacaaatcttgcttgcagtagctgtcatcgtgaagaggggcagtttggacaagtccatcgattgtaagtcaatttttcatgaagtgtcgcagttgatatcctccggaaacccaaccgtacaaaccctggcctgtagcattctcactgcccttttaagtgagtttagttcttctagcaagacctccaacataggactgagtatggagtttcacgggaattgtaagcgggtgtttcaggaggaagacttacgtcaaatcttcatgctgacagtggaagtactccaggagtttagcagacgggagaatctgaacgctcagatgagcagtgtattccaacgctatctggcccttgccaatcaggtgctgagttggaattttctcccccccaaactgggccgccattacatcgcgatgttcgaatcgtcccagaatgtcttgctaaaaccaactgagtcctggagagaaaccctcctggattcaagagtgatggagctcttctttactgtgcaccgcaagataagggaagacagtgatatggcacaggatagtctacagtgcttggcgcagttggcctccctgcatggacccatctttcctgatgaagggagtcaggtcgactacctggctcacttcatcgaagggttgctcaataccattaacgggattgagatcgaggactcggaggccgttgggatatcaagtattatcagcaatttgatcacagtcttccctcggaacgttctgaccgccataccttccgaattattttcttcctttgtgaattgcctaacgcacctgacctgttctttcggccgctctgccgccctggaggaggtgctggataaagacgacatggtctatatggaagcttacgataaattacttgaaagttggttaactctagtccaagacgataagcattttcacaaaggctttttcacccagcatgctgtacaagtttttaactcatatattcagtgtcacttggccgcccctgatggaactagaaacctgacagctaacggcgtcgcatcaagagaggaggaagagattagtgagctccaggaagacgaccgggatcagttctccgaccagctggctagtgtcggcatgttaggcaggatcgcagccgaacattgcatcccactgttgacatcactgctcgaggaacgcgtcactagattacacggccagctccagagacaccaacagcagctgcttgcatctccggggtctagcaccgtggacaataaaatgctggacgatctctatgaagacatacactggctgattctcgttacaggataccttttggccgacgacacacagggggaaacgcctttaattcctccagaaattatggaatactccatcaaacactctagcgaggtggatatcaatacgacattgcagattttgggaagcccgggggagaaggccagcagcattccggggtataatcggactgactctgtgatcaggctgctttcagccattttgagggtttcggaggtggaatccagggcaattcgggcagacctaacgcacctcctgtcaccacaaatgggaaaagacatcgtctggttcctgaaaaggtgggccaagacgtacctcttagtcgacgagaagctgtatgaccaaatctccctgcccttttccaccgcattcggggccgacactgaaggatcccaatggatcataggatatcttcttcagaaggtgatctccaatctgtccgtgtggtcttcagagcaggatctagctaacgacaccgttcagctgctggtaacactcgtcgagcgtcgggagcgggccaatctggttattcagtgcgaaaattggtggaacttggccaagcagtttgcttcccgctccccccctttgaacttcctttcttcgcctgtacagaggacgctgatgaaggcactcgtcctgggagggttcgcccatatggatactgagacgaaacagcagtactggacagaggtgttgcagcctctacaacaacggttcttgagagtgattaatcaggaaaacttccagcagatgtgccaacaggaagaagtgaagcaggagattacagccacgctcgaagccttatgcgggatcgccgaggctacccaaattgataacgttgcgatcttattcaatttcctgatggacttcctaactaattgcattggactgatggaagtgtacaagaacacacccgaaaccgtgaatctgataatagaggttttcgtggaagtggcccacaagcagatatgttacctcggagagtcaaaggccatgaatctctacgaagcctgcctcaccctgctgcaggtatactctaagaataacctcggccgacagcggatcgatgttactgcggaggaagagcagtaccaggacttgttactcatcatggagctgctcacaaatcttctgtcaaaggaattcatcgatttttccgacaccgacgaagtgttcaggggtcatgagccagggcaagcagctaacaggagtgtctcagctgcagatgttgtgctatatggtgtaaacctcattctgcctttgatgtcccaggacctgctcaaatttccaactctgtgtaatcagtactacaaacttattacttttatttgtgagatctttcctgagaagatcccacagcttccggaggatctattcaagagcctgatgtactccctcgagctcggtatgacttctatgtcgtccgaagtgtgccagttgtgtttggaagccctgacacccttggcagagcagtgtgctaaggctcaggaaacggacagcccgttattcctggcaacccgtcattttttaaaacttgtctttgatatgttggttcttcagaaacacaacacagaaatgacaaccgctgcaggggaagcattttacaccttagtgtgtctccaccaggccgagtattccgaactcgtggagaccctccttagctctcagcaggatcccgtgatttaccagaggctggctgatgcttttaataagctcactgcatcttctacccccccaaccttggacaggaagcagaaaatggccttcctgaagtcactcgaggagtttatggcgaacgtgggcggactgctgtgtgttaagtag

SEQ ID NO: 16116 - DNA, 420 bp, synthetic construct
  source 1..420: mol_type = other DNA; note = Synthetic coding sequence
atgggaggcggggagcggtacaacatccccgccccacagtcaaggaatgtttccaaaaatcaacagcagctgaatcggcagaagaccaaggagcagaactcccagatgaagattgttcataaaaagaaggaacggggccacgggtacaactccagcgccgcggcctggcaggcaatgcagaacggtggcaagaataagaactttcctaataaccagtcttggaattcttccttgtccggcccccgcctcctgtttaagtcacaggccaaccagaattacgcgggcgccaaattcagcgagcccccgtccccgagtgtgctgccaaaaccgccctcccactgggtgcccgttagctttaacccaagcgacaaggagatcatgacatttcaactgaagacactgctcaaagtccaggtctag

SEQ ID NO: 16117 - DNA, 984 bp, synthetic construct
  source 1..984: mol_type = other DNA; note = Synthetic coding sequence
atgaaagagatgctagccaaggatctagaagagagtcagggggggaagagcagtgaggtactgtcggctacagagcttcgggtacagctggcgcagaaggagcaggaactcgcccgcgcaaaggaagccctacaggccatgaaggctgaccgtaaaagattaaaaggcgaaaaaacagacctggtgtctcagatgcaacagctgtacgccacactggagtctagggaggaacaactgagagacttcattaggaattacgaacagcacagaaaagagtcggaagatgcggtgaaagctttagcaaaagagaaggacttactcgagagagagaagtgggagttacggagacaagccaaggaggcgactgaccacgctaccgcccttagaagtcaactggacctgaaggataaccggatgaaggagttagaagcagagctcgcgatggctaagcagagtctcgccactctaaccaaggacgttcccaagcggcattctctggcaatgccaggggaaaccgtgctgaacgggaaccaggagtgggtagtacaggccgacctacctctcactgctgccattaggcagtcgcagcaaaccctgtaccacagtcaccccccacatcctgcagaccgccaggccgtgcgcgtttcaccctgccacagtcgtcagccttcagttatcagtgacgctagcgcagctgaaggcgatagaagcagtactccctcagatattaattcccctaggcaccgcacgcattctctctgcaacggcgacagtccaggccccgtgcagaagaatttgcacaatcccattgttcagtcccttgaggatctggaggaccaaaagcgcaaaaagaaaaaggaaaaaatgggctttggctccatctccagggtctttgctaggggaaagcagcgcaaatcccttgaccccggcctgtttgatggtaccgcaccggactactacatcgaggaagacgccgattggtag

SEQ ID NO: 16118 - DNA, 984 bp, synthetic construct
  source 1..984: mol_type = other DNA; note = Synthetic coding sequence
atgaaggaaatgttggcaaaggatctggaagaatcacaggggggcaagagcagtgaggtgctgtccgcaactgaactccgcgtgcagctggcccagaaagaacaggagttggctcgagccaaggaagctctgcaggcaatgaaggccgaccggaaaagactcaagggggaaaagaccgacctggtgtcgcaaatgcaacagctgtacgctacactggaaagccgcgaagaacaactccgagattttatccgaaactacgaacagcacagaaaggagtctgaggatgccgtgaaagccctggcgaaagaaaaggatctactggaaagggaaaagtgggagctgcgccgacaagcgaaggaagccacagaccatgccactgcccttaggtctcagctggatttgaaggataaccgtatgaaggaattagaggctgaactcgccatggccaaacagtccctggcgaccctgacgaaagatgtgccgaaacggcacagcttggcaatgccaggggagacagttctaaacggcaatcaagaatgggttgtccaggctgatctgcccctgacagcagcaatccggcaatcccagcagacactgtaccatagccacccccctcatcccgcggaccgccaagcggttcgggtttccccctgccacagccgccagccctcagtcatttctgatgcctccgctgctgaaggcgacagaagctccacaccttctgatatcaacagcccgagacatcggacccactccctgtgcaatggcgactcccccggtcccgtccaaaaaaatttgcacaatccaattgtgcagtccctggaggacctcgaggaccagaaacggaagaaaaaaaaggaaaagatggggtttgggtcaatatctagagtgttcgcccgcggaaagcaaagaaagagcctagatccaggcctgttcgatggaacagccccagactactacattgaagaggatgccgattggtag

SEQ ID NO: 16119 - DNA, 609 bp, synthetic construct
  source 1..609: mol_type = other DNA; note = Synthetic coding sequence
atggatgagcaggcccttttgggcctgaatccgaatgccgattctgattttaggcagagagccttggcatatttcgaacagctgaagatctcccccgatgcgtggcaggtgtgcgccgaggcgttggctcaaagaacttactcagatgatcatgttaaatttttctgtttccaagtgctcgaacaccaggtgaagtacaagtattctgagctgaccaccgtgcaacagcagcttattcgagagacactgatctcatggctccaggctcagatgctaaatcctcagcctgaaaagacatttatcaggaataaagccgcccaagtgttcgctctactcttcgttacggaatacttgactaagtggcccaaatttttcttcgatatcctgtcagttgtagatctcaatccccggggggtcgatctttacctcaggattctgatggctatcgacagtgagctcgtcgaccgagatgtagtccatacgtctgaagaagctaggcgaaacacactcattaaagacaccatgagggaacagtgcatccctaacctggtagagtcctggtaccagatcctgcagaactaccagtttactaacagcgaggtgacctag

SEQ ID NO: 16120 - DNA, 1803 bp, synthetic construct
  source 1..1803: mol_type = other DNA; note = Synthetic coding sequence
atgtctagagttgcgaagtaccgcaggcaagtgagtgaagaccccgatattgactcactgctcgaaacactgtccccagaggaaatggaagagctagaaaaagagctggatgttgtagaccctgatggctcagtgccagtggggttacgccagagaaatcagacggaaaagcaatccaccggggtgtacaatcgcgaagcgatgctaaacttttgcgaaaaggaaaccaaaaagctcatgcaaagagaaatgtctatggacgaatccaaacaggtggagaccaagacagacgccaagaacggcgaggaacgcggcagagacgcctccaaaaaagctctaggccccagacgcgatagcgatctcggaaaagagcctaaacgtgggggcctcaagaaatcgttctccagagaccgcgacgaggctggcggcaagagcggcgaaaagccgaaagaggaaaaaatcattcgcggcattgacaaaggaagggtgcgagccgcagtagacaagaaagaggcaggcaaagacggccggggcgaagaaagagcagtggctaccaagaaggaggaggagaagaagggctcagatcgcaacacaggactcagccgggataaagataaaaagcgcgaggaaatgaaagaggtagcaaagaaggaggacgacgagaaggtgaagggcgaacgtcgcaacactgatactaggaaagaaggcgaaaagatgaaacgagccggaggaaacacagatatgaagaaggaggatgaaaaggttaagcggggtacaggcaatacggacaccaaaaaagacgatgagaaggtaaagaagaatgaacctctgcacgaaaaagaggccaaagacgatagcaagacgaaaacccccgagaaacaaactccttccggccccaccaaaccctctgaagggcccgctaaggtcgaggaggaagctgccccctccatattcgatgagccgcttgaacgggtgaagaataatgatcccgagatgactgaagtcaatgttaacaacagcgattgcatcactaacgagattctcgtgcggtttacggaggcgctggaattcaataccgtagttaaattgtttgccctcgctaatacgagagccgacgaccatgttgcattcgccattgccatcatgttgaaggcaaataaaactatcacaagcctcaacctcgattctaaccatataacaggtaaggggatcctcgctatcttccgcgctttgctgcagaacaacactctgactgagcttcggttccataaccaacgccatatttgtggcggcaagaccgaaatggaaattgccaagctccttaaagaaaatacaacactccttaagctcggataccacttcgaacttgccggcccgaggatgaccgtgacaaatcttctctcccggaacatggacaagcagcgacagaagcggctgcaagagcagaggcaggcccaggaagctaagggcgagaaaaaggatttgctggaggtccccaaagcgggtgccgtggctaagggctctcctaagccgtcaccacaaccaagcccaaagccctctccgaaaaactcacctaagaaggggggagctcccgctgctccaccccctccaccaccgcccttggcacccccactgataatggaaaacctcaaaaactcactgtcccctgccacccagcgaaaaatgggtgacaaggtcctgcccgctcaagaaaagaactcgcgggatcaactgctggctgctattcgctcttctaatctgaaacagctcaagaagctggaactgcccttactgcttcagtag

SEQ ID NO: 16121 - DNA, 201 bp, synthetic construct
  source 1..201: mol_type = other DNA; note = Synthetic coding sequence
atgataggcaccacggaagttccctgctgtggcccttctgctacatgggccctcagatggagtgatcagataaccttgccttctctgccttggacaatgagctctctgtggtgcatcccgctaaaggggatgctggctacttgccccgtgtcgttgcttgaacatgcctactccaacgccctaagaggctggaaaccctag

SEQ ID NO: 16122 - DNA, 2121 bp, synthetic construct
  source 1..2121: mol_type = other DNA; note = Synthetic coding sequence
atggctacagccaattttgggaagatccagatcgggatctacgttgaaattaagcgctccgacggtcgtattcaccaggctatggtgaccagcctaaatgaggataatgagtctgtgactgtcgagtggattgagaacggagacacaaaaggaaaagagattgatctggagtctattttcagtctcaacccggacttggtcccagatgaagagatcgaaccctctcccgaaacgccaccgccgcccgcctcaagtgccaaggtaaacaaaattgttaagaatcggcggacagtggccagcattaaaaacgatcctcctagccgcgataaccgagttgttgggtctgcccgcgccagaccttcccaatttccagaacaaagcagctcggcccaacagaatgggagtgtgtccgatattagccccgtgcaggcggccaaaaaagaattcgggccgccttcccgtaggaagagcaattgtgttaaggaagtcgaaaagctccaagagaagcgcgagaagcgcaggctgcagcaacaggagctgagggaaaaacgggcacaagacgttgatgccactaacccaaactacgaaataatgtgcatgattcgggactttcgagggtctttagattacaggcctctgaccaccgccgatcccattgatgaacaccgcatatgtgtgtgcgtaaggaaacgccctctgaataagaaagaaacacaaatgaaagacctagacgtgattacaatcccttccaaggacgtagtgatggtacacgaacccaaacagaaggtggatttaacacgttacttggaaaatcaaacgtttagattcgactacgcattcgacgactcggcccccaacgagatggtctatcgctttaccgctcgcccgcttgttgagacaatctttgagaggggtatggcaacctgcttcgcatacggccaaaccggatctggaaagactcacacaatgggtggcgactttagcggcaaaaaccaggattgctctaaaggaatctacgccctggctgccagggacgtgtttttaatgttaaagaaaccaaactacaaaaagctggaactgcaggtgtatgccaccttttttgaaatatactctgggaaagtttttgatctcctcaaccgcaaaacaaaactgagggttctggaagacggaaagcaacaggttcaggtagtgggtctccaggaaagggaagtcaagtgcgtggaagatgtgttgaagcttatcgatattggaaattcctgcaggacttccgggcagacaagtgccaatgcacactccagccgatcgcatgctgtgtttcagatcattctgagaaggaagggaaagctgcacggaaagttctcacttattgacctggccgggaatgagagaggagcagacactagttctgctgaccgccaaactcgcctcgaaggtgccgagattaacaaaagcttacttgctttgaaggaatgcattcgcgctttagggcgaaataagccccatactccatttcgagctagcaaactaactcaggttctgcgcgattccttcatcggggaaaatagccgtacttgtatgattgcaacgatcagccctggaatggcaagctgcgagaataccctgaacacattacgctatgccaacagagtgaaggagcttactgtggatcccacagctgctggcgatgtaagacctattatgcaccaccccccgaaccagatcgacgatcttgagacacaatggggcgttggttcatcaccccagagagatgatctgaagctgctctgtgagcagaatgaagaagaagtatctccgcagctgtttacgtttcatgaggccgtgagccagatggtcgaaatggaggagcaagtggtggaggatcaccgcgccgtgtttcaggaatcaattcgttggctcgaggacgagaaggcattgctagagatgacagaggaggtggactatgacgttgattcatatgcgactcagttggaggcaatcttggagcagaaaatcgatatactgacggaattacgtgacaaggtgaagtccttcagagcagccctacaggaagaagagcaggcctcaaagcagattaatccaaaaaggccccgcgccctctag

SEQ ID NO: 16123 - DNA, 1281 bp, synthetic construct
  source 1..1281: mol_type = other DNA; note = Synthetic coding sequence
atggcacaccttcggggctttgcaaatcaacactcccgggttgatccggaagaacttttcacgaagctggacagaattgggaagggtagtttcggagaggtatacaagggaatcgacaatcatactaaagaggtagtcgcaattaaaataatcgatctggaggaagccgaggacgagatcgaggacattcagcaagaaattactgttctgagccagtgcgactccccatacataactagatatttcggaagttatctaaaatccaccaagttgtggattatcatggagtacctgggaggaggatccgccctcgacttactcaagcctggtcctctagaagagacatacatcgctacaattctgcgcgagatcctgaaagggctagactacctgcatagtgagcgcaaaattcaccgcgacatcaaagcggctaatgtactgttaagcgagcaaggcgatgtgaaattggctgattttggcgtagcaggacagctgaccgatacacaaatcaagaggaatacctttgttggaaccccgttctggatggcccctgaggttattaaacagtctgcatatgacttcaaggctgatatttggtctctcggaatcaccgcaatagaactggctaaaggtgaaccacctaactccgacctgcaccccatgagggtattgttccttatccctaagaactccccacccacactggagggccagcactccaagccgttcaaagagtttgttgaggcttgtttaaataaagatccaagatttcgccccacagctaaggagctgctgaagcacaagttcattacaaggtacaccaaaaagaccagttttctcacggagcttattgacagatacaaacgctggaagtcggaaggacacggcgaggagagttcttcagaggatagtgacattgatggcgaggccgaggatggggaacaggggcccatctggacttttccaccaacgatacggcctagcccacacagcaagttacataaaggcaccgctctgcacagctcacaaaagcccgccgagcctgttaagcggcaacccagaagccaatgtctgagtacccttgtgagacctgtcttcggtgaattaaaggaaaaacacaagcagagcggagggagcgtgggggctttggaagaactagaaaacgctttcagcctggctgaggaatcatgcccgggtatctccgataagctgatggtccatctggtggagcgagttcagagattcagtcacaaccgtaaccacctgacatcaacccggtag

SEQ ID NO: 16124 - DNA, 996 bp, synthetic construct
  source 1..996: mol_type = other DNA; note = Synthetic coding sequence
atgctcaggtgcggacagatgatcttcgcacaggcacttgtgtgtagacaccttggtcgggattggaggtggacccagcggaaacggcaacccgacagctacttctccgttctcaacgccttcattgaccgcaaagacagttactactctattcatcagatcgcgcagatgggcgtgggtgagggcaagagtattgggcagtggtacgggcctaacaccgttgcgcaagtgctgaagaagcttgccgtcttcgatacctggtcatctctggcagtccacattgccatggataatacggtcgtaatggaagagatcagacgtctgtgccggacctcagttccatgcgccggggccacagcctttcccgccgattcagatcgccattgtaacggctttccggcgggcgcagaggtgactaatcgtccctcaccttggcggcctctggtgttgctgatccctctaaggttgggtcttaccgacatcaacgaggcctacgtggagaccctgaagcattgcttcatgatgccacagagtctaggggtcataggtggcaaaccaaatagcgcacactatttcatagggtatgtcggcgaggagctcatctacctggatccccacaccacccagccggctgtggagccaacagatggatgtttcattcctgatgagtcctttcattgtcagcatccaccttgtagaatgagtattgccgagcttgacccctcaattgccgtcggatttttttgtaaaacggaggacgatttcaatgactggtgtcagcaggtgaaaaaactgagccttttgggcggcgctctccctatgttcgagctggttgagctgcagccctcccatctcgcgtgccctgacgtgctaaatttgtcacttggagagtcctgtcaggtacaagtgggcagtctcggggactctagcgatgtggagcgactggagcgatttttcgacagcgaagacgaggactttgagatcctgagcctctag

SEQ ID NO: 16125 - DNA, 1461 bp, synthetic construct
  source 1..1461: mol_type = other DNA; note = Synthetic coding sequence
atgtcggtaacctacgatgattccgtgggagtggaggtgtcaagtgattcattttgggaggttggaaactataagcggactgttaaacgaattgacgatggtcacaggctgtgcagcgatctgatgaattgcctccacgagagagcacgcatcgaaaaagcctacgcccagcagcttacagagtgggctcgccgttggcgccagttagtggagaaggggcctcagtacggcacagtagagaaagcctggatggcatttatgagcgaggccgaacgcgtcagcgaattgcacctagaggtgaaggcatccttaatgaacgacgacttcgaaaaaataaagaactggcagaaggaggctttccacaagcaaatgatgggtggctttaaagaaaccaaagaagcagaggacggctttcggaaagcacagaagccgtgggcgaagaagttaaaggaggtggaagctgctaaaaaagctcaccatgcggcttgcaaagaagaaaagttggctatttcgcgggaggccaacagtaaggccgatccaagcctaaacccagagcagcttaaaaaactacaggataaaattgaaaaatgcaaacaggacgttctcaagactaaggaaaagtatgaaaagagtctcaaggaattagaccaggggactccacagtatatggagaacatggagcaggtctttgaacagtgccagcagttcgaagaaaaaagactgcggttctttagggaagttttgcttgaggtgcaaaaacacctggacctgtccaatgtggccggctataaagccatttatcacgacttagaacaaagcattagggccgcagatgctgttgaggatctgcggtggtttcgggctaatcacggcccaggcatggcaatgaactggccccagtttgaagagtggtctgcagatctgaacaggacattgtcaagacgcgagaaaaagaaggcgaccgacggcgtgacactaaccggaatcaatcagactggggaccaatctctgccgagtaagccctccagcacactcaatgtgccatcaaaccctgctcagagcgcgcagtcacagagcagttacaatccgttcgaggacgaagacgatactggttccacagtatccgaaaaggatgataccaaggccaagaatgtcagtagttatgaaaagacgcagagctacccgacagactggagcgacgatgagtccaacaaccccttcagcagtaccgatgccaatggtgattctaatccctttgatgacgatgcaacctctgggacagaggtgagagtcagagccctgtacgattacgagggacaggagcatgacgagctttcttttaaggcaggtgacgagttaactaaaatggaggatgaggatgaacaaggatggtgcaagggtcgcttagataatgggcaagttggtttgtaccccgccaactacgtggaggcgattcagtag

SEQ ID NO: 16126 - DNA, 3075 bp, synthetic construct
  source 1..3075: mol_type = other DNA; note = Synthetic coding sequence
atgaatttcatcaaggacaatagccgggccctgatccagcgcatgggcatgaccgtcatcaagcaaatcacagacgatctgttcgtctggaatgtgctgaatagagaagaggttaacatcatatgctgtgaaaaagtggagcaggacgctgctaggggaattattcatatgattcttaaaaaaggcagcgagtcttgcaatctctttctgaaatctttaaaagagtggaactatcccctgtttcaggatctcaatggacagtctttgttccaccagactagtgagggggatctggatgatcttgcgcaggatctcaaagacctgtatcacaccccgtcattcctaaacttttatcctctcggggaggatattgatatcatctttaaccttaagtcaaccttcactgaaccagtgctgtggagaaaagaccagcatcaccaccgcgtcgagcaattaactctgaatggactattacaagcattacagagcccttgcataatagagggtgagagcggaaaaggaaaaagcactctgctccaacgtattgccatgctgtgggggagcggtaaatgtaaagcactgacaaaatttaagttcgtgttcttcctcagactcagcagggcccagggcgggctgtttgagactctgtgcgatcagcttttggatattcccgggaccatccgcaagcagacatttatggctatgttgctgaaactaagacaaagggtgttgtttctgctggacgggtacaacgagttcaaaccgcaaaactgtcccgagatcgaagcgcttataaaggaaaaccaccggtttaaaaatatggttatcgtcactaccaccaccgaatgtcttcgtcacatccggcaattcggggctctcacggccgaggtcggggacatgacggaggactctgcccaggcattgattcgggaagtgttgattaaagagttagcagagggcttgctgctccagattcaaaagtcacgctgcctgaggaacttgatgaagactccccttttcgtcgttataacctgcgccattcaaatgggggagagtgagttccattctcatacacagactaccctattccatacattttatgatctactcatccagaaaaacaaacacaaacacaaaggcgttgctgctagcgacttcatacggagcctggaccattgtggcgaccttgcgctggagggagtctttagtcacaagtttgactttgaacttcaggacgtgagctcggttaatgaagacgttctcctgactactgggttgctgtgtaagtataccgcacaaaggttcaagccaaaatataagtttttccataagagtttccaggaatatacagcaggccgccgcctgtcaagcttgttaacttctcacgagccggaggaggtgactaaaggtaatgggtacctccagaagatggtctctatttccgacattacatctacctattccagccttctgcgatacacctgcgggtcctcagtcgaggctacgcgcgccgtaatgaagcacctggcagccgtgtatcagcacggttgccttctgggcctgagcattgctaagcgccccttatggcgtcaggagtcactccagtcggttaaaaacactacagaacaggaaatcctgaaagctattaatattaactcttttgtggaatgtgggatacacctgtatcaggagtctacatcaaagtctgctctctcccaggaatttgaggccttcttccagggcaagagtctttatataaactccggaaacataccagactatctgttcgacttttttgaacatttgcctaactgtgcttcagctctcgacttcatcaagcttgatttctacggtggagcaatggcaagctgggaaaaggctgctgaagatacaggaggtatccatatggaagaggctccagaaacctacatccctagccgcgcagtgtccctctttttcaactggaaacaggagttcagaaccctggaagtgacactacgggatttttctaagctaaacaaacaagatattcgatacttaggcaagatcttctcaagtgccacaagtttgagactccaaatcaaacgatgcgccggagtggccggcagtctgagcctggtcttgtccacctgcaaaaacatttactctctgatggttgaggcctcccccttgaccatcgaggacgagagacacatcactagcgtaaccaatctgaagactctttcgatccacgacttacaaaaccagcgcctgcctggcggccttaccgactccctcggtaatctgaagaatctaactaagctgattatggacaacattaagatgaatgaggaggatgctatcaagttagccgaaggccttaaaaacctcaagaagatgtgtctattccacttaacccacctgtcggacatcggagagggaatggattacatagtgaagtcactgtcctcggagccatgcgacctggaggagattcaactcgtttcttgctgtctgtccgcaaatgctgttaagatcctggcacagaatttacataacttagtcaaactaagtatactggatctgtctgagaattatctcgaaaaggacggcaacgaggccttacacgagctgattgaccgcatgaacgtgctggaacagttgacggctctcatgttgccatggggatgtgacgtgcagggctccttgtccagtctactgaagcatctggaggaggtcccgcaactcgtcaaacttgggctcaagaactggaggcttacagacacagagatcaggattctgggcgccttttttggtaaaaacccgcttaagaactttcagcagcttaacctagctggaaatagagtttctagcgatggatggctggcatttatgggagtctttgagaatctcaaacaactcgtcttcttcgattttagcactaaagagtttctgcccgatccagctttagtgaggaaactgtcccaggttctgagtaagctaacatttctccaggaagctcgcctggtgggctggcagtttgacgacgacgacctatctgtcataaccggcgccttcaaactcgtcactgcctag

SEQ ID NO: 16127 - DNA, 339 bp, synthetic construct
  source 1..339: mol_type = other DNA; note = Synthetic coding sequence
atggacgataaagcttctgtcggcaaaatctctgtaagcagcgattccgtgtctactttgaactctgaggatttcgtcctggtctctagacagggtgacgaaactccaagcactaacaacggatctgatgatgaaaaaaccgggctcaagatagttgggaacggatccgagcaacagcttcaaaaggagcttgcagatgttctgatggaccctccaatggatgatcagcctggcgagaaggagctcgtaaaacgatcccaattggacggcgaaggcgacggccccctttcgaaccaactgtctgcctcgagtaccatcaaccctgttcccttggtctag

SEQ ID NO: 16128 - DNA, 441 bp, synthetic construct
  source 1..441: mol_type = other DNA; note = Synthetic coding sequence
atgctgaaagaagactgtgcaagcgaactgaaggtgcacttggctaaatcactgcccctgccttcctcagtaaataggccccgcatcgacctgatcgtctttgtggtgaacctccatagcaaatacagcttacagaacacagaggaatccttgaggcatgttgacgcgagcttctttctgggaaaggtctgtttcctggcgaccggggccggcagagagtcacattgcagtatccaccggcatacggtagttaaactcgcacacacatatcagtcccctctgctatactgtgacttagaggtcgagggcttccgagcaactatggcccagcgcttggtgagagtgctccagatctgcgcaggtcacgtccccggggtcagtgccctgaacctgctctccctgctcagaagctccgaagggccctccctcgaagatttgtag

SEQ ID NO: 16129 - DNA, 1203 bp, synthetic construct
  source 1..1203: mol_type = other DNA; note = Synthetic coding sequence
atggcctccgacacccaggctgtgcctgatgtgtcaggccgatccagggcccggcgttacgccgaatggagctctggtttgcgcagcggccgagcaggcggcggagagacatcagtggagcgacgccgaacatgcgcttttgatacactggaggcatttcttatcatggatggcgaagacatccctgactttagctcactaaaagaggaaactgcctattggaaggagttgtcgctgaagtacaaacagagctttcaagaagcgcgagacgaattggtggagtttcaggaagggagccgggaactggaggcagagctggaagcgcagctcgtgcaggccgaacagcggaatcgtgatctgcaggcagataaccagcgcctgaagtacgaggtggaagctctcaaggaaaaactggagcaccagtatgctcagtcatacaaacaagtgtccgtactggaggacgatttatctcagacacgggcaattaaagagcagctccataagtatgtgagagaacttgaacaggccaacgatgatctggaacgagccaaaagagctactattgtgagtctcgaggattttgagcaacgcctgaaccaggctatagagagaaacgcttttttggagtcggaactggatgagaaggagtccctgctggtctctgtacagaggctgaaagacgaggctagggacctgcggcaggagctggcggtccgtgagagacagcaagaggttactaggaagagcgccccctcttcacccactctggactgcgaaaaaatggattctgcggttcaagcctctctgtctctccccgctacccctgttgggaagggcacagaaaacacgtttccctctccaaaggccatacccaatgggtttgggacatcaccactgaccccaagcgctcgcatctctgcgttaaatattgttggtgacttgttaaggaaggtgggcgcccttgagtccaaactggctgcttgtcggaattttgccaaggaccaggcctcacgtaaatcttatatctctggcaatgtgaactgtggcgtcctcaacggaaacggcaccaaattctctaggagcggacacacttctttctttgataagggcgccgtgaatggtttcgatcccgccccacctcccccgggactgggctcgtcccggccaagttctgcgccaggcatgcttcccctctccgtgtag

SEQ ID NO: 16130 - DNA, 699 bp, synthetic construct
  source 1..699: mol_type = other DNA; note = Synthetic coding sequence
atgacgcctcctcagcaaccccccccactccgctctgagcccggtactcttgggagtgcagcgtcatcatactccccattaggcctgaacggcgtacccggatccatctgggacttcgtgtccggaagctttagtccaagtccatcccccatcctcagtgccggcccaccaagctccagctctgccagccctaacggcgctgagctagcacgagtgcgcaggcagttggatgaagccaaacgcaagatcagacagtgggaagaatcgtggcagcaggtgaaacaggtttgtgacgcctggcagagggaagcccaagaggcaaaggagagagcccgggtggccgactccgatagacagctagctttacaaaaaaaagaagaggttgaagctcaagttaagcaattacaggaagaactggaggggctgggtgtggcatctacccttcctggtctgcggggatgtggagacatcggcactattcctctgccaaagctgcactcattgcagtctcagctgcgactcgacctcgaagccgttgacggggtgattttccagttacgggccaagcaatgcgtcgcctgcagagagagggctcatggagccgttttgagaccatgtcagcaccacatcctttgtgaaccttgcgccgccacagctccggaatgcccctattgtaagggtcagcccttgcagtggtag

SEQ ID NO: 16131 - DNA, 1500 bp, synthetic construct
  source 1..1500: mol_type = other DNA; note = Synthetic coding sequence
atgctgccatggcctcccgctcttgcgatgcctatgccgactgaggggaccccgccacctctctctggaactcctatcccggtacccgcctacttcagacacgccgagccgggattctccctgaagagaccgagaggactgtcaagatcccttcccccacctccccccgcgaaggggtccatcccaatctctagacttttccctccgcgcacaccagggtggcatcaattacagccccgtagggtgtccttcaggggagaagcgagtgagaccctgcagagcccggggtacgaccccagtcggccagagtcattttttcagcaatcgttccagcgtctaagccgcttgggtcacggctcctacggggaggtctttaaggtgaggtccaaggaggacggccgcttgtatgccgtcaaacgcagcatgtccccgtttcggggaccgaaggatcgcgctaggaaattggcagaagtcggttcacatgagaaagtcggccagcacccgtgctgtgtgagactcgaacaggcatgggaggagggagggattctgtatcttcagacagagctttgcggacccagtttgcaacagcactgcgaggcttggggggcatcactgccagaggcccaggtctggggatacctgagagacacactgctagcgctggcacacttgcattcacaggggctggtccacctcgatgtaaaacccgctaatatcttcctaggcccccgaggacggtgcaagctgggagactttggcttgttggtggagctggggacagccggagccggcgaggtgcaggagggcgacccgaggtacatggcccccgaactgctgcagggcagctacgggactgcagccgatgtttttagtctgggcctgacaatcctggaggtagcatgcaatatggagctgcctcacggcggtgagggttggcagcagctaagacagggatacttgcctcccgagtttaccgccggcctgtcttccgagctgagaagcgtcctggtcatgatgctggaacccgatcctaagctgcgcgccactgccgaggcactgctcgctctgcctgtgctgagacagccaagggcttggggagtgctgtggtgcatggccgccgaggcgctgagtcgcggatgggccctatggcaggctctcctcgcattgctatgctggctctggcacggcctggcccatcctgcttcctggcttcagccacttgggcccccagctacgcctccaggaagtccgccctgctctctgctgctcgattcttccctaagtagcaattgggatgacgattcgttaggcccaagtctcagtcctgaggcggtgctcgccaggactgttgggagcacatcaacccctcgctcccggtgcactccacgggacgctctagatctgagcgatatcaactccgagcctccacgtggttcttttcctagtttcgaacctcgaaacctgctgagcctctttgaagacacactcgaccccacctag

SEQ ID NO: 16132 - DNA, 3153 bp, synthetic construct
  source 1..3153: mol_type = other DNA; note = Synthetic coding sequence
atgctctgttggggctattggtccctcggtcagccaggtatctcgacgaatttgcaaggcattgtggccgaaccccaggtctgcgggtttatatcggatagatccgtaaaggaggttgcttgcggtggaaaccactcagtgttcctgctcgaagacggcgaggtttacacctgcggactgaataccaagggacagctggggcacgagcgcgagggcaacaaaccagagcaaatcggagcgctagctgatcaacacattatacacgtagcgtgcggagagagtcattcacttgcgttgtcggaccgcggccaactcttcagttggggcgcaggaagtgacgggcagctgggcctcatgactaccgaggacagcgtggctgtgcccaggctgatccagaaactgaaccaacagaccatcctccaggtgtcatgcggcaactggcactgcttggcgctggctgctgacgggcaatttttcacctgggggaaaaacagtcacggccagctaggactgggcaaggaattcccatcccaggcctccccccaaagggtgcgaagcctggaggggatccccctcgcccaggttgctgccgggggcgcgcacagttttgccttgtccctaagtggcgctgtctttggctggggcatgaacaacgccgggcagctggggttgagcgacgagaaagacagggaatcaccctgtcatgttaaactactccgcacccaaaaggtcgtgtatatctcgtgcggcgaggaacacaccgctgttctgactaaatccgggggcgtgtttacgttcggggccggcagttgcgggcagctgggacacgatagtatgaatgacgaggtcaacccaaggagagtgctggagctcatggggtctgaagtgacacagatagcgtgtggccgccaacacaccctcgccttcgtgccgagtagtggtcttatctacgcctttggctgtggagcgcggggccagctagggacagggcacacctgtaacgtgaaatgtccttcccctgtgaaaggctattgggcagcacattcggggcaactcagcgcacgcgccgaccgatttaaataccatattgtgaagcaaattttttctggcggcgatcagaccttcgtgctttgctcaaagtatgagaactactctccagctgtcgactttcggaccatgaaccaggcccattacacctcactgatcaatgacgagaccatagccgtatggagacaaaaactcagcgagcacaacaacgcaaataccatcaatggtgtggtgcagatattgtcatccgctgcatgttggaacggtagttttttggaaaaaaaaatcgacgagcacttcaagacttcgccgaagattccaggaattgatctgaatagcactagggtcctcttcgagaagctgatgaattctcagcatagcatgatcctcgagcaaatcctaaactcattcgagagttgtttaataccccagttgtccagtagccctccggatgtcgaagctatgaggatctacctcatattgccagagttccccctgcttcaggacagtaagtactatataactctcaccattcctctggcaatggctatcctgcgcctcgacacaaaccccagcaaggtgctagacaattggtggtcccaggtgtgcccaaagtattttatgaaactggtaaatctctataaaggtgcagtcctctacctcctgaggggtcggaaaaccttcctgatcccagtgctgtttaataactatatcacagctgctctgaagttgttggaaaaactgtacaaggttaatctcaaggtcaagcatgtagaatacgatactttctacatccccgagatctccaacctcgtcgatatccaggaagactatctcatgtggttcctacatcaggcggggatgaaggccaggccgtccattatccaggacacagtgaccctctgtagttaccctttcatttttgatgcccaggcgaaaaccaagatgctgcaaacagatgccgagctgcagatgcaggtagctgttaatggggctaacctgcagaacgtgttcatgctcctgaccctggagcccctgctggcacggagcccttttctggttctgcacgttcggcgcaataatctagtcggagatgcccttagagagctttccattcatagcgatatcgaccttaagaaacctcttaaagtgatcttcgacggggaggaggctgtggacgccggaggggtgacgaaggaatttttcctcttattgcttaaagaactcctgaaccccatctacggaatgttcacttattaccaagactccaatttgctttggttttcggacacatgcttcgtggaacataactggtttcacctcatcggtattacctgtggcctggccatttacaacagcaccgtggtggatctgcacttcccgctggccctgtataagaaactgctaaacgtgaaacccggcctggaggacctgaaggagctcagccccaccgaaggcaggtctcttcaggagctcttagactacccgggagaagacgtggaagagacattctgtctcaacttcaccatctgcagagaatcctatggagttatcgagcaaaaaaaactgattcctgggggggacaatgttactgtttgcaaagacaaccgccaggagtttgtagatgcctacgtcaattacgtatttcagatcagtgtgcacgagtggtatacggctttcagcagcggatttctgaaagtgtgcggaggcaaagtgctcgagctgtttcagcccagcgaactcagagccatgatggtgggcaattcaaactataattgggaagaactcgaagagacagcaatttacaaaggtgactattctgcgacacacccaacggtgaagctcttctgggagacatttcatgagtttcctctggagaagaaaaaaaagttcctgctgtttctaacagggagcgaccggattccaatttacggaatggcatcccttcaaatagtgattcagagtacagcgtctggtgaagaataccttcctgtggcccacacatgctacaatctactggatctgccaaaatatagtagtaaggaaatcctctccgctcgcctgacccaagccctggacaattacgagggttttagcctggcatag

SEQ ID NO: 16133 - DNA, 363 bp, synthetic construct
  source 1..363: mol_type = other DNA; note = Synthetic coding sequence
atgagtatcggagtgcctattaaggtacttcacgaagctgagggtcacattgtgacttgcgaaaccaatactggagaagtgtatcgcggtaagctgatcgaagctgaggacaacatgaactgtcaaatgagcaacatcacagtaacctaccgcgacggaagagtcgcccaactggagcaggtgtatatcagagggtccaaaatcaggtttctgatcctgccagacatgttgaagaatgcccctatgttgaagtctatgaagaacaaaaatcagggtagcggagccggtcggggaaaagcagcgatcctaaaggcacaaggctacttatcttccctggagtgggtcctcgtgcacatttgctag

SEQ ID NO: 16134 - DNA, 1182 bp, synthetic construct
  source 1..1182: mol_type = other DNA; note = Synthetic coding sequence
atggaggaaaataatctgcagtgcagcagtgtggttgatggtaattttgaggaagttccaagggagaccgcaattcaattcaagccacccctgtacaggcagcgctaccagttcgtcaaaaatttggtggatcagcacgagcccaagaaggttgccgatctcgggtgcggcgataccagtctcttaaggttgctgaaagttaacccttgcattgagctgttagtgggggtcgatatcaacgaggataaactaaggtggagaggggattcccttgcgccctttctcggcgactttttaaagccaagagacctcaatttgacgattaccttgtaccatggttcagtcgtcgagcgagacagccgtcttctgggtttcgacctcatcacctgcatagaattaattgagcacctcgatagtggcgatttagctagattccctgaggtggtcttcgggtatctgagcccctcaatgatcgtcatctctactcctaacagcgagtttaaccccctgtttccctcggtgaccctgcgagactctgatcataaatttgagtggactaggatggagttccagacatgggctctgtacgtagcaaacaggtacgactactccgtcgagttcaccggcgttggagaaccccctgccggggctgaaaatgtcgggtactgcacccagatcgggatcttccggaaaaacggcgggaaggctaccgagagctgtttatctgaacaacatgaccagcatgtgtataaagctgtgttcaccacgtcatatccttctctccagcaggagcgtttcttcaaactcgtgctggtgaacgaggtaagtcaacaggtggaatctctacgcgtcagtcatctacctcgtaggaaggagcaggcaggtgaaaggggtgacaaacccaaagatatcggggggtccaaagcgcctgtgccttgcttcgggcccgtcttcacagaggttgagaaggccaaaatagaaaattctccaacaccgttttgtgtcggggataagttcttcgtgcccttgcagagacttctagcatatcccaagcttaataggctttgcgcaaacgaagagatgatgcggtcagtcattgctgattctattcccctgagctccgatggatctgcagtagttgcagacttgcgtaactattttgatgagcagtttgaattctag

SEQ ID NO: 16135 - DNA, 228 bp, synthetic construct
  source 1..228: mol_type = other DNA; note = Synthetic coding sequence
atgagcccacagaaacgagttaaaaacgtgcaagcacaaaacaggacctcccaggggagctctagttttcaaacaaccctaagtgcatggaaagtgaagcaggatccatcgaacagcaaaaatatcagcaaacatggtcaaaataacccagtcggagactatgagcacgccgacgaccaggcagaagaggacgcgctacagatggcagtcggatacttcgaaaagtag

SEQ ID NO: 16136 - DNA, 996 bp, synthetic construct
  source 1..996: mol_type = other DNA; note = Synthetic coding sequence
atggcttttgtgactcggcagtttatgcgctcagtgtcaagcagctcgacagctagtgcctctgcaaagaagattatcgtcaagcatgttaccgttattgggggagggttgatgggggctggaatcgctcaggtagcagccgctacaggccataccgtagtgctggtggatcaaaccgaggacatattggccaagtccaaaaagggcatcgaagagagtctacgcaaagtcgctaaaaagaaatttgcggagaacctaaaggccggggatgagtttgtagagaagacgctctcgactatagccacttcgacagacgcagcttcagttgttcacagcaccgaccttgtggttgaagcaatagtagagaacttgaaagttaagaacgaattgtttaaacgattggacaagttcgccgctgagcacacaattttcgctagcaatacgagttctctccaaatcacttccatcgccaacgctacgactcgtcaggataggttcgccggattgcattttttcaacccagtgcccgtaatgaagctcgtagaggtgatcaagacaccaatgacaagccagaagacattcgagagtttagtagacttcagcaaggcacttgggaaacatccagtcagctgcaaggacacaccaggatttatcgtgaataggctgctggtgccgtacctcatggaggcaatccgcctgtatgagcgtgacttccagacctgtggcgatagcaactcaggactcggcttcagcctgaagggcgatgcctcaaaagaggatatcgacacggcaatgaaacttggtgctggctatcccatgggcccgttcgaactgctcgactatgtcgggctggacactactaagttcatcgttgacggctggcacgaaatggacgccgaaaaccctttgcaccaacctagtccctcgttaaataagctggtcgctgagaacaaattcggaaaaaagactggagaaggattttacaagtacaaatag

SEQ ID NO: 16137 - DNA, 1281 bp, synthetic construct
  source 1..1281: mol_type = other DNA; note = Synthetic coding sequence
atggctcatcttagagggttcgctaatcagcattccagagtcgaccccgaagagctgtttaccaaattggaccgaatcggtaagggctctttcggggaggtttataagggcatagacaaccatactaaggaggtggtagccataaagatcatagatttggaggaagccgaagatgagatagaagacatccagcaggagataacagtgctgtctcagtgtgacagcccctatattacccggtacttcggctcatacctgaagagtacaaagctctggatcataatggagtatctggggggagggagcgcactggaccttttaaagccgggccctctagaggagacctacatcgccactattctgcgggagatcctcaagggactggattacctgcattccgagagaaaaattcatagagacatcaaggccgccaacgttttgctatctgagcagggtgatgttaagctggcagactttggagtggctggccagctgaccgacacacaaataaagagaaatacatttgtaggcacccctttctggatggcccctgaggtcatcaaacaatcagcatacgattttaaagcagacatttggtccttgggtatcacagccattgaattggctaaaggggagcctcccaatagcgatctgcacccaatgcgagtgctgtttcttatcccaaaaaactctcccccaactttggagggccagcactcgaagcctttcaaagagttcgtcgaggcatgcctgaataaggatccccggttcaggccaactgcaaaagagctgctgaagcacaaattcataacgcgttacacgaagaaaactagtttcctgactgagctcattgatcggtataagagatggaagtcagagggccacggcgaggaaagctcctcagaagactcagatatcgatggagaggccgaggatggcgaacagggacctatctggacgttcccccctaccatcagaccatcgccacacagcaaactgcacaaaggcaccgcactccatagctcacagaaacctgctgaaccggtcaagcgccaaccccggtctcagtgtctgtctacactagttcgtccagtgttcggtgagctcaaggagaagcataagcagagtggtgggtctgtgggtgccctggaagaactggagaacgcctttagcctcgctgaagagagctgtcccgggatcagcgataagttgatggtgcacctcgtcgaacgcgtacagcggtttagtcacaatcgcaaccaccttacaagtactcggtag

SEQ ID NO: 16138 - DNA, 1290 bp, synthetic construct
  source 1..1290: mol_type = other DNA; note = Synthetic coding sequence
atgcccaatgtactattaccaccaaaggagtcaaaccttttcaagagaatactcaagtgttacgagcagaaacagtataaaaatggcctgaaattttgcaagatgattttaagcaatcctaagtttgcggagcatggcgagaccctggccatgaaggggctgaccttgaactgccttggtaaaaaggaggaagcctatgagttcgtgaggaaaggcctcaggaatgatgtgaagagtcacgtgtgttggcacgtgtatgggttactccagaggtctgataaaaaatacgatgaggccattaagtgctatcggaatgcactgaaactcgacaaagacaatttacagatattaagggaccttagcctccttcaaattcagatgagggacctcgaagggtacagggagacccgatatcagttactacagttgcggcccactcaaagagctagctggatcgggtatgccatcgcctaccacctcctaaaggattacgacatggcactgaaactgttagaggaatttagacaaacacagcaggtgcctcccaacaaaatagactatgagtattcggaactgatcctgtatcagaaccaggtaatgcgagaggccgatcttctgcaggaatcattggaacatatcgaaatgtatgagaagcaaatttgtgataagctgctagtggaggagatcaagggcgaaattctactcaaactgggacgcttaaaagaggcctccgaggtctttaaaaatctgattgatcgaaacgccgagaattggtgttactatgaaggactggagaaagctcttcagatcagtacactagaggagcgactgcaaatttacgaagaaatctcgaagcagcaccctaaagctattacccctcggcggctaccattgacactggtgcccggtgagcggttcagagagttgatggataagtttctgcgcgtgaatttctccaaaggatgccctccgctgtttacaactttaaaaagcctctattacaataccgagaaagttagcattatccaagagttagtcaccaattacgaggcctctttgaagacttgtgactttttttcaccatacgagaacggggagaaagaacctcccactaccctgctgtgggtgcagtattttctggcccagcacttcgacaaactgggccagtatagccttgccctggactacatcaatgccgcaatcgctagcacgcctacgcttattgagttgttctatatgaaggccaagatctacaaggtgaagagtgagtcttgctttctaagcagttag

SEQ ID NO: 16139 - DNA, 360 bp, synthetic construct
  source 1..360: mol_type = other DNA; note = Synthetic coding sequence
atggacaagaacataggggagcagcttaataaggcttatgaggctttcaggcaagcctgtatggatcgtgattcagccgttaaagaattacaacagaaaactgagaattacgagcagcggatacgagaacagcaggagcagctttctctccagcagaccattatagacaagctgaaatcccagctcctcctggtgaactctacgcaggacaataactatgggtgtgtgccactgcttgaagactccgagacccgcaaaaacaacttgacccttgaccagccccaagacaaagttatctccggtatcgccagagaaaaactgcccaaggtagacatcgcatccgccgagagctccatttag

SEQ ID NO: 16140 - DNA, 699 bp, synthetic construct
  source 1..699: mol_type = other DNA; note = Synthetic coding sequence
atgactcctccccagcagccacccccgctgcgttccgagcccgggacactcggatccgctgcctcttcttacagtcccctgggcctgaacggggtgccggggtctatttgggattttgtaagcggcagcttttcgccctcgccatcacctattctgtctgctggccctccctctagctcctctgctagccctaatggcgccgaactcgcccgggttcggaggcagctggatgaagcgaaacgaaagattcggcagtgggaggagagttggcagcaggtgaagcaggtgtgtgacgcatggcagagagaggcgcaggaggccaaggaaagagcgcgggtagcagattctgaccgtcagctggccttacagaaaaaggaggaggtggaggcccaggttaagcaattgcaagaggaattggagggcctcggtgtggcctcaacactccctggcctgcgggggtgtggagacatcggtaccattccactgcctaaacttcactcattgcagagtcagctccgtttagacctggaggcagtggatggtgtcatttttcagctgagagccaagcaatgcgtggcctgtcgtgagcgagctcatggcgcggtcctccggccttgccagcatcacattctctgcgagccctgtgctgccacagcgcctgaatgcccatactgtaagggccagccccttcaatggtag

SEQ ID NO: 16141 - DNA, 1461 bp, synthetic construct
  source 1..1461: mol_type = other DNA; note = Synthetic coding sequence
atgagcgtaacatacgacgattctgttggggtggaggtgtcatcggactccttctgggaggtgggcaactacaagagaactgtgaagagaattgatgacggccaccgcctgtgttcagatctgatgaactgcctgcatgagcgcgcgcggatagaaaaagcctatgctcagcagctgacggaatgggcgcgtagatggagacagctagtggagaaggggccacaatacggaaccgttgagaaggcctggatggccttcatgagcgaagcagagagggtgagcgagctgcacttagaagtgaaggcatcgctgatgaacgacgactttgaaaaaattaagaactggcagaaggaggcgttccacaaacagatgatggggggtttcaaagagacaaaagaagccgaggacggatttagaaaggcgcagaaaccttgggcaaaaaaactcaaggaagtggaagctgctaagaaagctcaccatgcggcctgtaaagaagagaagctggccattagtcgggaagcgaactcaaaggctgacccgtcattgaatcccgaacagttaaagaagctgcaagacaaaattgagaagtgcaaacaggatgttctgaaaaccaaggaaaaatatgaaaagagtttgaaagagctagaccaaggcacaccacagtatatggaaaatatggaacaggtatttgaacagtgtcagcagtttgaagagaagcgtctgcgcttttttcgagaggtgctgctcgaggttcagaagcatttggatctgagcaatgttgcgggatataaagccatataccatgatttggaacagtccatcagggcagcggacgccgtggaggatctgcgttggttccgggccaaccacggacctggcatggcaatgaactggcctcagttcgaagaatggagtgccgacttaaacaggactctaagtcggagggaaaagaaaaaggcaacagacggagttacactgactgggatcaaccagactggtgatcagagcctgcccagcaagcctagcagcactttaaacgttccttccaacccggcacagtcagcacagtctcagtcgtcctacaatccctttgaggacgaggacgacactgggtccactgtgtcggaaaaagacgacactaaagccaagaatgtatcaagttacgaaaaaacccagtcctaccccaccgactggtcggacgatgagtccaacaatccattttctagcacagatgctaacggggattcaaacccattcgatgacgatgccacatccggaacagaggtccgtgttagagccttgtacgattacgaaggccaagaacacgatgaactgtccttcaaggctggggatgagctgacaaagatggaggacgaagacgaacaggggtggtgcaaaggacggctggacaacggccaggtcggtctctatcctgccaattatgtcgaagccattcagtag

SEQ ID NO: 16142 - DNA, 3075 bp, synthetic construct
  source 1..3075: mol_type = other DNA; note = Synthetic coding sequence
atgaatttcatcaaagataattccagagccctcatccagcgaatgggaatgaccgttataaaacagattactgatgatttgttcgtgtggaacgtcttgaaccgagaagaagtgaatatcatttgttgcgagaaagtcgaacaggacgccgcccgcggcatcatacacatgatcttgaaaaagggatctgagagctgtaatctttttctgaaatcccttaaagaatggaattacccccttttccaggatcttaacggtcagagtctttttcaccagaccagtgaaggggatttagacgatttagcacaggatctgaaggatttgtaccacactccatcctttcttaacttctatccactcggagaagatatagatattattttcaatctcaaatcgacattcacagaaccagtgctctggagaaaggatcagcaccatcaccgagtagaacaattgacacttaacggactgctgcaggctcttcaaagcccgtgcataatcgagggtgaatcaggcaaaggaaaaagcacactgcttcagagaattgcaatgctctggggctctggaaaatgtaaggctctaactaagttcaaattcgtgttctttctgaggttatctcgcgcccagggaggcctttttgagacgctgtgtgatcagctcctggatattccagggactatccgtaaacagacgttcatggccatgttgctgaagctgcggcagcgggtcctttttctcttagacggatacaatgaatttaaaccacagaattgcccagagatcgaggcactgataaaagagaaccaccgcttcaagaatatggtgattgtgaccactaccactgagtgcctgagacacattcggcagttcggggcccttaccgcagaagtcggagacatgactgaagacagtgctcaggctctcatcagggaagtacttattaaggagctcgcggaaggtctgcttctccagatacagaagtcacgctgcctcagaaaccttatgaagactcctttgttcgtcgtaattacatgcgctatccagatgggggaatcggaatttcactcccacacccagacaacactgttccacacattctatgatctcctgattcagaagaacaagcacaagcataaaggcgtcgcagccagcgattttatccgttctctagaccactgcggagatctggcacttgaaggggtgttttcccacaaattcgacttcgagctgcaggacgtgagtagtgtgaacgaagacgtcctgctaactactggcctcctgtgcaaatataccgcccagagattcaagcccaaatataagtttttccacaaatctttccaggaatatacagcgggccggcgcttaagcagcctgctgacgagccacgaaccagaggaggtgacgaaaggaaacgggtatctgcaaaaaatggtatcaatctcggatataacctccacgtattcatccctgctgcggtatacatgcggtagctccgtcgaagcaacccgagccgtcatgaagcacctggccgctgtctatcagcatggatgtcttcttggcctgtccatcgctaagcggcctctgtggcgacaggaaagtttgcaaagtgtgaagaacaccaccgagcaggaaatcctgaaagctatcaatatcaactctttcgtggagtgtgggattcacctgtaccaggaaagcacgtccaaatcggcactgagccaggagttcgaggccttctttcagggcaaatccctttatatcaattctggaaacattcctgactatcttttcgatttcttcgagcatcttcctaattgcgcatccgccctcgactttattaagctggatttctacgggggagctatggctagctgggaaaaagccgctgaagatacgggaggaatccatatggaagaggcgccggaaacttatatcccctctagagccgtcagcctgttcttcaactggaaacaggagtttaggacccttgaagttacactaagggatttctcaaaactgaacaagcaagatatccgctatctgggtaagatctttagtagtgcaacgtcgcttaggctgcaaattaaacggtgcgctggtgttgccggctcccttagtctggtgctgagcacgtgtaagaatatttattctctgatggtggaagcttcgccgctgacgatagaagatgagcggcacatcactagcgttaccaatcttaagacgctctctattcacgaccttcagaaccagcgccttcccggaggcctcaccgacagtctcggaaatctgaaaaatctgacaaagctcattatggataatatcaagatgaacgaagaagatgcaatcaagcttgccgaggggttaaaaaatttaaaaaaaatgtgtctatttcaccttacacatctctcagatatcggagaaggaatggattatatcgtgaagtctctttccagtgagccatgcgatctcgaggagatccagttagtgtcgtgctgcctcagtgcgaatgccgtaaagatcctggcccagaatttgcataacctcgtcaaactttccatcctggatttgagcgagaattatttggaaaaagacgggaacgaggcccttcacgagctgatcgatcggatgaatgtattggaacagcttaccgctctcatgttgccttggggatgcgacgtgcagggatcccttagtagcctactcaaacacctggaggaggtaccccagttagtaaaactcggcctgaagaattggagactcacagataccgaaatcaggatcctgggcgcatttttcggaaaaaatccactgaagaatttccaacagttgaaccttgcaggcaatagggtttcttccgatggatggcttgcttttatgggcgtctttgagaacctgaaacaattggtattttttgacttctcaaccaaggaattcttgccagatcctgcattggtgcgcaaactatctcaggtcctttcaaagttgactttcttgcaggaggccagactggtgggctggcagttcgatgatgatgacctgtccgtaatcacaggagccttcaagctggtgacagcctag

SEQ ID NO: 16143 - DNA, 1767 bp, synthetic construct
  source 1..1767: mol_type = other DNA; note = Synthetic coding sequence
atgtcttcatgtgtgtcatcccaaccctccagcaatagagccgctccccaggacgagttggggggaagggggagctcatccagcgagtcacagaaaccatgcgaggctttgcggggcctctctagcttatccatccatcttgggatggagagcttcattgtggtgaccgaatgtgaacccggatgcgccgtcgacctggggttagcccgggaccgcccgttggaggccgacggacaagaagtacctctggatacatcaggttctcaggcccgcccacatttgtccggacgaaaactgagtctacaggaaagatctcagggcgggctggcagcaggcgggtcactggatatgaatggtcgatgcatctgtccctcactgccatacagccccgtcagcagccctcagtccagcccgagactgccacgcaggcctactgttgaatcacaccacgtcagtattaccggcatgcaggattgcgtgcagctcaatcaatacacattgaaagatgaaatcggaaagggctcgtacggcgtggtgaagttggcgtacaacgaaaatgataatacctactacgctatgaaagttctgagtaaaaaaaaacttattcggcaggctgggtttcccaggcggcctcccccgcgcggaaccagacccgctcctggaggatgcatacaacccagagggccaatcgaacaggtttatcaggaaatcgccatcctcaaaaaattggaccatcctaatgttgtcaaactggtagaggtgctggacgatccaaacgaggatcatctgtatatggtgttcgaactggtgaatcagggtccagtcatggaggtgcctaccttaaaaccactttcagaggatcaggctagattctactttcaggacctcataaagggtattgaatacctccattaccagaagataattcaccgcgacatcaaaccgtctaatctgctcgtcggagaggatggacatattaagatcgcagacttcggggttagtaatgagttcaagggatccgatgccctgttatccaacactgttggcacccctgcattcatggcgcccgagagcctctcggaaactaggaagattttcagtggtaaggctttggacgtgtgggcgatgggcgtgactctatattgcttcgttttcgggcagtgtcctttcatggatgagcgtattatgtgtttacacagtaaaataaaatcacaggccctcgaattccctgaccagcccgacatagcagaggacctcaaagatttgatcaccaggatgttggacaaaaatcccgaaagtcgaattgtagtgcctgaaataaagctacatccttgggtgacgagacatggtgccgaacctctgccctccgaggacgagaactgtacacttgtggaggtgactgaagaggaggtggaaaactctgttaagcacattccatctctggccactgtgattttagttaagacaatgatccggaagcggtctttcggcaacccctttgaaggatctcggagagaagaacggtctctgtcagctcccggtaatctgttgacgaaaaagccaacccgggagtgcgaaagccttagtgagctcaaagaggcaaggcagcgtagacaaccgcctggccatcgccccgcaccacggggcggaggtggcagcgccttggtccgcggatccccctgtgtggaaagctgctgggctcctgcccccggttcacctgctcggatgcatcccttacgcccagaggaagcaatggaaccagaatag

SEQ ID NO: 16144 - DNA, 666 bp, synthetic construct
  source 1..666: mol_type = other DNA; note = Synthetic coding sequence
atgctcaaaaataaggggcatagcagcaagaaagacaaccttgccgtaaacgcagtggccctacaggaccatatacttcatgatctgcagctccggaatctctccgtggctgatcattctaaaacgcaggtacaaaagaaggagaacaagtctctgaagagagacaccaaggcaataattgataccggcctcaagaagaccacgcagtgccccaagctggaagactctgagaaggagtacgttttagacccaaaacctccaccgctgaccttagcccagaagctcggactaatcggacctcccccgccccctttgtcatccgacgagtgggagaaggttaagcagaggtcactccttcagggcgactccgtgcagccctgccctatctgcaaggaggagttcgagctgaggcctcaggtgctcctctcctgtagtcacgttttccacaaggcctgcttgcaggccttcgagaagtttactaacaagaagacctgtcctctgtgtcgcaagaatcagtatcagaccagggtaattcacgatggtgcacggttgtttcggataaagtgcgtcacgaggattcaggcatattggcgcggatgcgtggtgagaaaatggtatcggaacctccggaaaacagtccctccgactgatgctaagctcagatag

SEQ ID NO: 16145 - DNA, 900 bp, synthetic construct
  source 1..900: mol_type = other DNA; note = Synthetic coding sequence
atggtggacaaaaagctggtggtcgtcttcgggggcaccggcgcccaaggtggttcagtcgcacgcacccttttagaagatgggacctttaaggtgcgcgtggtgacaaggaatcccagaaaaaaagcggccaaggaactgaggctgcagggcgccgaggtggtgcagggcgatcaggatgatcaggtcattatggaactagctctgaacggtgcgtacgccacctttattgtgacgaattactgggaaagttgctcacaggagcaggaagtgaagcagggtaaactcctggctgacctggctcggaggttgggtctgcactatgtggtatacagtgggctcgagaacataaagaaactgacagctgggagacttgccgctgcccacttcgatgggaagggcgaggtggaggagtatttccgcgatattggcgtgccaatgacttctgtacggttgccctgctatttcgaaaatctactgtcccatttcctgccccagaaggcgcctgatggcaagtcttatctattaagcttacccaccggggatgtgcccatggatggaatgtctgtgtcagacctcggcccagtagtgttatctctattgaaaatgcctgaaaaatacgtggggcagaacattggcctctcaacctgcagacatactgcagaggaatatgccgcgctcctgaccaagcatacgcgcaaggtggtgcacgacgctaagatgaccccagaggattacgagaaactcggcttccccggagcacgagacttggctaacatgttcaggttttacgcgctccggcccgaccgtgacatcgagcttacactgcgattgaacccaaaggcgttaacactcgaccagtggttagaacaacataagggcgacttcaacctgctctag

SEQ ID NO: 16146 - DNA, 2193 bp, synthetic construct
  source 1..2193: mol_type = other DNA; note = Synthetic coding sequence
atggaagatctatttgagacgttccaggatgagatgggtttctctaacatggaagacgatggtcccgaggaagaagagagggtagccgaacctcaggctaacttcaacacccctcaggcgctgcgattcgaggaactgctcgccaatctgctcaacgagcaacaccaaatcgcgaaagagctgtttgaacaactaaaaatgaagaagccttctgccaagcaacagaaagaggtcgaaaaggtcaagccccagtgcaaggaagtgcatcagactctgatattggaccccgcccaaaggaagcgtctgcagcaacaaatgcagcaacacgtgcagctcctcacacagatacatctgctggcaacttgcaatccgaacttaaatcctgaggcctccagcacacgcatttgtctcaaggaactgggaaccttcgcccaaagtagcattgcactgcaccatcagtacaatccaaaattccagaccctcttccaaccttgcaatcttatgggcgccatgcagcttatcgaagacttttccacgcacgttagcattgattgctcaccacacaagaccgtgaaaaagaccgccaacgaatttccttgccttccaaaacaagtggcttggattctggcaacatcaaaagtgtttatgtacccagagctgctgcccgtctgctccctcaaagcaaaaaacccgcaggataagatcttgttcactaaggccgaagacaacaaatacttgctcacttgcaagacagctcgccaacttactgtcaggatcaaaaatctcaatatgaacagagcccctgataacatcatcaaattctacaagaaaacgaagcaacttcccgttctgggcaaatgttgcgaggaaatacagcctcaccagtggaagccgccgattgaacgcgaagaacaccggcttccattttggctcaaggccagtctcccctccatccaggaagaacttagacacatggccgatggtgccagggaggttgggaatatgacaggaactaccgagattaattccgatcaagggctggagaaggataattcagagttgggatctgaaactagatatcccctgctgctcccaaaaggggtcgtactcaagctgaagcccgtcgccgatcgctttcctaaaaaagcttggcgccagaagcgctcttctgtcctgaagcccctgctcatacagccgtcaccatcgctccagccaagcttcaacccaggaaagaccccagcccagtcaacacactctgaagctcccccatctaagatggtgctccggatcccccatcccatccagccggccactgtacttcaaacagtcccaggggtaccaccactgggggtgtctggtggggagtcttttgagtcacccgctgctctgcccgcaatgcctcctgaggctcgtacctcatttccgctgtccgagagtcaaacactcttatcaagcgctccggttcctaaagtgatgatgccgtctcccgcctctagcatgtttaggaaaccctacgtgcggcggcggccgtccaagcggcgaggcgctcgcgcattcaggtgtataaagccggccccagtgattcatccagcatcagtgattttcacagtgccagctacaactgtgaagattgtgagcctcggagggggatgcaacatgatccaacccgttaacgccgccgtggcccaatcccctcaaactattccgattgccacactccttgtcaatccaacgtccttcccctgccctttaaatcagcccctggtagccagtagtgtttctcccctcatcgtgagtggaaactccgtcaatctccccatcccatcaacccctgaggataaagcccatatgaacgtggatattgcgtgcgccgtagcggacggagaaaatgcgtttcaaggtctggaacccaagctggaaccccaggagttgtctcccttaagcgccaccgtgtttcccaaggtggaacacagccccggaccaccccctgtagataagcagtgtcaggaaggtctgtccgagaactcggcctaccgttggacggtggtgaagacggaagaggggagacaagccctggaacctctaccacagggcatccaagagtcgcttaacaattctagcccaggagacctggaggaggtggtaaagatggagcctgaggatgctaccgaggagatttctggcttcctttag

SEQ ID NO: 16147 - DNA, 1563 bp, synthetic construct
  source 1..1563: mol_type = other DNA; note = Synthetic coding sequence
atgttcgtctccgatttcaggaaggaattctacgaagtggtccaatcccagcgcgttctcttgttcgtggctagcgatgtcgacgccctgtgcgcttgcaaaatactacaggccttgttccagtgcgaccatgttcagtatactctggtgcccgtgagtgggtggcaggagctggagacggcattcctcgagcacaaagaacagatcaagcttctgataaagcaggatgatgatcttgaggttcccgcttatgaagatattttcagggatgaggaggaggacgaggagcattcgggaaatgattctgacgggagcgagcccagtgagaaaagaacccggctcgaggaagagattgtggaacaaactatgcgccgcaggcagagaagagagtgggaagcaaggcgcagggatattctgtttgattacgagcaatacgagtatcacggcacctccagcgccatggttatgtttgaactagcctggatgctttctaaggatctgaatgatatgttatggtgggccattgtcggcctgacagatcagtgggtccaggataaaatcacccagatgaagtacgtaactgatgtgggggttctgcagaggcatgtatcgagacacaaccataggaatgaggacgaggaaaacacactgagcgttgattgtactcgcatcagcttcgaatatgatctgaggctggtcctctatcagcactggagcttgcacgactctctttgtaatacaagctatacagctgcaaggtttaaattatggtccgtgcacggacagaagcggctgcaggaattccttgccgatatggggctgcccttaaagcaagtgaagcagaaattccaggcaatggatataagcctaaaggagaatttgcgcgagatgatcgaagaatctgcaaataaattcgggatgaaagacatgagggtgcaaacatttagcattcattttgggtttaagcacaaatttctggcttccgacgtcgtgttcgccactatgagcctcatggagagtcccgaaaaggacggaagcgggaccgatcactttatccaggcactagacagcctctcccggagcaatttggataagctctatcacggactggagctcgccaagaaacagctccgtgccacgcagcaaacaattgcttcctgcctgtgtaccaacttggttatcagccagggaccatttttatactgttcacttatggagggaacacctgatgttatgctgttttctcggcccgctagtctctccttattgagcaaacacctcttgaaatccttcgtctgttccaccaagaatagaaggtgtaaacttctacctttagttatggctgcgcccctgtccatggagcacggaaccgtgaccgttgtgggaataccacccgagaccgactcctctgacaggaaaaacttcttcgggagggcttttgaaaaggcggcagagtccacctctagccgcatgctgcataaccattttgacctgagcgtaatagaactgaaagcagaggacagatcaaaatttctcgatgccctcatttcccttttgtcttag

SEQ ID NO: 16148 - DNA, 567 bp, synthetic construct
  source 1..567: mol_type = other DNA; note = Synthetic coding sequence
atgacagccccctcttgtgcctttccagttcagtttcggcagccgagtgtgagtgggctttctcagataactaagtccctctacatttctaatggtgtggcagcaaacaacaagctcatgctctcttcaaaccaaatcacgatggtaattaatgtgagcgtggaggtcgtgaacacactctatgaagatatacagtatatgcaggttcctgtcgccgacagccctaactcacgcctgtgcgacttctttgacccaatcgctgatcatattcacagtgtcgagatgaagcaagggcgcacactcctccactgcgctgcaggtgtatccagatctgccgctctgtgtctcgcttacttgatgaagtaccatgcgatgtcactgctcgacgcccacacttggaccaagagttgtcgaccaattatccggccaaactcagggttctgggagcagctgatacattacgagttccagctgttcggaaagaacacagtgcacatggtctctagccccgtgggtatgattcctgacatttacgaaaaggaggttaggctgatgatccccctgtag

SEQ ID NO: 16149 - DNA, 1182 bp, synthetic construct
  source 1..1182: mol_type = other DNA; note = Synthetic coding sequence
atggatgcagccacgcttacatacgatacgttgcgatttgcagagtttgaggattttcccgagacatcagaaccagtgtggattctggggcgaaagtattccatcttcaccgaaaaggatgaaattctatccgatgtggctagcaggctgtggttcacctacagaaaaaattttcccgccattggtggaacaggccctacatccgatacaggttgggggtgcatgctgcgatgtgggcagatgatcttcgcacaggcgttagtgtgtcgccacttaggacgcgactggagatggactcaacgtaagaggcaaccggatagttatttcagcgtgctgaatgcctttattgatcgcaaagacagctactactcaatccaccaaattgctcagatgggagttggcgagggcaaatctatcggccagtggtacggtcccaatactgtggctcaggtgttgaagaaactggcagtgtttgatacctggagctccctcgccgttcacattgcaatggacaacaccgtggtcatggaagagatccggaggctgtgccgcacttcagtcccctgtgccggagccactgcattcccagccgatagtgaccgccattgtaatggattcccagcaggtgctgaggtgaccaatcgccctagcccttggagaccactcgtcctgctgatcccattgaggttgggcttgactgacatcaatgaggcctatgtggagactttgaaacactgctttatgatgccgcaaagcttgggcgtgatcggcggaaagcccaactcagctcattatttcatcggttatgttggggaggagttaatttatctagatcctcacacaacccagcctgccgtggagcctactgatggatgctttatccctgacgaaagctttcactgtcagcacccaccatgcaggatgagcattgccgaactggacccgtccattgccgtgggattcttctgtaagaccgaggatgactttaatgattggtgtcaacaagtgaagaaactcagtctgctggggggagccttgcccatgttcgaactcgttgaacttcagccttcccacctggcttgtcccgatgttttgaatctgtcgctcgattcatcggacgttgagagactcgagcggtttttcgacagcgaagacgaagatttcgaaatactgagcttatag

SEQ ID NO: 16150 - DNA, 780 bp, synthetic construct
  source 1..780: mol_type = other DNA; note = Synthetic coding sequence
atgaaggacgtggataatctgaagagtatcaaagaagagtgggtctgcgaaaccggctccgacaaccagcccctgggtaataatcagcaaagtaattgtgagtacttcgttgatagcctcttcgaggaagcccaaaaggtctcttcaaagtgcgttagcccagccgaacagaaaaaacaggttgatgttaatatcaagctgtggaagaacggttttacagtgaacgacgatttcaggagctactcagacggagcatcccagcaatttctgaattctattaagaaaggcgaactgccctcggagcttcagggcatattcgacaaagaagaggttgatgttaaggtggaagacaagaagaacgaaatctgtctgtcaacaaagccggtgtttcagcccttttctggccagggacatagactagggagtgccaccccaaaaatcgtctcaaaggctaaaaacatcgaagtggagaataaaaataacctgagcgctgtgccgctgaacaatcttgagcctatcaccaatatccagatttggctcgccaatggcaagagaatcgtacagaagttcaacatcactcatagggtctcccacataaaggactttatagagaaataccagggttcacaacgctccccccctttcagcctcgccaccgcacttcccgttctgaggctgctagatgaaaccctgacacttgaggaggcggacctccaaaatgccgtcattatccagcggttgcagaagaccgctagtttccgcgaactgagcgaacattag

SEQ ID NO: 16151 - DNA, 852 bp, synthetic construct
  source 1..852: mol_type = other DNA; note = Synthetic coding sequence
atgattcctccccaagaagcctccgcacggcgaagagagattgaggacaagctgaaacaggaggaggagacgctgtcctttattcgcgattcgctagagaaaagcgatcaattaacgaagaacatggtgtcgattctgtcttccttcgagtcgcggcttatgaaactcgagaattccataatcccagtgcacaagcagacggagaatctacagcgcctgcaagagaatgttgaaaagaccctgtcctgcctggaccacgttatatcttactatcacgtggcgagtgacactgaaaagatcatccgcgaaggtccaacgggtaggttggaggaatatttggggagcatggcgaagatccaaaaggctgtcgagtatttccaggacaattctcccgacagcccagagctcaacaaggtgaagcttctctttgagcgcggtaaagaggccctagaaagcgagttcagaagcctgatgaccaggcattccaaagttgtgagccccgtgctcattctcgacttaatcagcggcgacgacgatctggaagcccaggaggatgtcaccctggagcatctcccagagtccgtgttgcaggacgtgattcggatatctcggtggctggtggaatacggacgcaaccaagatttcatgaatgtctattaccagatccgctcaagccagctggataggagtatcaagggccttaaagagcactttcacaagagctccagttcaagtggggtgccctattctccggctatacccaacaagcggaaagacacccctaccaagaaaccagtgaaacgcccaggggagccccctagctggcccatcagtgccactgcacgcggatag

SEQ ID NO: 16152 - DNA, 2121 bp, synthetic construct
  source 1..2121: mol_type = other DNA; note = Synthetic coding sequence
atgaatgaggctatggccaccgattctcctcggaggcccagtcggtgtacaggcggggtggtcgtgaggccccaggctgttaccgaacagtcatatatggaatcagtggtgacattccttcaagatgtggtgccacaagcctattctggaactcctctgactgaggagaaagaaaagatcgtctgggtgaggttcgagaacgcagatctcaatgacacatctcgcaatttggagttccacgagatccattctactggaaacgagcctcctctgcttatcatgattgggtattccgacggcatgcaggtgtggtccattccgatttctggagaagcccaggaactattttctgtaagacacggccctatccgggccgcgcgaatcctcccagccccacagttcggtgcacagaagtgcgacaattttgccgagaaacgcccactgctgggggtctgcaaatcaattggctcttccggcacaagcccgccatactgttgcgtggacctgtatagcctgcgcaccggcgagatggtgaagtcgatacagtttaaaactcccatatacgatctccactgtaacaaacgtatcctcgttgttgtattgcaggaaaaaattgccgcattcgattcttgcacttttacgaaaaagttcttcgttacctcatgttacccatgtcccggcccaaatatgaaccctattgcccttgggagtcggtggctggcttatgccgaaaacaaactgattcgttgccaccaatccagaggcggcgcctgtggggataatatccagtcctacacagctacggttatctctgccgcaaaaacccttaaatcagggctgacgatggttggaaaagtggtgacccagctgacagggacactaccgtccggggtgacagaagacgatgtggctattcacagcaacagtagacgcagtccactcgtcccagggatcattactgtaattgataccgaaaccgtgggagagggccaggtgctggttagcgaggactccgattccgacggaatcgtggctcatttcccagcccacgaaaagcctgtgtgctgcatggcttttaacacctctggcatgcttctggtgaccacagacaccctgggccatgacttccacgtgtttcaaattctaactcacccatggtcaagctcccaatgcgccgtccatcacctgtacacactgcaccggggcgagaccgaagcgaaggtgcaggacatctgtttctcacatgactgtcgctgggtggtggttagcacgctgcgtggtactagccatgtgtttccaatcaatccatatggcggacagccttgtgtcaggacccacatgtccccgcgagtggtgaataggatgtccagatttcagaagagtgccggcctagaggagatcgagcaggagttaacgtcaaaacaggggggtcggtgttcgcccgtccccgggctaagtagttccccaagcggaagtcccctccacgggaaactaaatagtcaagattcatataacaatttcacaaacaataatcctggcaacccccgcttatctccgttacccagcctgatggtggtgatgcccctcgcacagattaaacagcccatgacgctgggaacgattaccaaacgcaccggaccgtacctgtttggagccggctgctttagtataaaggctccctggtcctacataatgaccaaatacatcttttacatcaagcccccgaataaagttaaacctccacctcagatttctcctagtaagtcaatgggcggagagttttgcgtcgcggccattttcggcacaagtcgatcttggtttgccaacaatgctggcctgaagcgagaaaaggaccaatccaagcaggtcgttgtggagagtctgtacattatcagctgctatggcactttggttgagcacatgatggagccaaggcccctgtcaacggctcccaagatctccgatgatacccctctcgaaatgatgacttcaccaagagcaagctggacattggtgaggacccctcaatggaacgaattacagccccccttcaacgccaaccacccgctactactagcagcagacgccgtacaatactaccaattcctacttgcaggctag

SEQ ID NO: 16153 - DNA, 1815 bp, synthetic construct
  source 1..1815: mol_type = other DNA; note = Synthetic coding sequence
atggggggctgtttttcaaagccgaagccaggcgctgctctcccaaccgtcgaactgaaaatcgaagtcgtattacccgagaaagagcggggcaaggaggaactgagcgcgagcggaaaggggtcgccaagagcataccagggtaacgggaccgcaaggcacttccacactgaggagcgtctgtccacgccccacccctacccttcaccacaagactgtgtggaggctgccgtctgccacgtgaaagatctggagaatgggcaaatgagagaggtggaattgggctggggaaaagtgcttctggtgaaggacaacggggagtttcatgcactgggacataaatgtccacactatggcgccccgctcgtgaagggagttttgagtcggggccgtgtcagatgtccctggcatggagcctgttttaatatatcaacaggagacctggaggattttccgggcctcgactccttgcacaaatttcaggttaagatcgagaaagagaaggtctatgtgcgagctagtaagcaggccttgcagctgcagcgccggaccaaagttatggctaagtgcatttcgccttcggcaggctattccagcagcacaaacgtcctgatcgttggtgccggcgcagctggacttgtgtgcgccgaaactctgagacaggaaggctttagcgataggatagtgctctgtaccctcgataggcacctgccctatgacagaccaaaattgtccaagagtctggacacgcagccagagcagctggcactccggcctaaggagttctttagggcttatgggatcgaagtgctaacagaagcacaggtggtaacagttgatgtccgtaccaaaaaggtcgtcttcaaagacggattcaagttggaatactctaaactgctgctggcccccggcagcagtcccaaaacactgtcttgcaagggtaaggaggtagagaatgtgttcacaatccgaactcctgaggatgctaatcgggttgttaggttggcccgcggacgcaatgtcgtcgtggtcggcgccggattcctgggcatggaggttgctgcgtacctgaccgaaaaagctcatagcgtgagcgtcgtagagctggaggagactcccttcagacggttcttaggcgaacgggtcggaagggcactaatgaaaatgtttgagaataacagggtgaaattctacatgcaaactgaagtctctgagctgcgaggccaggaagggaaattaaaagaagtggtgctgaaatcctcaaaggtggtcagagccgacgtgtgtgtggtcggaattggtgccgtcccagccacggggttcttgagacagagcgggattggattggattcacgcggattcattcccgtgaacaagatgatgcagacaaacgtgccgggcgtgttcgctgcaggtgacgctgtgacttttccactagcttggaggaacaatcggaaggtgaacattcctcattggcagatggcccatgcccaggggagggtggccgcccaaaacatgctggcgcaggaggcagaaatgtcgacagtgccgtacttgtggacagccatgtttgggaaatcattgagatacgctggttacggtgagggcttcgatgacgtcataattcagggcgatctggaggagctgaagtttgtcgcattttatactaaaggggatgaggtgatcgccgttgccagcatgaattacgaccccatagtgtcaaaggtggcagaagtgctcgctagcggtagggccatccgtaagagggaagtggagaccggcgatatgtcttggctcaccggcaaagggtcctag

SEQ ID NO: 16154 - DNA, 744 bp, synthetic construct
  source 1..744: mol_type = other DNA; note = Synthetic coding sequence
atgagcacggcagccgttcctgagctcaaacagatctctagagttgaagccatgcggcttggaccaggctggagccactcctgtcacgccatgctgtatgccgccaaccccggtcaacttttcgggcgaattccaatgcgattcagtgtgctcatgcaaatgcgcttcgacgggcttctgggtttcccagggggttttgtggataggaggttttggagcctagaagacggcctgaacagagttctgggactcgggttgggttgcctgagactgacagaagctgactacctgtccagtcacctgaccgagggtcctcatcgcgtggtcgcccatctgtatgcccgtcagctgactctggagcagttgcacgctgtggaaatctctgcagtgcatagcagggatcacggactcgaggtcggtccacccccagggccacgcccaccaccaagggggctggccctcgccccctggaaggcgcctatgggaaacactagccccgagggacctctggccggcttaggtagggtttccctaagtcccgcaatgggttggggggaaggcagcggggccggccgtcctggaaaggagggtagaggatgggggcctgctctcgggctccctcaggggtgcgtcacgtcggccctgctcccagccatcgccaatcccgggagcgggggggttggctctgtgggccgtaagggttggggccgttccggtgactgtttgggtagttgggagacctag

SEQ ID NO: 16155 - DNA, 1338 bp, synthetic construct
  source 1..1338: mol_type = other DNA; note = Synthetic coding sequence
atgtacccgaatccccttatctactgtacctgctgggacccgtggaacctgggccccagaaagctgatcaagaccccccagctccctcgtaaaaacagcactggctccagcaagctgactccactggtgccagccccaaagaaccataactacctacaacccaccaagcctgtcgtatcaccaaagatgaaaattcatagcgcaaggcaggaagagaccaacaaatccttttacgaggtaatcaatgtgagtccggggtaccaactcgtccgcaacagggaacagatatcagtcaccctgggagacgaaatgtttgatagaaagaaacggtgggagtcagaaatcccggataaaggcagattctctcgaactaatatcatttccgacctggaagaacagatctcagaactcaccgcaatcatcgagcagatgaatcgggatcaccagtccgcacagaaactgctgtcttccgagatggacctccgctgtgctgagatgaagcagaacttcgagaacaaaaatagggagctaaaggaagcccatgaggctgagttatcagaactggaaaacaattacaaggcagccttaaaagcagagaaactggcggctcaggagaaattggaagaaatgggtaaagagtacaaatatctcaagaatatgtttcgaacatatcaagattccatatacgacgagatggaggaaaagtggtccaagcagaaggccaaatggaaaaaggacgaaaagtttgagcgggaaaacatcctcctgcaacagaaaaagaagatgactaaaaagtttgagatggaatctggagaagaggacaaaaaaattaacgaatcctgtagcgcagtattcgaaaacttcatccaggaaaaagaggagttgctgaagcagcaccagagcgataccctccagttggaggagttacgcaaaaccaaggaggtgccctggagaagggaccagatcaatcgacactggcacgacgtgctgcagcaattactgttaatgcaagtgatgcaggaggaattacacgctcaggccttgatactggaaagcctgaataccaatctgtactatacccaattggagctccagaaagaaaaggctatagtcgggaatttggagaaaatgctgcagaccaaattcgcggaaacggaggagaagtacaaacacactattcagatcctcacggaagagaatatacaccttaagcaaaagataataagcaagaacgaggaaatttgcgagggctgttctgggcggctagcttctattacggtcagtaaggatgactctgacacggtccaggacgggtccaaaaagggtcaggaatcctag

SEQ ID NO: 16156 - DNA, 1335 bp, synthetic construct
  source 1..1335: mol_type = other DNA; note = Synthetic coding sequence
ttcagggtcccagccgctggaaggaggtgcccactggctcgaggagccaggcggcctcctgacagcgcctgcggcaggtttccacccgaccctggatctcccccagaggaagaggatgcagacctaagcgagcgggaggagagctggctgctggccgaaagagaggagaatcaggaggcagagtttcctggactccggcgtgctgtgcaactaaatttgtcccgcccgattgaggagcagggtccgttggatgttattatacacaagttaacagacgttatacttgaggccgatcagaatgacagccagtcactcgaactggttcataggttccaggagtatatagacgctcatcccgagaccatcgtgctcgatccactccctgccatccgaaccctgcttgatagatctaagagctacgaactgataaggaagatcgaagcctatatggaggatgataggatctgttctccaccctttatggaattaacaagtctgtgtggggacgacaccatgaggttgttggaaaagaatggcttgacctttcccttcatttgtaagactcgtgttgcccatgggaccaattcgcacgagatggccatcgtcttcaatcaggagggactgaatgcgatccagcctccatgcgtggtgcagaattttattaaccataatgcagtcctgtacaaggtcttcgtagtgggcgaatcttacactgtggttcagaggccaagcttaaagaacttttccgccggaacatcagacagagagagcatctttttcaacagccacaatgttagcaaaccagagagttcctctgttttgacagagctagacaagattgagggagtttttgaaagaccgtccgatgaagtgatcagagagctctctcgcgcgctgcgccaggccctgggcgtgtccctcttcgggatcgacatcattatcaataatcaaacgggtcagcacgccgtgattgacattaatgcttttcccggatatgaaggagtgagcgaattcttcactgatctgctgaatcatattgctactgtgctccagggtcagtcaactgcgatggcggcaactggcgacgtcgcgcttctcagacactccaagttactggctgagcctgccggggggctcgttggcgagagaacctgctctgcgagcccaggatgttgcggctctatgatgggccaggatgccccatggaaagctgaagccgacgccggagggacagccaagttgccacatcagcgcctgggttgtaacgcgggagtcagtccttcgtttcagcagcactgcgtggctagcttagcaaccaaagcctctagccagtag

SEQ ID NO: 16157 - DNA, 864 bp, synthetic construct
  source 1..864: mol_type = other DNA; note = Synthetic coding sequence
atgtgtggacgcaggagaaggcaaagagcagccctgctttcgcactgggatcccactctgagttctgactgggatggggagcgaacagctcctcagtgcctgctgagaattaagagggacatcatgtccatttacaaggagcccccccctggcatgttcgtagtcccagacaccgtggacatgactaaaatacatgcactgatcaccggcccttttgatactccatatgaaggcgggtttttcttattcgtatttaggtgtcctccagactatcctatccaccctccccgggttaaacttatgactacagggaacaataccgtgaggtttaaccctaatttttacaggaatggtaaagtgtgcctctcgatccttggcacttggacaggacctgcatggagcccagcccagagtatctcatccgttctgatatcgatccaaagtcttatgactgagaacccatatcacaacgaacccggattcgagcaggaacggcacccaggagactctaagaactataatgaatgtataagacacgaaactattagggtggcagtctgcgacatgatggagggtaaatgtccctgtcctgagcccctgcggggagtgatggagaaaagcttcttagagtactacgatttttatgaggtcgcatgtaaggaccggctccacctacaggggcagaccatgcaggatccttttggcgagaagcgaggccactttgactaccagagtctgttgatgcgactcgggttgatcagacagaaagtgctggaaaggctgcataatgagaacgcggaaatggatagcgattcctcaagcagtggtacagagaccgatttgcatgggtccctcagggtgtag

SEQ ID NO: 16158 - DNA, 852 bp, synthetic construct
  source 1..852: mol_type = other DNA; note = Synthetic coding sequence
cccccatgcagcctcatttcagattgttgcgccggcaatcagagggatagcgtcggcgtgggcccctccgaacccggctgttacccgtgtcctggaccaaatatgaacccgatagccctgggctcccgctggctcgcgtatgccgagaataagttaatccggtgtcatcagtcacgagggggagcctgcggcgataatatacagtcatataccgccactgtaattagtgcagctaaaaccctgaagagtggattgactatggtaggcaaggtggtcacacaattaacaggaacccttcctagcggggtaaccgaagacgacgtggccatccattctaactctagacggtctcctctggtgcctgggataatcacagtcatagacaccgagactgtgggagagggccaggtccttgttagtgaggacagcgatagcgatgggatagtagctcattttcccgcacacgaaaaaccggtctgctgcatggcgtttaacactagtggaatgcttctcgtaacaacagatacactcggacacgattttcacgtgttccagatcctgacccatccttggagttcatcgcagtgcgctgttcaccatctctataccctccaccggggcgagactgaagccaaagtgcaagatatctgcttttcacatgattgcagatgggttgtcgtgtctaccctgcgtgggacttcacatgtcttccccatcaacccctacggagggcagccctgtgttcgcacacatatgtcacccagggttgtgaatcggatgtcaagattccagaaaagcgccggcctggaggaaatagagcaggaactgacctctaaacagggtgggcgttag

SEQ ID NO: 16159 - DNA, 2235 bp, synthetic construct
  source 1..2235: mol_type = other DNA; note = Synthetic coding sequence
atgagcgcagccaatcccgagactcccaattcgacgataagccgcgaggctagtactcagagtagctctgcggccgcgagtcagggctgggtcctccctgagggcaagattgtgccaaatactgtgtttgtggggggaattgatgctaggatggatgagacagagatcggctcatgttttgggagatacggctctgttaaagaggtcaaaattatcacgaatcggacgggtgtttcaaaggggtatggattcgtcagctttgttaatgacgtggacgtgcaaaagatagtcgggtcgcaaatccatttccacgggaagaagctgaaattgggacctgcaattcggaaacaaaagctgtgcgctaggcatgtgcaacccagacctcttgtggtgaatcctcccccccccccacaatttcaaaatgtttggcggaaccctaacaccgagacctacctccagccccaaatcacacccaatcctgtcacccagcacgtccagagcgctgccaatccagagactcccaattccacaatctcgcgggaggcatccacgcaaagcagtagcgccgccgctagccaaggctgggtgctgcctgagggaaagatcgttccaaatacggtctttgtagggggaatcgacgccagaatggatgagaccgaaattggctcctgcttcgggaggtatggcagtgttaaagaggtcaagataattacaaatcgcactggcgtaagcaaaggatacgggtttgtgagcttcgtgaacgatgtggatgtccaaaaaatcgtgggatcacaaatccatttccatggaaaaaaactcaaactggggccagcaatcagaaagcaaaagttgtgtgcaaggcatgtgcagccccgcccattggtggtcaaccctccccccccgccccagtttcagaacgtatggaggaaccctaacactgaaacctacttgcaaccccagattacaccgaacccagtcacacaacacgtgcagagcgcggccaatccagaaactcccaactctacaatctctcgggaggcgtccactcagtctagctccgcagcggccagtcagggctgggttctcccagaagggaagattgtacccaatacagtgttcgtcggaggtatcgatgcccgaatggacgaaactgaaatcggatcttgtttcggaagatacggctccgtgaaggaggtgaagatcataaccaacagaaccggggtgtctaagggctatgggttcgtgagttttgtgaacgacgtagacgtacaaaagatcgtggggagtcagatccactttcatggcaagaagttgaaattggggcctgcgattagaaaacagaagctgtgcgcaagacacgtgcaacctcgcccactggttgtgaatccaccacctcctccccagttccagaacgtgtggcgtaaccccaacaccgagacctaccttcagccacagattactcctaaccccgtgacacagcacgtgcaggcttattctgcctatccacatagtcccggtcaggtgattaccggttgccaattgttagtctacaactatcaggagtaccctacctaccccgattctgccttccaggtaactacaggttaccaactgcccgtgtataattatcaaccttttccagcttaccccagaagtcccttccaggtgaccgcaggataccagctgcccgtctataattatcaagcattccctgcctacccaaactctccgtttcaggtggccacaggataccagttcccagtctataactaccagcctttccccgcctatccatcctcaccatttcaagtcaccgctggataccaactgcctgtctacaactaccaagcttttcccgcctatcccaactctcccttccaggtggcaactggataccagtttcctgtatataactaccaggcatttcctgcataccctaacagtccagtgcaggtgactacaggctaccagctccccgtctataactaccaagcgttccccgcttacccttcaagtccctttcaagttacaactgggtaccaactcccagtctataattaccaggcattccccgcctaccccaatagcgctgttcaagtgaccactggctatcagtttcatgtgtataattatcagatgccccctcagtgtcctgtcggcgagcagcgtcgcaacctgtggacagaggcctacaagtggtggtacctggtgtgcctcattcaaaggcgagactag

SEQ ID NO: 16160 - DNA, 1089 bp, synthetic construct
  source 1..1089: mol_type = other DNA; note = Synthetic coding sequence
atgctcaaaaataaggggcattcgtctaaaaaagacaacctggcggttaatgctgtcgccttgcaggaccacatactgcatgacctgcagctgcgcaacctatcagtggccgatcattccaagacgcaagtccaaaagaaagaaaacaagtcactgaagagggacacgaaagcaattatcgacacaggcctgaaaaaaaccacccagtgtcccaaactggaagacagcgagaaggagtacgtgctggaccctaaaccacctccactcactttagcccagaaactcggcctcatcggtccgcctcccccaccactgagctctgatgagtgggaaaaagtgaaacagaggtccctgttgcaaggagattccgtgcagccatgcccgatctgtaaggaggagtttgagctaagaccccaagtgcttctcagttgcagtcatgtgttccacaaagcttgtctgcaagctttcgagaagttcactaacaaaaaaacttgtcccctgtgccggaagaaccagtatcaaacaagggtgatccatgatggcgctaggctgttcaggattaaatgcgtcacacgaatacaggcgtactggcgtggttgtgtagtccggaagtggtatcgtaatctgagaaagaccgtgccacctaccgatgctaagctcagaaagaaattttttgaaaaaaagttcactgaaatatctcaccggatcttgtgctcttacaatacaaatattgaagaacttttcgccgagatagatcagtgcctggccatcaaccgctctgttctgcagcagcttgaagagaagtgtggtcatgaaattacagaggaggagtgggaaaagatccaggtgcaggctctccggagggagacccatgaatgcagcatctgccttgcccctcttagcgcagctggcggacagagagtgggcgcagggaggagatcccgcgaaatggccctgttgtcttgcagccatgtcttccatcatgcttgcttattggctcttgaggagttctcagtgggagatcggccccccttccacgcctgtcctctgtgtaggtcatgttatcagaagaagatattggagtgctag

SEQ ID NO: 16161 - DNA, 2130 bp, synthetic construct
  source 1..2130: mol_type = other DNA; note = Synthetic coding sequence
atggccgatgccggtatccgccgggtggtcccttccgatctgtacccattggtcctggggtttttgcgtgataaccaactctctgaggttgctaataaattcgctaaggcaaccggcgcaacccaacaagacgccaatgccagctccttactggacatttattccttctggctgaagagcgcaaaagttcctgagcgcaagttgcaggcaaatggacccgtggctaagaaagcgaagaagaaagcatcgtcgtcagatagcgaggactcatccgaggaagaggaagaggtccaaggcccccccgcaaagaaagccgccgtacctgctaaaagagtgggactgccgccagggaaggccgccgccaaggcttctgagtcttccagtagtgaggaatcgtctgacgatgacgatgaggaagatcaaaaaaagcagcccgtgcagaagggagtgaaaccccaggcaaaggcagccaaggcgcctccaaaaaaagcgaagagttccgactctgacagcgacagtagtagcgaggacgagcctcccaaaaatcagaaacctaaaatcactcccgtcaccgtaaaggcccagacaaaggcccctcctaaaccggctagagccgctcctaagatagccaacggaaaagctgcaagtagctcttccagttcatcctcttcttcctcaagcgatgattccgaggaagagaaggccgccgctactccaaagaaagtctggacgatcacaagtgtccgagctgagacagtgcccaaaaagcaggttgtggccaaagcacccgtgaaggcggccaccacccctacgagaaaatcctccagcagcgaggattcttcttcggatgaggaagaggaacaaaaaaagccgatgaagaacaagcctgggccttactcttcggtgcctcccccctcagccccccctcccaaaaagtccctgggcacacagcctcctaagaaagccgtggagaagcagcagcctgtggaaagctccgaggattctagcgacgagtccgacagctcctctgaagaagagaagaaacctcctaccaaagccgtggtcagcaaggccacaaccaagccaccccctgccaaaaaggccgccgagtcgtcttctgattccagtgactctgacagttctgaggacgatgaggcaccatctaagcctgccgggaccaccaagaactcctccaacaagcctgccgtgactacaaagagtcccgcagtgaaacccgccgccgctcctaaacagccagtcgggggcggccagaagttgttaacacggaaagctgactcttctagctctgaagaagaatcttcatcctctgaagaggaaaaaacaaagaaaatggtggccacaaccaagcctaaggctacggccaaagctgctctgagcctccccgccaaacaggcccctcaaggttccagagatagttcctctgacagtgattccagctcctcagaggaagaagaagaaaaaacatcgaagtcagccgtgaaaaaaaagccacagaaggtcgcaggtggcgcggccccctctaagcccgcttcggccaaaaaggggaaggcagagtccagtaatagctcatcttctgatgattcgagcgaagaggaggaggagaagttgaaaggaaaaggctcccctaggccacaggctcccaaagcaaatgggacatccgcccttaccgcccagaacggtaaagctgccaagaactccgaggaagaagaggaggagaagaagaaagccgccgtggtagtcagcaagtcaggcagcctgaagaaaaggaaacaaaatgaagccgctaaagaggcggaaacaccacaggcaaaaaagatcaagcttcaaactcctaacacctttcccaagaggaaaaagggcgagaagcgggcttcatcaccttttaggcgtgtgcgcgaagaagagattgaggtggactcacgagttgccgataactcatttgacgccaaacgaggggccgccggagattggggagagcgagccaatcaggtgctgaaattcacaaaggggaaatcttttagacatgaaaagactaagaaaaagcgcggttcttaccgaggtgggtctatctcagtgcaggtgaactccatcaaatttgattccgaatag

SEQ ID NO: 16162 - DNA, 558 bp, synthetic construct
  source 1..558: mol_type = other DNA; note = Synthetic coding sequence
atgcagcagaagtcacaaaaaaaggcggaactgctggataacgaaaaacctgccgccgtggtcgcccccatcactactggttacaccgtgaagatatcaaactatggctgggaccagtctgacaaattcgtgaagatttatatcaccctcacaggtgtgcatcaggttccaacagagaacgtgcaagtgcactttaccgagagatcgtttgacctgttagtaaagaacctcaacggcaaatcctactctatgatcgtgaataaccttctcaagcccatttccgttgaaggatcctccaaaaaggtaaagaccgataccgttctgattctgtgcaggaaaaaggtcgagaatactcggtgggactacttgacgcaggtggaaaaggagtgcaaggaaaaagagaagccatcttacgacacggaaacggatccatctgagggtctcatgaatgttctgaagaagatttacgaagatggcgacgacgacatgaagagaaccataaacaaagcttgggttgaaagccgggaaaagcaggccaagggagacaccgagttctag

SEQ ID NO: 16163 - DNA, 1764 bp, synthetic construct
  source 1..1764: mol_type = other DNA; note = Synthetic coding sequence
atggccagtgaggatatagccaagctggccgagacacttgctaagacgcaagtggccggcgggcaacttagtttcaagggcaaatccctgaaattaaacactgcagaagatgccaaggatgtgataaaggaaatcgaggatttcgatagcttagaagccctccgcctggaaggtaacacagtgggcgtggaagccgccagagtcatcgccaaggcattggagaagaaaagtgaactgaagaggtgtcattggagcgatatgttcacaggcaggctcagaactgagatcccccccgcactcatttcgctgggcgaaggcctgatcactgctggcgcgcaactggtggagttggatctttcagataacgcctttggaccagatggtgtgcagggattcgaagccctcctaaagagttctgcatgttttaccctgcaggaactgaaactgaataactgtggcatggggattggaggaggcaagatcttagctgccgccctcaccgagtgccatcggaaatccagcgcccagggaaaacctctggccctgaaggtattcgtcgcgggccggaaccgcctggagaacgacggagccactgccctagccgaggcctttcgagttataggaactcttgaagaggtgcatatgccacagaacgggatcaatcacccaggaatcacagccctcgcccaggcttttgccgtgaaccccctcctccgcgtaattaatcttaacgataacacctttaccgaaaagggggccgtggccatggcagaaaccctgaaaacgctgcggcaggtcgaggtcattaatttcggtgattgtttggtgcgatcgaagggtgctgttgccatcgcagatgcaatccgaggtggtttgcctaagctgaaagaactaaacctctcattctgtgagattaagcgggatgccgcccttgcggtcgcagaagctatggccgacaaagctgagttggagaagctggacctcaacgggaacaccctgggcgaggagggatgcgaacaattgcaagaggtactggagggattcaacatggccaaggtgttagcctctctgtccgatgatgaggatgaggaagaggaagaggaaggggaagaagaggaggaagaggccgaagaggaggaggaggaagatgaagaggaagaggaggaggaagaagaagaggaagaagaggaaccccagcagcgtggacagggcgaaaagagcgcaaccccgagccgtaagatcttagacccgaatacaggcgagcctgctcctgttctgtcctcaccgccccccgccgacgtgtcaacttttctggcctttccgtctccagaaaagctgctgagacttgggcctaagtcaagcgtgttaatcgctcagcaaactgatacatctgatcccgaaaaagttgtcagtgctttcctgaaggtcagcagcgtcttcaaggacgaggcaaccgtgcgcatggcagtgcaggacgctgtggacgcattgatgcagaaagcatttaactcgtctagctttaactccaatacatttctgacccgactgctggtgcatatgggattgctgaaaagtgaggacaaggtaaaagcgattgcaaacctgtatggcccgctgatggctttaaaccatatggtgcagcaagattatttcccaaaggccctggccccactcctactggcttttgtgacaaagcccaactccgcgctcgagtcttgctctttcgccagacattcactgttacagaccttgtataaggtgtag

SEQ ID NO: 16164 - DNA, 1098 bp, synthetic construct
  source 1..1098: mol_type = other DNA; note = Synthetic coding sequence
atgaaggagttatggtgcgtgatggactgggcagtgccgggcctgctgggaagcggcacctacttcaagaagcagttctccgacccagtggaacatgggcagagacatacagccactaagcgggaattggcaacggggcgaaaggcaatgcagcggctcgccaagaagatgtcgggttggttcttgcgacgaaccaaaacactgatcaaagaccagctgcccaagaaagaggaccggatggtgtactgtagcttgacagattttcagaaagccgtctaccagacagttttggagactgaggacgttaccctcatcttgcagtccagcgaaccctgtacttgcagatctggacaaaagagaaggaattgttgctataagactaattcacacggtgagactgtgaaaaccctgtacctctcctacttgaccgtgctacagaaggtggccaaccatgtggctctgcttcaggctgcctctacctccaaacagcaggagaccctcattaaaaggatttgtgaccaagtcttttctagatttccagatttcgtccaaaagtctaaagatgctgcctttgaaactctgagtgatcctaagtactctgggaaaatgaaagtcttacaacaattgctgaaccactgccgtaaaaacagggataaggtgctgctgttttcgttcagcacgaaactgctcgatgtattgcagcagtattgtatggccagcggtctggattaccgtagactggacggttcaactaaatctgaagaaagacttaagatcgttaaggagtttaactccactcaggatgtgaatatctgtctggtgagtactatggcgggggggttgggactgaacttcgtgggtgcaaacgtagtagttctgtttgaccctacatggaacccggccaatgatctgcaggccattgatcggacgcagacgcactgcaggcgagagcgtgatgctgaaccactttcctcggcgcctggcctgcaaaacggcagtgaaaacgccgttccttatccatggtggtgttgcgtgacaggggccagtatatcatgttggaggtgtgagatatgccgcatccaagatgtgcttgagtag

SEQ ID NO: 16165 - DNA, 1104 bp, synthetic construct
  source 1..1104: mol_type = other DNA; note = Synthetic coding sequence
atggagaaaaagaagatggtcacacaaggaaaccaagagcccacaaccactccagatgccatggtccagccattcaccacaatacccttccctccccccccccaaaatggcatccccaccgagtacggagtgccccacacacaggattacgctgggcaaactggtgagcataatctcacgctgtatggctctactcaagcccacggcgagcagagtagcaactcaccgtcaacccaaaatggaagccttacacagaccgaaggaggcgcacagacagatggccagcagtctcaaactcagtcgtctgagaattccgagtcaaagtcgactcctaagagacttcatgtgagcaacattcctttccgattcagagaccctgacctaagacaaatgttcggccagttcggcaagatcctcgacgtcgagattattttcaatgaacgagggagtaagggcttcggcttcgtcacgttcgagaactcagctgatgctgatcgggcaagagaaaagctgcatgggacagtcgtcgaggggaggaagatcgaagttaataacgccacggcgagggtaatgacaaataaaaaaatggtgacaccatatgctaacggatggaaactcagccctgtcgtcggcgccgtatacggccctgaactgtatgccgctagctccttccaagctgacgtgtccctgggcaacgatgctgcagtgcccctttctggccgaggcggcataaacacctacattccattaataatccccggtttcccatacccgaccgccgctacgactgccgcagccttcaggggggcccatctgcgggggaggggccgcacagtgtatggcgccgttagggctgtgcctccaacagctatcccagcctaccccggtgttgacatgcagccaaccgatatgcattccctactgctccagcctcagccccctctgctgcagcccttgcaacctttgacagtcaccgtcatggctgggtgtacacaacctacccctaccatgcccctgcccctgccgttggccatggagctggccctgtggagggtctatacggaagtagccacggccgacctgccacctacagaggtgacctag

SEQ ID NO: 16166 - DNA, 1764 bp, synthetic construct
  source 1..1764: mol_type = other DNA; note = Synthetic coding sequence
atggcttccgaagacatagccaaacttgccgaaacactggcgaagacacaagtggcaggtggccaacttagcttcaaaggcaaatctctgaagctcaatacagccgaagacgctaaggacgttattaaggaaattgaagatttcgacagcctggaggccttgcggttggaaggcaacacggttggcgtcgaggccgcgagagtgatcgccaaagcactagaaaaaaagagcgagctaaagcgctgccattggtcggacatgttcaccggtcgcctgcggacagagattcctcccgccctgatctctctcggcgagggactaattactgcaggagctcagttagtggaacttgacctttcggacaacgcgttcgggccagacggagtacaggggttcgaggccctccttaaatcttccgcatgctttactctgcaggaactgaagctcaataactgcggaatgggtatcgggggcgggaaaattcttgcagcggccttgactgaatgccaccgcaagtcttccgcacagggtaagcctcttgccttaaaggtgttcgtcgctggccggaacaggcttgagaacgatggggcaaccgcactggccgaggctttcagggttattggcaccttggaagaagttcatatgccccaaaatgggatcaaccacccaggtatcacggctctggcccaggcattcgccgtcaatcctctcctgcgcgtaattaatctgaacgacaacacgtttacagagaagggagcagtagcgatggctgagactctgaagactcttcggcaggtagaagttatcaacttcggcgattgtcttgtaaggtctaaaggcgccgtagctatcgccgatgcaatcagaggtggactgcccaaactcaaagaactcaatctttccttttgcgagatcaagcgggacgccgccctggctgtagctgaagccatggccgataaagctgaactggagaagctggacctcaacggcaacacactgggcgaggaagggtgtgaacaactgcaagaggtactggagggttttaatatggcaaaggttctggcttctctctctgacgatgaggatgaagaggaagaggaggagggcgaagaagaagaggaagaggccgaggaggaggaggaggaggatgaggaagaagaagaggaagaggaagaagaagaagaggaagaaccacaacagcgagggcagggggagaagagcgccaccccctcccgtaagattctagacccaaatacaggtgaaccggcaccagtattgtcaagtccaccaccggcggacgtctctactttcctggccttccccagtcccgaaaagctgctgcgtctgggacctaagtccagcgttctgatagcacagcagacggatacatcagaccctgagaaggtcgtctcagcttttctgaaggtgagcagcgtttttaaagatgaagcgacagtacggatggccgtccaggatgcagtagacgcgctcatgcagaaggcattcaattctagcagcttcaattcgaacacattccttactaggctgctcgttcatatggggctgctcaagtctgaggataaagtaaaagcaatagcgaacctctacggaccgcttatggctctcaaccacatggtgcagcaggactactttcccaaagccctggcgcctctgttgctggcattcgtgactaagccaaacagcgccctggagtcctgctctttcgcacggcatagcttgcttcagaccctgtacaaggtgtag

SEQ ID NO: 16167 - DNA, 1143 bp, synthetic construct
  source 1..1143: mol_type = other DNA; note = Synthetic coding sequence
atggacgccgctactctcacgtacgacactctgaggttcgctgagttcgaggacttcccagaaacctctgaacctgtttggattttgggcaggaagtactctatcttcactgaaaaggacgagatcctctccgatgtggccagtaggttatggtttacttaccgcaagaattttccagccatcggcggcaccgggcccacatcagacacaggatggggctgtatgctgcggtgcggccagatgatttttgcacaggccctggtctgcaggcatcttggaagggattggaggtggactcaaaggaagaggcagccagactcttatttttcagttttgaacgctttcattgatagaaaagacagctactattcaatccatcagatcgcacagatgggagtgggagagggcaagtccatcggccaatggtacggcccaaataccgttgcccaggtcctcaaaaagctggctgtttttgacacctggtcaagtctcgctgtgcatatcgccatggacaacaccgtagttatggaagagatcagaaggctgtgccggacgtctgtaccttgcgcaggagctaccgccttcccagccgatagtgatcggcactgcaacggattccctgcgggagcagaggtgactaataggccctctccatggagacctctggtgcttctgattcctctgcgactcggtctaactgatattaacgaagcatacgtggagaccctaaagcactgcttcatgatgccgcaatcactcggtgttatcggggggaagccaaactcggcccattatttcatcgggtatgtcggggaagagctgatctaccttgatcctcatacaacacagcctgcagtcgagcccactgacgggtgtttcatccctgacgagtcttttcactgtcagcacccaccctgcaggatgtcaattgcagagctggatccatccattgccgtaggctttttttgtaaaacggaggacgactttaacgattggtgtcagcaagttaagaaactttccctcctgggtggcgctctacccatgtttgagctggtcgaattgcagccctctcacttagcttgtcccgacgtgcttaatctctctctcggggagagctgccaggtgcagatcctgttaatgtag

SEQ ID NO: 16168 - DNA, 2124 bp, synthetic construct
  source 1..2124: mol_type = other DNA; note = Synthetic coding sequence
atgatccctccccaggaggccagcgccaggcgcagagagatcgaagataaactgaagcaggaggaggaaaccttaagctttatcagagactcgctggaaaagtctgatcagctcactaagaacatggtcagtattctgagctccttcgaatccagactgatgaagctcgagaattccattatacctgttcataagcagacggagaatttgcagaggcttcaggagaacgtcgaaaaaacattatcttgtctggatcacgtgatctcatactatcacgtcgcctctgacacagaaaaaattatccgggaagggcccactgggcgcctcgaggagtacctgggcagtatggctaaaatccagaaggctgttgaatatttccaggataacagccccgactcccccgagctgaacaaggtgaaactgctgtttgaaagaggcaaagaagcattggaatcggagttcaggtccctaatgactcggcactccaaagtggtcagcccagtcctgatcttggatctgattagcggtgatgacgacctagaagctcaggaggatgtcaccctggagcacttgcccgagtctgtgctgcaggacgtgatcaggatcagccgatggctggtcgagtatggtagaaaccaggattttatgaatgtgtactatcaaattagaagctcacagctggatagatctataaagggactgaaggaacatttccacaagtccagctcctcttccggtgttccctacagcccagcaatacctaataagcgaaaagatacgcctaccaaaaagcccgtgaaacggcctggaacaatacgcaaggcccagaatctgctcaagcagtactcacagcatggtctggacggcaagaagggaggatccaatcttattcctcttgaaggacatgagcacgacttccgcgtgaagcatctgtcggaagctctgaacgacaagcacgggcctttggctggacgtgacgacatgctagacgtggagaccgatgcatatatccactgtgtttcggcgtttgtaaagttggcacagtctgagtaccagttgctggcagatatcatcccagaacatcaccagaagaaaacattcgactctctgattcaggacgccctcgacgggctaatgcttgaaggcgaaaacattgtctccgcggctcgcaaagcaattgtgcggcatgactttagcaccgtgctgacagtgtttccaatcttgagacatttaaagcagaccaagccggagttcgaccaggtactccagggcaccgctgcttctacaaaaaataaattacctgggctgatcacatctatggagaccatcggcgctaaggccctggaagatttcgctgacaatattaaaaacgatcccgacaaggagtacaatatgccgaaggatggcacagttcacgagctgacaagtaacgccattctgttcctgcagcagcttttggattttcaggagacagccggcgcaatgctggcctctcaggagaccagtagctctgctacatcttacagttccgaattctctaagagattattgtcaacatacatctgcaaggtgctgggtaacctgcagctgaaccttcttagcaagagtaaggtctatgaagacccagcactgtcagctatctttctgcacaataattacaattacatactcaagtctctggagaaatctgaactgattcaacttgtggccgtaacacagaaaactgcagagaggtcatacagggagcacatcgagcagcaaatccagacttaccaacggtcctggctgaaggttactgactacatcgcagagaaaaatctgcccgtgttccagcctggagtgaaacttagggacaaggagcggcagattatcaaggagcgcttcaaaggttttaacgacggactggaggaactgtgtaaaatacaaaaagcctgggcaatccctgacaccgagcagcgggaccgcatccggcaagcgcaaaagaccatcgtcaaggaaacatacggtgcattcctgcagaaattcggcagcgtaccttttactaagaacccggaaaagtatatcaaatacggagtggagcaagtaggcgacatgatcgaccgcttgtttgataccagtgcatag

SEQ ID NO: 16169 - DNA, 1026 bp, synthetic construct
  source 1..1026: mol_type = other DNA; note = Synthetic coding sequence
atggcacaggagagtcccaagaattctgccgcagaaatcccagtgacaagtaacggcgaggtggacgattcacgggaacattccttcaatcgcgacctcaagcacagcctgcctagcgggctgggtctgtcggaaacccagatcacgtcccacggattcgacaacaccaaagaaggcgttattgaagccggggccttccagggcggtcaacggacgcagaccaagtccgggcctgtgatcttagctgatgagattaagaaccctgccatggagaaactggaactggtgcgaaaatggtcattaaacacctataaatgcacacggcaaattatttcagaaaagctgggccgtggctctaggaccgtggacctggaactcgaagcgcaaatcgatatcctgcgcgacaacaagaagaaatacgagaacattcttaaattagcacagacactgtctacacagctgttccagatggtgcacactcaacggcagctgggggatgcatttgccgatctgtctctcaagtctttggagctgcatgaggagttcggttacaatgcagacactcagaagttgctggcgaaaaacggcgagacacttctgggggcgatcaacttttttatagctagcgtgaataccctggtaaacaagactatcgaggatacactgatgaccgtcaagcagtatgaatcagcgcgcattgagtacgatgcatacaggactgatctagaggaattgaacctcggccctagagatgccaatactcttcctaagattgagcagtctcagcacctttttcaggcccacaaggaaaagtacgataagatgagaaatgacgtgtccgtgaagctgaaattcttagaagaaaacaaggtgaaggtgttgcacaatcagctggtccttttccacaatgccattgcggcgtattttgcgggcaatcagaaacagttggagcagaccctgaagcagttccacataaaactaaaaacgccaggcgtagacgccccgtcatggctcgaggagcagtag

SEQ ID NO: 16170 - DNA, 1488 bp, synthetic construct
  source 1..1488: mol_type = other DNA; note = Synthetic coding sequence
atggccggagttggccggagtggagggccatggggacggactaggggggggagatcaggccggctgggggtaagtctgggagctttaagcagcctgcccctcgaagagttgccaagacccctttgttgcagacgctgtagacggcattttggctttgccttacgaggagagaccattccagtatcagtggcagggagcgcatcttcgcagtttgcacctttagccctccacttaagcctcctgctcagccgcataagcgcctcaaggctcacaaggtggccccctcccgacaagagagagggttctgccgtggatccaggtaagcgccgaagcctggccgccactccatcttcgagcctcccatgcacactgattgccctcgggctgcgccatgaaaaggaggctaatgaattgatggaggacttatttgagacttttcaggatgaaatgggcttcagtaacatggaagatgacggacctgaagaggaggagcgagtggccgaacctcaagcaaatttcaacacgccacaggccctgcgctttgaggaactgctagccaacctgctgaatgaacagcatcagatcgccaaagagttattcgagcagttaaagatgaagaagccttcagcaaaacagcaaaaagaagtggaaaaggtgaaacctcaatgcaaagaagttcaccagactctaattctggatccagcccagagaaagcgcttgcagcaacagatgcagcagcatgtgcagttactcacacagatacacctgctggcaacttgtaatcctaacctgaacccagaggctagctccaccaggatctgtctcaaggagcttggaacatttgctcagtcatctatcgctctgcatcaccaatacaaccctaaatttcagaccctgttccagccgtgtaacctcatgggagccatgcagctgattgaggatttctccacccacgtatctattgattgtagccctcataaaacagttaagaaaacggcgaacgaattcccatgtctgcccaagcaagttgcctggattctcgccacttctaaggtgttcatgtaccccgagcttctacccgtatgcagtctcaaggcgaagaatcctcaggacaagatcctgttcactaaggccgaggacaacctcctcgctctgggtctgaaacatttcgaggggactgaattccttaaccctctcattagtaagtatctgctgacctgtaaaacagccagacaacttaccgtcagaatcaaaaacctgaacatgaatagagcccctgacaatatcatcaaattctataaaaagaccaagcaactgcccgtcctcggaaagtgctgtgaagaaattcagcctcaccaatggaagcctcctatcgagagggaggaacacagacttccattctggctgaaagtacagcccagttctagcaagtccgtggggggtcgaagatcactgaaggtactgagggaataccaggggctgccatag

SEQ ID NO: 16171 - DNA, 180 bp, synthetic construct
  source 1..180: mol_type = other DNA; note = Synthetic coding sequence
atggcagcacctggcgcccttcttgtgatgggcgtttctggctctgggaactgggatggaaactcgatgatgttgatgattatcaccagaaggaagatcgagggaaggtgggagaaggcctaccgatccatgacacgtaccggttttcacgggagtgtaacttgtatgacgttctattag

SEQ ID NO: 16172 - DNA, 207 bp, synthetic construct
  source 1..207: mol_type = other DNA; note = Synthetic coding sequence
atgggcgagactgaggggaagaaagatgaagcagattacaaacgcttacagactttcccccttgtaagacatagcgacatgcctgaagaaatgagggtcgagactatggagctctgtgtgacagcctgcgagaaattttctaacaataatgaagttctgcccgctgttcaggctgctccacgagcgttcgacggcccgtgcgggtag

SEQ ID NO: 16173 - DNA, 2451 bp, synthetic construct
  source 1..2451: mol_type = other DNA; note = Synthetic coding sequence
atggtacttatgttccaaatccgctatatctcccagacccagggactgcccgcagaatatctacttagcgctggaactaaaacaacgcgcttcttcaaccgcgatcccaaccttggctatcccctctggcgacttaagacccccgaagaacacgaactcgagacaggcattaaaagcaaagaagccaggaaatacatattcaactgcttagatgacatggcacaggttaacatgtccacagacctggaggggacagacatgctcgctgagaaagccgaccggcgggaatacatagacttgctgaaaaaaatgctaacaatcgatgccgataaaagaatcactcctctgaagacccttaatcatcagttcgttaccatgacccacctgctagattttcctcactctaatcacgtgaagagctgtttccagaatatggagatctgcaagcgcagggtccacatgtatgacaccgtttcccagatcaagagccccttcactacgcacgtcgcacccaacactagtacgaacctgaccatgtctttctcaaaccagcttaataccgtgcacaaccaggcgtccgttctagcgtccagctctactgctgcagccgccaccctttccttggccaactcggatgtctctttgctgaactatcaaagcgcactgtatcccagttccgcggctccagtgcccggagtcgcccagcaaggggtgtctcttcagcccggcaccacccagatctgcactcagaccgatccttttcaacaaacgttcatagtctgcccccctgcttttcagaccgggctccaggcaacaaccaagcactctggattccctgttagaatggataatgccgtgcctattgtgcctcaggctcccgccgcacagcctcttcaaattcagagcggcgtgttgacacagggatcatgcacccctcttatggtggcaacactacatcctcaggtcgcgacaatcacccctcagtatgcagtccctttcaccctgtcctgtgccgcaggtcggccagccctcgtggaacagacagctgccgtgctgcaggcatggccaggagggactcagcagatcctgctcccttccacctggcaacagctgcccggggtggctctccacaactcagtccaaccaaccgctatgatccctgaggccatggggtctggacagcaactagctgactggaggaatgcccatagccatggtaatcagtactctaccattatgcagcagccttccttgttgactaaccacgtgactctggctactgcccagccactcaacgtaggtgtggctcacgtggtccggcagcagcaatcatctagcctgccctctaaaaagaacaaacagagcgcaccggtgagctcgaagagcagtctggacgtgcttcctagccaagtgtatagcctcgtggggagttctccactgagaacaacatccagctacaactccctggtccccgtccaagatcagcatcagcctattattatccccgacactcctagcccccccgtatctgttataaccattcggtccgacacagatgaggaggaggacaacaaatataagccaagcagcagtgggctgaagcctcgctcaaacgtaatttcctacgtaaccgtgaacgactcacccgattctgattcctctctgtcttcgccatattccacagatactctctcagccctgcggggcaattcaggtagtgtgctagaggggcctggccgagtggtggcagatggaacaggcacccgtactattatcgtaccacccttgaagacgcagttgggcgattgtacagttgccactcaagcaagcggcctgttaagtaataaaacaaagccagtcgcttctgtgtcaggccaaagttccggctgctgcatcaccccaacaggttatagggcccagagaggcggaacttctgctgctcagcctctaaatctttcccagaaccagcagagtagcgccgccccaacaagccaggagagatcgtctaacccagctcctcgcagacagcaggcgttcgtggctccattgtcgcaagccccgtatactttccagcacggatcccccctgcattcaaccggacatccccatctcgccccggccccagcccacttgccaagccaggcccacctgtacacctacgctgcaccaacttccgcagcagccctgggctcgacttcaagcatcgctcacttgttctcaccccaagggagttcaagacacgcagcggcctacacaactcacccctccaccttggtgcaccaggtcccagtgagcgtcggcccaagcctcctgaccagcgccagcgtcgctccggctcagtatcagcaccagttcgctacccaaagctatatcggctcctccagaggttcaaccatctatacggggtatcctctcagccctactaagatctctcagtacagctacttgtag

SEQ ID NO: 16174 - DNA, 1119 bp, synthetic construct
  source 1..1119: mol_type = other DNA; note = Synthetic coding sequence
atggacgttctctcccctttaagcttcattaaagtgtctcacgtgaggatgcagggtattctgctgttagtcttcgctaagtatcagcacctgccttatatccaaatactgagtacaaagtccacccccactggtctgttcggctactggggcaataaaggcggggtcaacatttgtctgaaactgtatggttactatgtgagtatcattaattgtcatctgccgccacatatttcaaacaactaccaaagactggagcactttgataggatactcgagatgcaaaactgtgaggggcgagacattcctaatatcttggatcacgacctgattatctggttcggcgatatgaattttcgcatcgaggattttggtttacatttcgtgagagagtccattaagaataggtgctacggaggcctttgggaaaaggaccagctttccatagccaagaagcacgacccactgctgcgcgagtttcaggagggaagactgctgttcccccctacatataaatttgacagaaattccaacgactacgacacatccgaaaagaagcggaagccggcctggaccgatagaatactgtggcgcctaaagaggcagccttgtgcaggccctgacactccgatcccccccgccagccatttttcattgtcactacgcgggtactccagtcacatgacttacgggatctcagatcacaaaccagtatctgggaccttcgatctggagctcaaacctctcgtgagtgcaccgctgatcgtgctaatgccggaagatctatggactgtggaaaacgatatgatggtctcttattcttctaccagcgatttcccttcatctccatgggattggataggcctgtacaaggtaggcctgagagacgtaaatgattatgtgagttacgcctgggtgggcgattccaaggtttcttgctctgacaacctcaatcaagtttatatcgatataagtaatatccctaccaccgaggatgaattccttctgtgctactacagtaattcactcaggtcagtggtcggaatctcgcggccatttcagatccccccaggaagtctcagggaggatcccttaggagaagcccagccgcaaatatag

SEQ ID NO: 16175 - DNA, 480 bp, synthetic construct
  source 1..480: mol_type = other DNA; note = Synthetic coding sequence
atgattccaccacaggaggcatcagctcgtaggcgagagatcgaggataagctcaaacaagaggaggaaactctgagtttcattcgagattctctggagaagagtgatcagctgacaaaaaatatggtctctattctcagctcattcgagtctaggctgatgaagctggagaactcaatcattcccgtacataagcaaaccgaaaacctgcagcgtctccaggaaaacgtggaaaaaactctttcctgtttagatcatgtcattagctattaccatgtagctagcgatacagagaagattattcgggaggggccaactggccgactcgaggaatacctgggttctatggccaaaatccagaaggctgtggaatacttccaggataatagtccagacagtccagaactaaataaagtcgtgcgggggccgcagaataacgtccgatctcttgggatctccgtctctgccctcgtgtcctag

SEQ ID NO: 16176 - DNA, 243 bp, synthetic construct
  source 1..243: mol_type = other DNA; note = Synthetic coding sequence
atggccagcgaagagctgcagaaggacctggaggaagttaaagtcctgctggagaaggccacgcgtaagcgagtacgggatgctctcacggccgagaaatccaaaatcgagaccgagatcaaaaacaaaatgcaacagaagtcccagaaaaaagctgagctgctggataatgaaaagcccgctgctgtcgtagccccaataactacagggtacaccgacgggatttcacagatcagtctatag

SEQ ID NO: 16177 - DNA, 606 bp, synthetic construct
  source 1..606: mol_type = other DNA; note = Synthetic coding sequence
atgcctagcgagaccctctgggaaatcgcaaaagccgaggtggaaaagcgagggatcaatggctccgagggagatggcgccgagatagcagagaagttcgtctttttcatagggtcaaagaatggaggcaaaacaacaatcattctccgctgccttgaccgcgacgaaccaccaaaacccaccctcgcgcttgagtatacatatggacgtagagccaaggggcacaatacccctaaggacatcgcccatttctgggaacttggcggcgggactagtctgcttgaccttattagcatccctatcactggtgataccctcagaacgttcagcttggtcctggttctggacctgagcaagccgaatgacttatggccaacaatggagaatctgctacaggccacgaaaagccatgtcgacaaggtcattatgaagctcgggaaaaccaatgccaaagccgtgtccgaaatgcggcagaagatctggaacaacatgcctaaagaccaccccgtttcatgctgcctgggactgttactcgaatctcttgtacccttcatcgtcaatgacaatataactaacaatttctttagattcctctgcatgacctag

SEQ ID NO: 16178 - DNA, 1401 bp, synthetic construct
  source 1..1401: mol_type = other DNA; note = Synthetic coding sequence
atgtcctaccggcctgtggtcagcccagtgatgtcattgacccgaaggtgcatgcgatctaggaccagtatgcggactgacgctgtttttttgatactgtacaaggagctttattatcgacatatatacgcgaaggtttcaggcggccccagcctggaacagcggtttgaatcctattacaactattgcaacttatttaattacatccttaatgctgatgggccagcccccctcgaactgcctaaccagtggttgtgggacatcatagatgaatttatttaccagttccagtcattctcacagtatcggtgtaaaacagcgaaaaagtccgaagaggaaatagatttcctcagaagcaacccaaagatatggaacgtgcatagtgtgctgaatgtcctacactctctggtcgataagagcaatattaaccgacagctcgaggtgtataccagcggcggagaccccgagtcggtggccggcgagtatggccgccactctttgtataagatgctgggatatttctctctggtgggtttattacgcctccactctcttttaggcgactactaccaggccattaaggttctggagaacatcgaactgaataagaaaagtatgtacagtcgtgtaccagaatgccaggtcacgacgtattactatgtcggattcgcctacctcatgatgagaagatatcaggatgcaattcgggtctttgcgaatatcttgttgtatatacagcggactaagtccatgtttcaacgcaccacatacaagtatgaaatgataaataagcaaaacgaacagatgcatgccctgctagctatcgctctgactatgtatccgatgcggatcgacgaatctattcatctgcagttgagggagaaatatggagataagatgctgaggatgcaaaaaggcgatcctcaagtgtatgaggagctcttctcttactcttgtcccaaatttctgagccctgtagtcccaaactatgacaacgtccaccccaactatcataaagagccctttctgcaacagctcaaagtattctcggatgaagtgcagcagcaggcccagctgtccacgatacgatctttcttgaagctgtataccactatgcctgtggcgaagctggcaggatttctcgatctgacagaacaggaattccggattcaacttctcgtgtttaaacataagatgaaaaatctggtttggacctcaggaatctctgccttagatggtgaatttcaatctgcctcggaagtggacttctatattgataaggatatgatccacatcgctgacactaaagtcgctcgcaggtatggcgattttttcatccgacagatccacaagtttgaggagctgaatagaacgctgaaaaaaatgggacagagaccctag

SEQ ID NO: 16179 - DNA, 597 bp, synthetic construct
  source 1..597: mol_type = other DNA; note = Synthetic coding sequence
atgagccgggccgtgacgatcgccgaagctttctgtcacatcctttttcggatcatctccgaaatcttaatgcgcatgctggaagaacaatgcctgtttcctctccccgagccccaggacttgttccaggctagtcagatgaagttcgaggactttcagaaagacctgcgaaaactgaaaaaagatctgaaagcgtgcgaagtggaagctggtaaggtgtatcaagtgtcatccaaagaacacatgcaaccattcaaggaaaacatggaacagtttatcatccaggcaaaaatagaccaggaggctgaggagaactctctgactgagacccacaaatgttttctggagacaaccgcatatttttttatgaaacctaaactaggggagaaggaggtgagccctaacgccttctttagtatctggcacgagttttcttcagattttaaagacttctggaaaaaagagaacaagctcctcctacaggaacgggtcaaagaagccgaggaagtatgccgccagaagaagggaaaatcattatataaaataaaacccagacatgactctggaatcaaggccaagatctctatgaagacctag

SEQ ID NO: 16180 - DNA, 441 bp, synthetic construct
  source 1..441: mol_type = other DNA; note = Synthetic coding sequence
atggagcctacccgagactgcccccttttcggaggagctttcagcgccatcttacccatgggcgcaatcgacgtcagcgacctgaggcctgtgccagacaaccaagaagtattctgtcacccagtgacagaccagagccttattgtggagctgctggagctgcaggcacatgttcgtggagaggccgccgctaggtaccacttcgaggacgtaggaggagtgcagggggccagagccgtgcacgtggaaagcgtccagcccctgtccctcgagaacctggcactgcggggcagatgtcaggaagcttgggtccttagtggcaagcagcaaatagctaaggaaaaccagcaggtggcaaaagatgtcaccctgcaccaggccttgctgcgcctgcctcaatatcagacagatctgcttctcacattcaatcagccaccatag

SEQ ID NO: 16181 - DNA, 1584 bp, synthetic construct
  source 1..1584: mol_type = other DNA; note = Synthetic coding sequence
atgtccctctgcggagcacgggcaaacgctaaaatgatggctgcatacaatggaggaacttctgcagccgccgccggacaccatcatcaccaccatcaccatctacctcatctgccaccaccacacctgcaccatcatcaccatccacagcaccacctgcaccccggcagcgccgctgcggtgcacccagtgcagcagcatacaagttccgccgccgcagccgctgcggcagccgcggccgctgccgctatgctcaatcccggacagcagcagccgtattttccttcccctgccccaggtcaggccccagggcccgccgctgccgccccagcccaggtgcaagccgctgctgccgccactgtgaaggctcatcaccaccagcattcacaccacccacaacagcaactggatattgagcccgacaggccaattgggtatggcgctttcggcgtcgtgtggagcgtgaccgatcctcgtgatgggaaacgggttgctctcaaaaaaatgcctaacgtcttccagaacctggttagttgcaaaagggtgttccgggagctcaagatgctgtgtttttttaaacatgacaacgtgctctccgccctggacattctgcaaccaccccacattgattacttcgaggaaatatatgtggtgaccgagctgatgcaatctgacctccataagatcatagtttcaccgcagcctctctcatcggatcacgtgaaagtgtttttataccagatccttcgcggcctaaagtatctgcacagtgctggtattctgcaccgcgatattaaacctgggaaccttttagttaactccaattgtgtgctgaaaatatgtgactttggactggccagagtcgaagaattggacgaaagccggcacatgacccaggaggttgttactcagtattatcgagcccccgagatattgatggggtctcggcactactctaatgccattgacatttggtccgttgggtgtatctttgcggagttgctgggcagacgcatcctcttccaggctcagtcccccatccagcaactggacctaatcaccgatctactgggcacgcctagcttggaagcgatgcgaaccgcgtgcgagggggctaaggctcatatcctgcggggtccacacaaacagccatccctgccggtcctttacacccttagctctcaggcaacccacgaagccgttcacctgctgtgtcgtatgctagtctttgacccttcaaaacggatctcagcaaaggacgccctggcccacccgtaccttgatgaggggcggttaaggtaccatacgtgcatgtgcaagtgctgttttagcacatccactggcagagtgtatacatctgacttcgagccagtcaccaaccctaaatttgacgacacattcgagaaaaatctttcgagcgtaagacaagtgaaagagatcatacaccaattcatcctggagcagcagaagggcaaccgtgtacccctgtgtatcaacccacagtccgccgcttttaagtcttttataagcagcactgtggcacagccttcagagatgcccccctcccctctggtgtgggaatag

SEQ ID NO: 16182 - DNA, 2742 bp, synthetic construct
  source 1..2742: mol_type = other DNA; note = Synthetic coding sequence
atgaacgaagccatggccacagatagcccgcgcagaccgtcaaggtgcacggggggcgtcgtggtgcgtccccaggcagtgacagaacagtcctatatggagtctgtcgtgacctttctgcaagacgtcgtcccccaggcttactcaggaactcctttgactgaagaaaaggagaaaattgtctgggtccgctttgagaacgccgacctcaatgacacatcccggaatctggaattccacgagatccactccaccggaaacgagcccccactcttaatcatgattgggtactccgatggcatgcaggtgtggagcattccaataagtggtgaggcacaggagctctttagcgtgcgccatggtcccatcagggcggctaggattctgccagctccccagttcggcgcccaaaagtgtgataattttgctgaaaagcgcccgctcttgggtgtgtgcaagtccattggatcctcggggacgagtcccccgtattgttgcgttgatttatattctttgagaacgggggaaatggtcaaaagcatccaatttaagactcctatctacgacctccactgtaacaaacggatactcgtagttgtactgcaggagaaaatcgctgcctttgatagctgcacgtttacgaagaaatttttcgtgacaagctgttacccatgcccgggacctaatatgaatcctattgctctcggatctagatggctcgcttatgcagaaaacaaacttattaggtgccaccagagccggggaggtgcttgcggcgacaacatccagagttacaccgccactgtcatctccgcagctaaaacattaaagtccggcttaaccatggtgggtaaggttgtgacccagctgaccggcacactccctagtggggttaccgaagacgatgtcgctatccattcgaatagccgtcggtcgccgctcgttccagggataattacggtgatcgacactgaaacagtcggggaagggcaagtacttgtatccgaggatagtgactccgatggcattgtcgcccactttcccgctcacgagaaaccagtatgctgcatggccttcaatacatctggaatgctgctggtcacaactgatacactcgggcacgacttccacgttttccagatccttacacacccctggagctctagtcaatgtgcagtgcatcacctctatacgttacataggggggagacggaagctaaagtccaagacatatgcttttcccacgactgtcgttgggtggtggtgtcgaccctgaggggtacctcacatgtttttcctatcaatccttacggcggccagccatgcgtgagaacccatatgtcccctcgggtggtgaatcgcatgagcaggtttcagaaatccgcaggcctggaggagatcgagcaagaactgacttctaagcaggggggtaggtgctcccctgtcccgggtttgtcctcatctccttctggttcacccctccacggcaagctcaactctcaggattcctataacaactttaccaacaacaaccctggcaaccctcggctcagtccgcttcctagccttatggtggtgatgccactagcccaaatcaagcaacccatgaccttggggacaataactaagcgaacaggtaaggtgaagccacctccccagataagcccctccaaatctatgggaggcgagttttgcgttgcagctattttcggaacatcaaggtcatggttcgctaataacgcgggactcaagcgagagaaggaccaaagcaaacaagttgtggtcgaaagcttatacattatctcatgctatgggacactggtagaacacatgatggagccacggcccctttcaaccgcccccaaaatctctgacgatactccactcgaaatgatgactagcccaagggcatcttggactctggtgagaacacctcagtggaatgagcttcaaccccctttcaatgcaaatcacccactgctgctcgccgcggatgcggtgcagtattaccagtttttgcttgctgggcttgtcccccctggcagccccggacccattactcgccacggttcctacgacagtcttgcaagtgaccacagcgggcaggaggatgaggagtggctgagccaggttgagatcgtgacccatacaggtcctcatcgcaggctctggatgggcccacagttccaattcaagaccatacaccctagtggccagacgacagtgatcagctcgtcttcgtctgtgctgcaaagccacgggcccagcgacaccccacagcctcttctggacttcgatacagacgaccttgatctgaactcgcttagaatccaacctgttcggagcgatcccgttagtatgcctggatccagccggccagtatccgatcgcagaggcgtctctaccgtaatcgacgccgcctctggaaccttcgacagatctgttactctgctggaggtgtgcggttcatggccagagggcttcggcctgcgccatatgtcatctatggaacacaccgaggaggggcttcgggaacgtctagccgacgctatggccgagtccccatccagggacgtcgttgggtccggaaccgagctgcaaagagaaggctcgattgaaactttatctaactcttctggaagtaccagtggctctatacctcgcaacttcgatggctaccgcagtccccttccaactaacgagagccagccactgagtcttttcccaaccggcttcccgtag

SEQ ID NO: 16183 - DNA, 2160 bp, synthetic construct
  source 1..2160: mol_type = other DNA; note = Synthetic coding sequence
atgggtttcagtaatatggaggatgatggacctgaggaagaggagcgcgtggctgagccgcaggcaaatttcaacacacctcaggccttgcgattcgaggaactactcgctaacctgttgaatgagcaacaccaaattgctaaagaactcttcgagcaactgaagatgaagaaaccctctgctaagcagcagaaggaggtggagaaggtgaagccccagtgtaaggaggtgcaccagaccctaatcctggatcctgcccagaggaaacggctgcagcagcagatgcagcaacacgtccagctgctcactcaaattcacctcctggccacctgcaaccctaatttgaatccagaagcatccagtaccagaatctgcctaaaggagcttgggacttttgcgcagagttctatcgctcttcaccatcagtacaatccgaaattccaaacgctctttcaaccttgcaatcttatgggcgcgatgcaattaatcgaggacttctccacgcacgtatcgattgattgctccccgcataaaacagtcaagaagacggccaacgagtttccttgcttacccaagcaggttgcttggatattggctacgagtaaagtgtttatgtatcccgagctcctccctgtgtgctctctgaaagccaagaatccccaggacaaaatcctgttcactaaagccgaggacaataagtatctcctaacatgtaagacagccaggcaactgacagtgagaattaagaaccttaatatgaaccgggccccagacaatattataaagttttacaagaaaaccaagcagctgcccgttctcggtaaatgttgtgaggagatccagccccaccagtggaagccccctatcgaacgggaagaacatagacttcccttttggttaaaggcaagccttccgtccatccaggaggaactgcggcacatggccgatggcgccagggaggtggggaacatgaccggaaccacagagatcaatagcgaccaagggctcgaaaaagacaacagcgaacttgggagcgaaacccgctaccccctcctgttacccaaaggtgtggtcttgaagctcaagccagtggctgaccgtttccccaagaaagcctggcgccagaaacgcagttcagtgcttaaacccctacttattcaacctagcccttcgttgcagccgtcatttaaccctgggaaaaccccagcacagtctactcatagcgaagccccgccgtctaagatggtccttcgcataccacaccccatacagccagctacagtgctgcaaaccgtgcctggcgttccccccctcggcgtgtccgggggagagtcatttgagagtccagcagctctgccagcgatgcccccagaggccagaacgtcattcccactgagtgagagccagaccctgctctcatccgctccggtgcccaaggttatgatgccctccccagcctcctccatgttcagaaaaccatacgttcggagacgtccgtctaagagaagaggggccagagcattccgctgtatcaagcccgcacccgttatacatccagctagcgtgatatttacagtgcctgccacaacagtgaagatcgtcagcctgggcggcggctgtaatatgatccagccagtcaacgccgccgtggctcagtccccacaaacgattcccattgccaccttgctggtaaaccccacaagttttccatgtccactaaaccaacctctggtcgcctcgagcgtgtcgccccttatagtctccggaaacagcgtgaacttgcctatcccatccactccagaggacaaagcccacatgaacgtcgacatcgcctgtgccgtcgctgacggggaaaacgccttccaggggctggagccgaaactggagcctcaagagttaagccctttgagcgcaaccgtgtttcccaaggttgagcacagtccaggcccgcccccagtcgataaacaatgccaggagggcctatccgaaaatagcgcctataggtggacggttgttaaaaccgaggagggccgccaggctctggaaccattaccgcaaggcatccaagaatcattgaataattccagcccaggcgatctggaagaagtcgtgaagatggaaccagaggatgctaccgaagaaatctccggattcctctag

SEQ ID NO: 16184 - DNA, 324 bp, synthetic construct
  source 1..324: mol_type = other DNA; note = Synthetic coding sequence
atgagcgtcctgagacctctcgacaagctgcccggcctcaatacagctacaatcctcttggtgggtactgaggacgctctcttacagcagctggccgattccatgctgaaagaggattgcgccagcgagcttaaagtgcatctggccaaatccctgcctctgccctcctcggttaatagaccccgaatcgatcttatcgtgtttgtggtgaatttgcatagcaagtactcgttgcagaacacagaagagtccctgcgacatgtagacgcttcctttttcttaggcaaagtatgctttcttgccactggcggcggtagactgtag

SEQ ID NO: 16185 - DNA, 1599 bp, synthetic construct
  source 1..1599: mol_type = other DNA; note = Synthetic coding sequence
atgtttgtgctcggaattccactgtgcccagccctcagttttagtggaggagatgattctcaaacacagctcttcgtttcaagcaaggacgtgatcaaagaaatcgaagactttgactcattagaagccctgcggctcgagggcaatactgtgggcgttgaggcagcacgagtgatcgcgaaggccctcgagaagaaatcggaactgaagagatgccattggtccgacatgttcacggggcgtctacgcacagagatcccccctgccctgatctctctgggtgaagggctcattactgcgggtgctcagctagtggaactcgacttgtccgacaacgcctttggacctgatggcgtgcagggttttgaagcactgcttaagagcagcgcctgttttactctgcaggaattgaagctgaataactgcggcatggggattggcggggggaaggttattggcacgctggaggaggttcatatgccacagaacggtatcaaccaccccggcatcacagctttggctcaagccttcgccgtcaaccctctgctcagagtgataaacttgaacgacaatacctttactgagaaaggcgccgttgctatggccgaaaccctgaagacactacgccaggttgaggtcattaactttggagattgcttagtccgcagtaaaggagctgtcgcaatagccgatgctatcagaggaggccttcccaagctgaaggaactcaacctgtcattctgcgaaatcaaacgggatgccgcccttgctgtagccgaagccatggccgacaaagccgaactggaaaaactggatctaaacggaaacacccttggcgaagaaggttgtgagcagctccaggaggtgttggaagggtttaacatggccaaggtcctcgcttcgctgagcgatgacgaagatgaggaagaagaagaagagggcgaagaagaggaagaggaggcagaggaggaggaagaggaggacgaggaggaggaagaagaagaagaggaggaggaagaggaggagccccagcagcggggacagggcgaaaaaagtgcaacacctagtcggaagatcctggacccaaacaccggtgagccggctcccgtgctatcctcgcctccaccagcagacgtttcgaccttcctcgccttcccatctcccgaaaagctgctccgcttgggaccaaaatcttctgttctaatagcccaacagacagacacatctgatccggaaaaggtagtaagcgcctttttaaaggtgtcctccgtattcaaagatgaggccacagtaaggatggctgtgcaagatgcagtggatgcattaatgcaaaaagcatttaatagtagctcgttcaactccaatacctttcttacgcgcctcttagtgcacatggggttactcaagagtgaggataaggtgaaggcaatcgccaacctttatggccctctgatggccctgaatcatatggtgcagcaggactacttcccgaaggcgctggctccactgttgttagcctttgtcaccaaaccgaacagtgctctagagagttgttcttttgctaggcattcactcttgcaaaccttgtacaaggtgtag

SEQ ID NO: 16186 - DNA, 1383 bp, synthetic construct
  source 1..1383: mol_type = other DNA; note = Synthetic coding sequence
atggatagcgaattgatgcacagtattgtgggcagctatcacaaacctcctgaaagagtgttcgtgccttcttttactcagaacgaaccttcccaaaattgtcaccccgcaaacttggaagtgacttcgccaaaaatcctgcactctcctaattcccaggccctcattctcgcattaaaaaccctccaggagaaaattcacagattggagctggagagaacacaagccgaggataatttaaacatactgagtcgcgaagccgcacaatataagaaagcactggaaaatgaaaccaatgagcggaaccttgcccatcaggagcttattaaacaaaagaaagacataagtattcaactatcgagtgcccagtctcgatgcacccttctcgagaaacagcttgaatacacaaaacggatggtactaaatgttgaacgcgaaaaaaacatgatcctggaacagcaggcccagctccagcgtgaaaaagaacaggaccaaatgaaactgtacgccaagctggaaaagctcgacgtgctggagaaagagtgcttccggttaaccacgacccaaaaaactgcagaggacaagattaaacacctggaggaaaaacttaaggaagaagaacatcaaaggaagctgtttcaggacaaagcttccgaactgcagaccggcctggaaatcagtaagatcataatgtctagtgtgagtaatctcaaacattctaaggagaagaagaagagctccaagaagacaaagtgcattaagcgcagaccaccatggcaaatctgctcaaagttcggggccctgcctttcgttgcggagaagatgcggcagcacagggaccctcacatcctacaaaagcctttcaacgttaccgaaacaaggtgtctgccaaagccaagtagaaccacctcttggtgcaaggccattccccctgattcggagaagagcatcagcatctgcgataacctgagcgagcttttaatggctatgcaagacgaactcgaccaaatgtctatggagcatcaggagctattgaagcagatgaaggaaacggaatcacattccgtgtgcgatgatattgagtgtgaactcgaatgtctcttgaagaagatggaaatcaagggagagcagatttccaaacttaaaaaacatcaggactccgtttgtaaactgcagcaaaaggtccagaacagtaaaatgtccgaggctagcgggatccagcaggaagactcctatcccaaagggtctaagaacattaaaaactcaccccgcaaatgcctgacagacaccaatctgtttcagaagaattcatcatttcatccaatccgagtccacaacctgcagatgaagctgcggagagacgatatcatgtgggagcagtag

SEQ ID NO: 16187 - DNA, 567 bp, synthetic construct
  source 1..567: mol_type = other DNA; note = Synthetic coding sequence
atgacggcccctagctgcgcatttccagtgcagttccgccagccctcagtgtctggcctatcccagattactaagtctctgtatatctccaacggagtggccgctaataacaaactgatgctgagctcaaatcagatcactatggtgattaacgtgtccgtcgaggtggtgaacaccctgtatgaggatatacagtacatgcaggtgccagtcgcggactcgcccaatagcaggctgtgtgatttcttcgaccccattgccgatcacattcattcagtcgaaatgaaacagggacgcacattactgcattgcgctgcaggtgtcagccgatcagcggctctctgcctggcatacctaatgaagtatcacgcaatgtctcttctcgacgcgcacacatggacgaagtcctgcaggccaattatcaggccgaactccggattctgggaacagctgattcactacgagttccagctcttcggcaagaacactgtccacatggtctcatccccagtgggcatgatccctgacatttacgaaaaggaggtgaggctgatgatccctctgtag

SEQ ID NO: 16188 - DNA, 1596 bp, synthetic construct
  source 1..1596: mol_type = other DNA; note = Synthetic coding sequence
atgaataaaacgaaccaggtctacgcggcaaatgaggatcataattcacagtttatcgatgactacagttcctctgacgagtctctgagcgtgtctcatttttcttttagcaagcaatcacaccgccctcggacaattagagatcgaacaagcttctcgagtaagttgccttctcataacaagaaaaactctacattcatccctcgcaaaccgatgaagtgctccaatgagaaggtggtgaaccaggaacagtcatacgagagcatggacaagtttcttgacggcgtgcaagaagttgcctacatacacagcaaccaaaacgtgatcggttcctccaaagctgaaaatcatatgagccgatgggctgctcacgatgtgtttgagctgaagcagtttagtcagctgcccgccaatattgctgtttgtagctccaagacatacaaggagaaggtggacgccgacacactaccacacactaagaagggccaacagccctctgaggggtcaatttctctgccactttacatttcgaatcccgtgaatcaaaagaagaaaaaagtatatcataccaaccagacaactttcatcatcggtgagacacccaaaggcatccgcagaaagcagttcgaggaaatggccagttactttaactcctcctccgtgaacgaatttgccaaacacattaccaacgcgacatccgaggagagacagaaaatgcttagggatttctacgcgtcgcaatatcccgaggtaaaagagtttttcgtggacagcgtgtctcagttcaacaacagttcgttcgagaagggagagcagaggacccgcaagaaatctgacaagagggagtccctcattaagcccagattatcagattcagaaaccctgagcttcaaggactctacgaataagatctcacaggtatgctctcttaagacgtataagcggaagagcgtgaagttccagaatcacatttcctacagagaggaggtctttttcaatgacgcagagacgaagaaatcccccgtaagctccacgcaagagattgactccggtaagaatagccaggcttccgaagataccgtaaccagccgctcactgaacagtgagtccgaaactagagaacggcggctcgaaaacacaatgaaggaccagcaggatttgacacgcactggaatctctcggaaggaacccctgctaaagctggagaataaaaaaattgaaaatcccgtacttgagaacacctcagtgatctccctgctgggcgacaccagcatcctagacgacctgttcaagagccacggaaattctcctactcagctcccaaaaaaagtgttgtcagggcctatggagaaggccaaacagcgacccaaagacttttgggacatcctcaatgagcagaatgatgagagcctaagtaaactgaccgatctggctgtgattgagactctttgcgaaaaagccccgctggccgccccctttaagaggcgagaggaaccggctacttccttgtggaagagcaacgagaaatttctgtggaaaaaattctccccctcagacacagacgagaatgccacgaatacccaatcaaccacttag

SEQ ID NO: 16189 - DNA, 1089 bp, synthetic construct
  source 1..1089: mol_type = other DNA; note = Synthetic coding sequence
atgactggtcatactaggagctccctgccacggtgcacaggcatcgtgctgcttattaagctgaggttttcagaacgcctgacaggccacctccacgcccaaggaaccccaccgtacgtaatcaatttggaccccgcagtccacgaggtccctttccctgccaatatagacatccgagacacggttaagtataaggaggtcatgaagcaatacggcctcggacccaatggcggtatcgtgacatccctgaatctattcgctactcgctttgaccaggtgatgaagttcatcgagaaagcgcaaaacatgtcaaagtatgtcctaattgatactcccggacagattgaggtctttacgtggagcgctagtggtactattattaccgaggcactggcgtctagctttcctacagttgtgatttatgtaatggatacttctcggagcactaatcctgtcaccttcatgagcaatatgctgtacgcttgctctatcctgtacaagactaagctgccctttatcgtcgtgatgaacaaaaccgacatcattgatcactctttcgctgttgaatggatgcaagactttgaagccttccaggacgctctcaatcaggagacaacatatgtgagcaaccttacacggtcaatgtctttggtcctggacgagttctacagttccttacgcgtggttggggtaagcgcagttctgggcaccggtttggacgagctcttcgtgcaggttaccagtgctgctgaggaatacgagagggaatatcggcctgagtatgaacgactgaaaaagagtctggcgaatgctgagtcccagcaacagcgtgagcagctggagagattacgcaaagacatgggtagcgtcgccctcgacgccgggaccgctaaggactccttgagtccagtcctccatcctagtgatctgattctgacgcggggaacacttgatgaggaggatgaggaggccgattctgacacagacgacatcgaccacagagtgacagaggagtcgcatgaggaaccagcttttcagaatttcatgcaggagtccatggcgcagtactggaaacggaataacaagtag

SEQ ID NO: 16190 - DNA, 1338 bp, synthetic construct
  source 1..1338: mol_type = other DNA; note = Synthetic coding sequence
atgtctgtaacttatgacgatagtgttggagtggaagtcagctctgactcattttgggaggttggtaactacaaacgaaccgttaaacggatcgacgacggtcaccgcctctgctctgacctgatgaactgtctccacgaacgagcgcgcattgaaaaggcctacgcgcagcagctgaccgaatgggccaggcgttggaggcagctagtggaaaagggcccccagtacggaactgtcgaaaaagcttggatggcctttatgtccgaggcagagagagtttcagaacttcatttagaggtcaaagcatctcttatgaacgatgattttgagaaaatcaagaattggcaaaaagaggcattccataagcagatgatgggcgggttcaaggaaactaaagaagcggaggatggcttcaggaaggctcaaaaaccttgggcgaaaaaactcaaggaagttgaagctgctaagaaagctcaccacgccgcgtgtaaggaagagaaactggccatctcaagggaagcgaatagtaaggcagatccttcactgaatccggaacagttgaagaagctgcaggataagatcgagaagtgtaaacaggatgtcctgaagaccaaggaaaaatacgagaagtcactgaaggagttggaccaagggactcctcagtacatggaaaatatggaacaggttttcgagcaatgccagcaattcgaggaaaaacggctgaggttttttcgggaagtcctgttagaagtccagaaacacctcgacctaagcaatgtggcggggtacaaagcgatttaccacgacctggagcagagtatcagggcggcggacgccgtggaggatcttcggtggtttagagctaatcatggcccgggaatggccatgaattggcctcagttcgaagagtggagcgctgatcttaatcggacgctcagtagacgagagaaaaagaaggccacggacggagttaccctgactggaataaatcagactggtgatcagtcactacccagcaagccaagctccgtgtctagttatgaaaaaacccagtcttacccaaccgactggtctgatgatgagtcaaacaacccgttttcctctactgatgccaatggtgacagcaatcccttcgacgacgacgctaccagcggcacagaggtccgggtgagggccctgtacgattatgaaggacaggaacacgacgaactctccttcaaggcgggcgatgaacttacgaagatggaagatgaggatgaacagggatggtgtaaagggaggctggataacggacaggtcggactgtatcccgccaattatgttgaggcaatacagtag

SEQ ID NO: 16191 - DNA, 405 bp, synthetic construct
  source 1..405: mol_type = other DNA; note = Synthetic coding sequence
atgagcgagaacgctgcgccaggactcatctcggaactactcctgcagagaggcacaaccaaggtcgccactgggctggtgttgaatagagaccagagactcgcctgggctgagaattcaattgactttataagtagggagctctgtgcccactcaatccggaagctgcaggctcacgtgctcctgattaaggcggtgcatgggtacttcgactctcggcaaaattactcagaaaaagaatccctttcgtttatgatcgatacaatgaagtccacactgaaggagcaatttcagttcgtagaagtgcccggcaaccattgcgtacacatgagtgaaccgcagcatgttgcgagcattatctcttctttccttcagtgtacccatatgttacctgcacagctgtag

SEQ ID NO: 16192 - DNA, 321 bp, synthetic construct
  source 1..321: mol_type = other DNA; note = Synthetic coding sequence
atgagtagtaagggctcaagcaccgacggaaggaccgacctggcaaacgggtctctgtcctcctcccccgaggaaatgagcggagcagaagagggacgcgaaacttcttctggaatcgaagtggaggctagcgatttgagcctgagtttaaccggcgatgatggtgggcctaaccggacatcaaccgagagccgagggaccgacaccgagtcctccggtgaggacaaggacagcgacagcatggaggacacagggcactactctataaatgatgagaacagagtacatgacaggtccgaggaggaggaggaagaagagtag

SEQ ID NO: 16193 - DNA, 990 bp, synthetic construct
  source 1..990: mol_type = other DNA; note = Synthetic coding sequence
atggtccgcacaaaaacgtggacacttaagaagcatttcgtgggttatcctacaaactctgattttgaactgaaaacggccgagctgcctccccttaagaatggcgaagtgcttctggaagcactgtttcttactgtggacccctacatgcgggtggccgccaaaaggctgaaagagggcgacactatgatgggccagcaggtcgccaaagtggtggagtccaagaatgtagccctgcctaaggggaccattgtactcgctagccctggttggaccacacattcaatttctgatggcaaagacctggaaaagctgctgaccgagtggcccgacacaatacccctgtcactggcccttggcaccgtcggcatgcccggtctcacagcatatttcggccttctggagatttgcggcgtcaaaggcggtgaaacagtgatggtcaatgccgccgcaggcgccgttggctctgttgtgggtcagattgccaagctcaaggggtgtaaggtggtgggagccgtcggcagcgatgagaaggtggcatatctgcagaagctcggcttcgatgtagtgtttaactacaagactgtggagtctcttgaggaaaccctcaaaaaagcctcccctgacggatatgactgctattttgacaacgtaggcggcgagttctctaatacagtaattggccagatgaagaagtttggcaggatagccatctgcggggctatctccacatataaccgcacgggaccgctaccccctgggccaccacccgaaatcgtaatttaccaggagcttagaatggaggctttcgtcgtgtatcgttggcagggcgacgcccgccagaaagctctgaaggacctgctgaaatgggtgctggagggtaagatccagtacaaggagtacatcatcgaagggtttgagaacatgcctgccgccttcatggggatgctgaagggcgataatctgggcaaaacaattgttaaagcctag

SEQ ID NO: 16194 - DNA, 2235 bp, synthetic construct
  source 1..2235: mol_type = other DNA; note = Synthetic coding sequence
atggcaaccgctaactttgggaagatacaaatagggatatatgtggagatcaaacgcagtgatgggaggatccaccaagctatggtcacgtcactcaacgaggacaacgagtctgtgactgttgagtggatcgaaaacggtgacaccaagggtaaagagatcgatctcgagtccatcttttccctgaacccagatttggtgccagatgaggagattgaaccctcgccagaaactcctccaccacctgcgtctagtgctaaagtgaacaagattgttaaaaatcggagaaccgtggcaagcattaaaaatgaccctccttcccgagataaccgagtcgtgggctccgctagagcgcggccctctcaattcccggagcagagtagctctgcacaacagaatgggtccgtgagcgatatcagccctgtgcaagccgctaaaaaggagttcggcccaccaagccgacggaaatcaaactgtgttaaggaagtcgagaaactccaagaaaaacgcgaaaaaaggcgcttgcagcagcaggagcttagagagaagcgtgcccaggatgtggacgcgactaaccctaactatgagattatgtgcatgattagggactttagaggtagtctggattaccgccctctaaccaccgcggatccaatcgacgagcatcggatctgtgtgtgtgtgcgcaagagaccgctcaacaagaaagaaacacaaatgaaagacctggacgtgatcacgatcccatccaaagacgtggtgatggttcacgaacccaaacaaaaggtggatttgaccaggtacctggagaaccagacattccggtttgactacgcattcgatgacagcgctccaaatgagatggtctaccgttttacagctaggcctttagtggagactatttttgaacgaggaatggctacatgctttgcttatggacagacaggatccggcaagacacacacaatgggaggcgacttctctggaaagaatcaggactgtagcaaaggtatatatgcattagccgctcgcgatgtgtttctgatgcttaaaaagcctaattataaaaaactcgaacttcaggtgtacgcaacatttttcgagatctatagtggaaaagtgtttgatttgttaaataggaaaacgaaactgcgagttctggaggatgggaaacagcaggttcaggtggtcgggttacaggaaagggaggttaagtgcgtggaggacgtgctgaagttgatcgatatcggaaattcttgtcgcaccagtggtcagacctctgcaaatgctcattcctcacggagtcacgccgtgttccagattatcctgcgccgcaaaggcaaactccatggtaagttttctttgattgatctggcaggaaacgagcgtggcgcagacacttcttcagcagacaggcagacaaggttagagggcgccgaaatcaacaagtcattacttgccttgaaagagtgcattagggctcttggtcggaacaagccccacacacccttccgcgcgtctaagctgacgcaggtgctccgtgacagctttattggcgagaactccaggacatgtatgatagctacaatctctcctggaatggcttcctgcgaaaatactctgaacacgctccggtacgctaatcgtgttaaagagtttggaatatcacctagcgatattcctttcagtcagggctctggctccaggcccgatctatctcctagctatgaatacgatgacttctcaccttccgtcacccgggtgaaggagctgaccgtcgacccaaccgcagcaggcgatgttaggcccatcatgcaccatcctcctaatcaaatagacgatctggaaacacagtggggtgtcgggtcaagtccacagcgggacgatctcaaactcctctgcgaacagaacgaagaagaggtctccccgcagctgtttacatttcatgaggccgtatcacaaatggtcgagatggaggaacaggtcgtagaagaccacagggcagtgtttcaggaaagtatcagatggctggaagatgagaaagctcttttggaaatgactgaggaagtggattatgacgtggacagttatgcaacccagctggaggcaatattggagcagaagattgacatcctcacagaactgagggacaaagttaagtcctttagagccgcactgcaggaagaggagcaggcttccaaacagatcaacccaaaaaggcccagagcgctatag

SEQ ID NO: 16195 - DNA, 1701 bp, synthetic construct
  source 1..1701: mol_type = other DNA; note = Synthetic coding sequence
atgtttgtgtccgatttcaggaaggaattctacgaagtcgttcagtcccagcgcgtgctgctatttgtggctagcgatgtggatgcgctctgcgcatgcaaaatactgcaggccctgtttcagtgtgaccacgttcagtacacactggtgcccgtgagcggttggcaagagctcgagacagcattcttggagcataaagaacagttccactacttcatcctgataaactgcggggccaatgtcgacttattggacatactgcagccagatgaggacacaatatttttcgtgtgcgatacacatcggcctgtcaacgtagtcaacgtatataatgacacgcagattaagctactcattaagcaagacgacgacctcgaggtccccgcctacgaggatatatttagagacgaagaagaggacgaagagcattccgggaacgatagcgacgggtctgagccatccgagaagaggacaaggttggaggaagagattgtagagcagactatgagacgtcgacaacgacgggagtgggaggcaaggcggcgagatattttgttcgattacgagcagtatgagtaccacggcacttccagcgctatggtcatgttcgagcttgcatggatgctctccaaagacctgaacgatatgctgtggtgggccattgtggggcttaccgatcaatgggtgcaggataaaattacacaaatgaagtacgtgaccgacgtgggggttttacagaggcatgtctcgcgccacaaccataggaatgaggatgaagagaacactctgagcgtggactgcacaaggatctccttcgaatacgatcttagacttgtactttatcaacattggagcttacacgattctctttgcaataccagttatactgccgccagattcaagttatggtctgtgcacggtcagaaacgcctgcaagaatttctggctgacatgggtctcccacttaagcaggtcaaacagaaatttcaagccatggacatcagcctgaaggagaatttgcgagaaatgattgaggagtcggccaacaagttcggcatgaaggacatgagagtgcagacttttagcatccactttggcttcaagcacaagttcctggcctctgacgtcgtgtttgcgaccatgtccctcatggaatctccagagaaggatggctccggtaccgatcattttatccaggctttagacagtctgagcaggtcaaacctggacaaattgtatcacgggttagaattggccaagaaacaattgagggctactcagcagaccattgcctcttgcctctgcacaaacttagtaatatctcagggcccttttctttattgttcactgatggaaggcacccctgacgttatgctcttctcaaggccggcctctctaagcctcctgtccaaacatctcctgaaatcctttgtctgctctacgaagaacagacgatgcaagttactgccactagtgatggccgcccctctcagcatggaacatggaactgtgacggtggtcggcattccaccagaaacagacagctcagaccgcaaaaatttctttgggcgcgcgtttgagaaggccgcggaatccacttcttctcggatgttgcacaaccactttgacctgtctgtgattgagttgaaggctgaggatcgctctaaatttttagatgcactcatctcactgctgtcctag

SEQ ID NO: 16196 - DNA, 798 bp, synthetic construct
  source 1..798: mol_type = other DNA; note = Synthetic coding sequence
atgtgcacgtccgagaccttccaggccctcgatacgttcgaagccagacatgacgacatagttctggcaagctatcccaaatgtggttccaattggattttgcatatcgtgtctgaactgatatatgctgtgtctaagaaaaaatacaaataccccgaatttccagtgcttgagtgcggcgacagtgagaaatatcagcgtatgaaaggattcccgagtccaagaatcttagcgactcacctgcactacgacaagttacccggcagcattttcgagaacaaagccaaaatcctggtgatttttaggaatcctaaggacaccgcagtgtccttcctccacttccataacgacgttcctgacatcccctcatatggatcctgggacgaattttttcgtcagtttatgaaaggacaggtgtcctggggcagatacttcgatttcgcaataaattggaacaaacatctcgatggcgataacgtgaaattcatactctacgaggatctaaaggaaaatctcgctgccggaatcaaacaaatcgctgagtttctggggtttttcttgaccggggaacagatacagacaatctcagtccagtctacattccaagccatgagggctaaatctcaggatacccatggtgctgtcggtccttttttgtttcgtaagggcgaagtgggcgattggaagaacttattcagcgagatccagaaccaagaaatggatgagaaattcaaagagtgcctggcgggaacatcactgggcgccaaactgaaatatgaatcctattgtcagggctag

SEQ ID NO: 16197 - DNA, 2808 bp, synthetic construct
  source 1..2808: mol_type = other DNA; note = Synthetic coding sequence
atgaatgaggcaatggccactgatagtcctagacgccctagccgctgcactggtggagtggttgtgagacctcaggctgtgacagaacaaagttacatggagtccgtagtgactttcctgcaggacgtcgtcccccaggcctatagcggaactcccctgactgaggagaaagaaaagatagtttgggttcgattcgaaaatgccgatctgaatgacacatccagaaaccttgagttccatgagatacactcgaccggtaatgagccacctctgcttataatgattggatactctgatggcatgcaggtctggagtattcccatttctggagaagcccaggagttattttcagtgaggcatgggcccatcagagccgcacgaattctgcccgcaccgcagtttggcgcccagaagtgtgacaacttcgctgaaaaaaggcccttactgggggtttgcaaaagtattggctcaagtggaacttctccaccctactgttgtgtggacctgtactccttgagaactggggagatggtaaaaagtatccagttcaagacccctatctatgaccttcactgcaataaacggatcttagtggtggttttgcaagaaaagattgctgccttcgactcctgtactttcactaagaaattctttgtgacctcctgctatccttgtcccgggcctaacatgaatccaattgctctcggaagcagatggctggcctatgcagagaacaaactgatccgctgccaccagagcagggggggcgcatgtggtgacaacatccagtcgtacacagccacagttatttccgctgctaagacacttaagagtggtttgactatggttggcaaggtggtgacccagctcacaggcacactaccaagcggggtcactgaagacgacgtggctatccatagtaactcccgtcgaagcccactggtgcctgggattattaccgtcatagacaccgagaccgtgggcgaaggccaggtgctggtgtccgaggattccgatagtgacggcatcgtcgcacacttccctgctcacgagaagcctgtgtgctgtatggcttttaacacctctgggatgctcctcgttactaccgacacactgggtcacgacttccatgttttccagatcctcacccatccctggagctcctcacaatgcgccgtgcaccacctgtatactcttcataggggcgaaactgaggcgaaagtgcaggacatttgcttcagtcacgattgtagatgggtcgtggtgagcaccctgagggggacttcgcacgtgttccctatcaatccctacggaggtcagccctgtgtgagaacacacatgtctcccagagtggttaatcgaatgtcacgtttccagaaaagcgctgggttggaagagatcgaacaggagctgacatccaaacaagggggcagatgttcacctgtgccaggattgagttcttcacctagcgggtcacctctccacggcaagctgaattctcaggattcttacaataatttcaccaataacaaccctggaaaccctcgccttagccccttgcccagcctgatggtcgtcatgccgttggcgcagattaaacagcccatgaccctgggaaccatcaccaagagaactggtaaagtgaagccacccccacagatttcaccctctaagagtatgggcggcgagttctgcgttgctgctatcttcgggacctcacggagctggttcgctaacaatgccggactgaagagggaaaaggatcagagcaagcaagttgtagtggagagtctgtatattatcagctgttacgggacactagtcgagcatatgatggagccaagacccctgagtactgcgcccaagatcagcgacgacacaccgttggagatgatgacctctccacgtgcatcttggacactggtgcgaacccctcaatggaacgagctgcagcctcctttcaacgcaaaccacccattactgctcgccgccgatgccgtgcagtattatcagttcctgctggccggactggttcctccgggatcaccgggccctattactagacatggatcttatgatagcctcgcaagcgaccatagcggtcaggaagacgaagaatggctgagtcaagttgaaattgttacccacactggcccacaccgacgcctatggatgggtccccagtttcagttcaagactatacacccatctgggcaaaccacagtcatttctagcagctcttccgtactccagtcgcatggcccaagcgatacgccgcagcctctgttggatttcgacacagacgatcttgacctcaatagtcttagaatccagcctgttagaagcgaccccgtgtcaatgccgggatcttccagacccgtctccgaccggcgcggtgtgtcaactgtgatagacgcagccagtgggacatttgaccgaagcgttacccttctggaggtgtgcggcagctggcccgaagggtttgggcttcgacatatgtcctctatggagcatacagaggagggcctgagagaaagattagcagatgccatggccgaatccccatccagagacgttgtcggtagcgggacagacaccgcattggatgtggcagtcaagactttcccccccgagcgccacgtggctgtgaagtgctttgaactccagcgagaagggtctattgaaacactgagcaatagcagtggttccacctctggtagcatccctagaaatttcgacggctaccgctctcctcttccgaccaacgagtcacagcctttgtcactgtttcccaccggttttccctag

SEQ ID NO: 16198 - DNA, 615 bp, synthetic construct
  source 1..615: mol_type = other DNA; note = Synthetic coding sequence
atggaggctgctggcagtccagctgccacggagaccggaaagtatattgcttctactcaaaggcctgatggaacctggagaaaacagaggcgcgttaaggaggggtatgtccctcaggaggaggtgccagtttatgaaaacaagtatgttaagtttttcaagtcaaagcctgagttgccaccaggattatcaccggaggctaccgcacctgtgacccccagccgaccagaggggggagagccaggactgagcaaaaccgcgaaacggaaccttaagcgcaaggagaagaggcgtcagcagcaggagaaaggagaggctgaggccctcagccggaccttggataaggtgtctctggaagagaccgcccagttgccctccgcacctcaggggagtcgggccgcacccacagccgcctctgatcagcccgactcagcagccactaccgagaaagcaaaaaaaattaaaaacctgaaaaagaagttaaggcaggtcgaggagttgcagcagcggattcaggctggggaggtgtctcaacctagcaaagagcaactggaaaaactggctcgaaggagggctctggaggaggagctagaggacctcgaactgggactctag

SEQ ID NO: 16199 - DNA, 663 bp, synthetic construct
  source 1..663: mol_type = other DNA; note = Synthetic coding sequence
atgtcaagtggaaattatcagcagtctgaagcgttaagtaagccaactttcagtgaggagcaggcttctgcactcgttgaatcagtcttcgggctcaaagtgagtaaggtgaggcccttaccctcatatgacgaccaaaatttccacgtctatgtaagtaagaccaaagacggacctacagagtatgtgttaaagatttccaacacaaaagctagcaagaaccctgatctgattgaggtgcaaaaccacattattatgttccttaaggcagccggttttcctacagcgtccgtgtgtcacactaaaggggataataccgccagtctcgtgagcgtggactccgggtccgagatcaagagctatctggtgcggctgcttacttacttgcccggcagacctatcgccgaactccctgtgagtcctcaacttctttacgagattggaaagttagcggcgaagctggataagactcttcaacggttccaccaccctaaactgagctcactgcaccgagagaattttatttggaatctgaagaatgtgcccctgctggaaaagtatctgtacgctttaggtcagaaccgtaacagagaaatcgtggaacatgtgatccatctgttcaaggaggaggtgatgacaaagctgtcccatttccgggaatag

SEQ ID NO: 16200 - DNA, 603 bp, synthetic construct
  source 1..603: mol_type = other DNA; note = Synthetic coding sequence
atgtcctcagatagcatggatcaaccccggaatccatgtgaaaacgaaccgctgactcctgggtatcacggtttccccgcacgggattcacagggcaatcaggagcccactaccacacctgacgcaatggtgcagcctttcaccactattcccttccctccccctcctcagaacgggataccaactgagtatggagttccacatacacaggactatgctgggcagacaggagaacacaatctcacactttatggttcgactcaggcccatggtgaacaatcatcgaacagcccttctacccagaacggatctctgacacaaacggaagggggagcccagaccgatgggcagcagtcccagactcaatccagcgaaaacagcgagtctaagagcacgccaaagcgtctgcacgtcagcaacataccctttcgttttagggatcccgatcttaggcagatgtttgggcagtttggaaagatattggatgtagaaatcatcttcaatgagcgagggtccaaggggttcggctttgtgacttttgagaattctgcggatgcggaccgtgcaagagaaaaactacacgggaccgtagtggaaggttag

SEQ ID NO: 16201 - DNA, 387 bp, synthetic construct
  source 1..387: mol_type = other DNA; note = Synthetic coding sequence
atggccccggcaaaaaaaggaggtgagaagaaaaagggaagatcagctataaatgaagtagttacaagagaatatactatcaacatacacaagagaatccacggagtgggctttaagaaacgcgctccccgggccctgaaggagattaggaagttcgccatgaaggaaatgggtactccagatgtgagaatcgacacccgactgaataaggcagtctgggcaaagggaattaggaatgtcccctatagaattagggtgcgcctgagtagaaagcgcaatgaggatgaagactctcccaacaagttatacacactggtgacttatgttccagtgacgaccttcaagatctccgtgctcaatagcgtaactgtcgcgaaatcaccctag

SEQ ID NO: 16202 - DNA, 393 bp, synthetic construct
  source 1..393: mol_type = other DNA; note = Synthetic coding sequence
atggctcccgccaagaagggcggggagaagaagaagggacgcagtgccatcaatgaggtggtgaccagggagtatacaatcaacattcataagaggattcatggcgtgggcttcaaaaagagagcgcccagggccctgaaggagatccggaaatttgctatgaaggaaatgggcactccagacgttcgtatcgatacccggctgaataaggccgtgtgggctaaggggatcagaaatgtcccttataggataagagttcggctttcccggaaaaggaatgaagatgaagacagccccaacaaattgtacacgctcgtgacatacgtgcctgtcaccaccttcaaatcgctccaaaacgatgacctctttaagaccgactgccaccaccagtag

SEQ ID NO: 16203 - DNA, 1524 bp, synthetic construct
  source 1..1524: mol_type = other DNA; note = Synthetic coding sequence
atgtggcttacttcttacccatccccaaatttccctgtgtccgtactgcaaaacggggtcaaaatgaccaacgaggctcccaagggactccgggcgaacattatacgctcctatttaatggaccctatcagtgacccagagttcttcgggagctgtaagaagcctgaggagttcaagaagttgctgtatggactatgttttttccatgccctggtacaggagaggcgcaagttcggccccctgggatggaacattccatatgaattcaacgagacagaccttcgaatctcagtgcagcagctccacatgtttctgaatcagtatgaagaactgccctatgaagcgctccggtatatgactggagaatgcaattatggggggcgggtgacggacgactgggatcgaaggaccctgcgctcgattctgaataaattcttcaaccccgagctcgttgagaatagtgattacaagttcgattcctctggcatctattttgttccaccctccggcgaccacaagtcctatatcgagtacactaagacgcttcccctgacccccgccccagagatattcggaatgaacgccaacgcggatataacaaaggatcagtctgagacacagctgctttttgataatatcctgctgactcagtcacgatctgccggagctggggctaagagctccgacgaggtcgtgaacgaggttgctagcgatattctcggtaaattgcctaacaacttcgatattgaggcagcaatgcgcagatatccaaccacatacacacaaagcatgaacactgtgctggtacaggagatggggcgttttaacaagttgctcaagactattcgcgattcatgtgttaacattcagaaggctatcaagggtctggccgtgatgtctaccgatctggaagaggtggttagctcaatactgaatgtgaagattcctgagatgtggatggggaagtcgtatccctctctgaaaccactcggcagctacgtcaatgactttctggccagactcaagtttcttcagcagtggtacgaagtgggccctcctcctgttttttggctgtcgggcttcttcttcacccaggcgtttctcaccggggctcaacagaactacgcaaggaagtataccattcccatagacctcttggggttcgactacgaggttatggaggataaagagtacaaacacccaccagaggacggtgtgtttatacacggactgttccttgacggtgcatcatggaataggaagattaaaaagctcgctgaatcccatccaaagatattatacgacacagtgcccgtgatgtggctgaagccctgtaagcgcgctgatattccaaagcgtcctagctatgtggcacccctttacaaaacaagcgagagacgcggggtgctctccacaaccggacattccacaaactttgttatagcaatgacattaccgagcgaccagcctaaggaacattggataggtcggggtgtggcacttctgtgtcagttgaattcgtag

SEQ ID NO: 16204 - DNA, 1683 bp, synthetic construct
  source 1..1683: mol_type = other DNA; note = Synthetic coding sequence
atggccgcaagtgcaaagcggaaacaggaagagaaacacctcaaaatgctgagggacatgactggcttaccacataatcgcaaatgcttcgattgtgatcaacgcggcccaacctacgtgaacatgacagtgggaagcttcgtgtgtacgtcctgctcaggcagcctaaggggtttgaaccctccacatagagtaaagtccattagtatgacaactttcacacagcaggagattgagtttctgcaaaaacacggcaatgaggtgtgtaagcagatatggttggggctgtttgacgatcgtagctccgccatccccgacttccgagacccacagaaggtcaaagaattcctgcaagagaaatacgagaagaagcggtggtacgtgccccctgagcaggcgaaggtggtagcctctgtgcacgcgtctataagtggaagctccgcatcatctacttcctccacacctgaagtgaaacccctgaaaagccttctgggggacagcgcgcctacccttcatttaaataagggtacaccaagccagtcccccgtggtcggccgaagtcagggacagcagcaggagaagaagcaatttgacttgctcagcgacctggggagcgatatcttcgctgctccagctccacagtctaccgcaactgcaaactttgctaacttcgcacactttaattctcatgcagcccaaaattctgccaatgccgatttcgcgaacttcgacgccttcggtcagagctcaggttcaagcaatttcggcgggtttcctaccgctagccatagccctttccagccgcagaccactggaggttctgccgcgagcgttaacgctaactttgcccacttcgacaatttcccaaaaagttctagcgctgactttggcacgttcaacacatcacagagccaccagacggcgagtgctgtctcgaaggtaagcaccaataaggccggactccaaactgcagacaaatatgcagcgctggccaacctcgacaatattttcagcgcaggccagggtggcgaccaggggagcggatttggcaccacagggaaggcgcctgtgggttcagtggtctcagtgcccagccagagctccgccagctctgataagtatgccgccctggctgaactcgacagtgtgttcagttccgccgcaacctcctccaatgcttatacctcaacctcaaatgcatcatcaaatgtgtttggcacagtccccgtggtagcgagcgcgcaaactcagccagcctcctcctcagtgcctgcgcccttcggggctactccgtccactaacccttttgtggctgcagcgggcccctccgtggcctcatccaccaatccgtttcagacaaacgcccggggtgcaaccgccgccacattcggaactgcttccatgtccatgcctaccggattcggaacccctgctccttacagcctgccgacttcgttttcaggaagtttccagcaaccagccttcccagcgcaagctgcatttccacaacagactgcctttagccagcaacccaacggatttgcagcttttggccaaactaaaccggtggttaccccgtttggccaagttgcggcagcaggcgtgtcctctaaccctttcatgaccggtgctcctacggggcagttcccaacaggaagttcctctactaacccatttttatag

SEQ ID NO: 16205 - DNA, 2403 bp, synthetic construct
  source 1..2403: mol_type = other DNA; note = Synthetic coding sequence
atgagttctctcggggccagctttgtccagatcaagttcgatgaccttcaattcttcgagaattgtggcggtggaagttttggaagtgtataccgggcaaagtggatcagtcaggataaagaggttgcagttaagaagcttctcaaaatagagaaagaagctgagattctgtctgtgctgagccacagaaatatcatccagttttacggggtaatccttgagccacccaattacgggatagtgacagagtatgcctcactcggcagcctttatgattatatcaacagcaacaggagtgaagagatggatatggaccatatcatgacctgggccaccgatgtggctaaggggatgcattatttacatatggaagctcctgtaaaagtgattcacagagacttgaaatcccgcaatgtggtcattgcagctgatggggtcctgaagatttgtgattttggcgcgagcaggtttcacaaccacacaacccatatgtcactggtcgggacttttccgtggatggcgcccgaggtgatccagtccttgcctgtatccgaaacttgtgacacctactcctacggcgtagtgttgtgggagatgctgacccgggaggtgcccttcaaaggcctagagggcttacaggtggcttggttagtggtggagaagaatgagcgcctgaccattcctagttcttgtccaagaagctttgccgagttattacatcagtgctgggaggcagatgctaaaaaacggccctcttttaagcagatcatctcaatcctagaatccatgagcaacgatacctctcttcctgacaagtgtaactctttcctgcataataaagccgagtggcggtgtgagattgaggccactctagaacggctgaagaagctcgagagggatctcagtttcaaggaacaagagctgaaagaacgggagagacggttgaagatgtgggaacaaaagctcacagagcagtccaacacaccccttctgccatcatttgaaattggagcatggaccgaggatgatgtgtactgttgggttcagcagctggtccgtaagggcgattcatccgcagagatgagcgtgtacgcatccctctttaaggagaacaatatcaccgggaaaagactactcctactggaggaagaagatctcaaggatatgggaatcgtttccaaggggcacattatccattttaagagcgcaattgagaagctgacccatgactatatcaatctgttccatttccctcctctcatcaaagattccggcggcgagcccgaggagaatgaagagaagatcgtgaacttggaactggtgttcggatttcatcttaaacccgggaccggaccacaggattgcaagtggaagatgtatatggagatggacggggatgagattgcaatcacctacatcaaagacgtcaccttcaatacgaacctgcctgatgccgaaatacttaaaatgaccaaaccgccatttgtaatggagaagtggatcgtcgggattgccaagtcccaaactgtggaatgcactgtaacatacgaatctgatgttaggaccccaaagagcacaaagcatgtgcatagcatccagtggagcagaacgaagcctcaggacgaggtcaaggcagtgcagctggcgatccagacgctgtttaccaattccgacggtaaccctggcagcagaagtgatagtagtgctgattgtcagtggctggataccctgagaatgcggcaaatcgccagtaacacctccttacagcgttcccagtccaacccaattcttgggtcacccttcttctcccatttcgacggccaggactcctatgcagccgccgttaggcggccacaggttccaatcaaatatcaacagatcaccccggtaaaccagagccggtcttcgagccctacccagtacggactgacaaaaaatttctccagcctgcatttgaactccagagactccggcttctcaagcggaaatacagacaccagcagtgagcgtggaagatatagtgataggagtagaaataaatatggccggggcagcatatcactgaactcttctccaaggggtaggtacagcggcaagagccagcactcaacacctagtagaggacggtaccctgggaagttctacagagtgtctcagtcagccctgaacccccaccagagcccagatttcaagcggtccccaagggatctgcaccagcctaacacgataccgggtatgccccttcatccggaaacagactcgagagcctcagaggaagactcaaaggtgtcagagggaggctggaccaaagtagaatatcgcaagaagcctcatcgcccaagtcctgccaagactaataaagaacgggcccgcggcgatcatcggggctggaggaatttctag

SEQ ID NO: 16206 - DNA, 144 bp, synthetic construct
  source 1..144: mol_type = other DNA; note = Synthetic coding sequence
atggacgaccaacaggccctcaattccatcatgcaggatttggccgtgcttcataaggcctccagaccagctctctcgctgcaggagacacgtaaagccaaatcatcatcacccaagaaacaaaacgatgtccgcgttaaatag

SEQ ID NO: 16207 - DNA, 1272 bp, synthetic construct
  source 1..1272: mol_type = other DNA; note = Synthetic coding sequence
atggtgtcctttatgaataaccagaagcagcagaaacctacactgtctgggcagcgctttaaaacgcgaaagcgcgacgagaaggagaggtttgaccctacacagttccaggattgcatcattcagggcttgaccgagaccggtacggacctggaagccgtagccaagttcctcgacgcttccggagccaagttggactacaggcgctacgctgaaacgttgttcgacatactcgtggccgggggtatgttggccccgggaggtacattggccgatgacatgatgcgtaccgatgtctgtgtatttgccgcccaggaggacctggaaactatgcaggccttcgcccaggtttttaataagctgattagacgttacaagtatcttgaaaaagggtttgaggatgaggtcaagaagctcctgctgttccttaagggattcagcgagagcgaacgcaacaaactggccatgctaaccggagtgttgctggctaacggaaccctcaatgcttcgattctgaatagcctttataacgagaacctggtgaaggaaggggtgtctgctgcctttgcggtgaaactttttaagtcatggatcaatgaaaaggatatcaatgccgtggccgcgagcttaaggaaggtgtccatggataatcgtctgatggagctgttcccggctaataagcagtctgtggaacacttcactaaatattttaccgaagccggcttaaaagagttgagtgagtacgtgagaaatcaacaaaccattggggctagaaaagaactgcagaaggaactgcaggaacagatgtcgcgaggggatcccttcaaggacataattctgtacgttaaggaggagatgaaaaaaaacaatatccctgagcctgttgttattggaatagtctggtctagcgtgatgtccaccgtggagtggaataaaaaagaggagctggtcgccgagcaagccatcaagcacttgaagcaatactctcccctgctggccgccttcacaacccagggccaatccgagctgacattgcttctgaagatccaggagtattgttatgataacattcacttcatgaaagctttccaaaagatagttgttctgttctacaaagcagaagtgcttagtgaggaaccaattttgaagtggtataaagacgctcacgtggccaaaggaaaatcagtatttcttgagcagatgaagaagtttgtcgaatggcttaagaacgcggaagaggagtccgagtctgaagccgaggagggggactag

SEQ ID NO: 16208 - DNA, 1119 bp, synthetic construct
  source 1..1119: mol_type = other DNA; note = Synthetic coding sequence
atgtcaagaaggcgctttgactgtcggtctatcagcggcctgctcacaacaactccacagatccctattaagatggagaactttaacaacttctatatcctgacttctaaagagttgggcagaggtaagtttgccgtggtacggcagtgcatctccaagtctacagggcaggagtacgccgctaagttccttaagaagaggcgcagaggacaggattgcagagccgagattctgcacgaaattgctgtactggaactggctaagtcttgcccacgggttattaacttacatgaagtctacgaaaacacttctgaaataatcctgatcctcgaatatgccgccggcggcgaaatattcagtctctgcctgccagaactcgctgagatggtatctgagaacgatgtaattaggctcatcaaacagatcctggagggtgtgtattacctgcatcagaataatatagtgcacctggatctgaagcctcagaatatactgctgtcaagcatctaccctcttggcgacatcaaaatcgtagactttggcatgagcaggaaaattggacatgcctgtgaactccgcgagattatgggcactccagagtatttggccccagagatcttaaattacgatcccattacgaccgctaccgacatgtggaatatcggcattatagcctatatgctcctcacccatacatctcctttcgtgggagaagacaaccaagaaacttacctgaacatttctcaggtaaacgtagactattccgaagagacatttagcagcgtgagtcaactggctaccgacttcattcagtcgttgcttgtgaagaatccagagaagcggcccacggccgaaatatgtctgtctcatagctggttacagcagtgggacttcgagaacctgttccaccctgaggaaacatcaagctcctcccagacccaggaccactcagttagatcatcagaggataaaacatcaaagagtagctgcaacggcacctgtggcgaccgcgaagataaagaaaacattccggaggactcaagcatggtttccaaacggttccggttcgacgatagtttgcctaatcctcacgaattggtttccgacctcctgtgttag

SEQ ID NO: 16209 - DNA, 912 bp, synthetic construct
  source 1..912: mol_type = other DNA; note = Synthetic coding sequence
atgatggatgtatccggggtgggctttcccagtaaagtgccttggaagaaaatgtccgcagaggaactagagaaccagtattgtccaagtagatgggtcgtgagactcggtgctgaggaggctctcagaacatactcccagattggaattgaagcgacaactcgcgcccgagccaccaggaaatcgctgctgcacgtaccatatggcgatggggagggggaaaaagttgatatctattttccagacgagtcgtcagaagccttacctttcttcttgttttttcacggaggctactggcagtctgggtctaaagatgagtctgcctttatggtccatccactgactgcccagggtgtggccgtggtcatcgtcgcctacggcatagctcccaaaggcaccctggaccacatggtggaccaggtgacaaggtctgtggccttcgtccaaaaacgctatccaagcaacaaaggtatttacctgtgtgggcactcagccggtgcgcacctggctgccatgatgctgttggccgactggacaaagcatggtgtgacccccaacctccgtggtttcttcctggtgtcaggcgtattcgaccttgagcccatcgtctatacctctcagaacgtggccttacaacttaccctggaagacgcccagcggaactcgccccagctgaaggtggctcaggcacaacctgtcgaccccacctgcagggtgctagtggtagtcgggcagttcgatagtccggagttccaccgacagtcctgggaattctaccagacactctgtcaaggtgagtggaaggcatcattcgaggagttgcatgacgtagaccacttcgaaatcgtcgagaatctgacacagaaagacaacgtcctgacccagattatcctcaaaactatctttcagtag

SEQ ID NO: 16210 - DNA, 684 bp, synthetic construct
  source 1..684: mol_type = other DNA; note = Synthetic coding sequence
atggctctgcacgacatggaggattttacttttgacggcacgaagaggttaagcgtcaattatgtgaagggaattcttcagcctacagacacgtgcgatatttgggataaaatctggaacttccaagcgaaacccgatgacctgttaattagtacatacccgaaagccggtacgacttggacgcaggagattgtcgagctgatccaaaacgagggcgacgtggaaaagagcaagagggcccctacacatcaaaggttcccctttttggaaatgaagattcctagtttaggtagtgtatgctggggatcgtggcacgagcacgtaaagggatggtgggaggctaaggataagcaccgcattctgtatcttttctatgaggacatgaagaagaaccccaagcatgagatccagaagctagccgagtttatcgggaagaagctcgatgacaaagtgttggataaaatcgtccactatacctcttttgatgtgatgaagcaaaaccccatggcaaactactcaagtatcccggctgaaatcatggaccacagcatttccccttttatgaggaagggcgctgtgggagattggaagaaacatttcactgtggcacagaacgaaagattcgacgaggattataagaagaaaatgaccgacacgcgcctcacctttcattttcagttttag

SEQ ID NO: 16211 - DNA, 366 bp, synthetic construct
  source 1..366: mol_type = other DNA; note = Synthetic coding sequence
atggcaccagccaagaagggaggcgagaaaaaaaagggacggtccgctatcaacgaggtcgtgacgcgcgagtataccataaacattcacaaaagaatccacggagtcggtttcaagaagagggctcccagggccctcaaggaaattcgcaagttcgcgatgaaggagatggggacccccgatgttcgcatcgacactcgcctcaataaggctgtttgggccaaaggaatcagaaatgtgccttatcggatacgagtgagattgagtcgaaagcggaacgaagatgaagacagtccaaacaagttgtataccctggtgacatatgtaccagtgaccaccttcaaatcaaaattctcgattccttag

SEQ ID NO: 16212 - DNA, 267 bp, synthetic construct
  source 1..267: mol_type = other DNA; note = Synthetic coding sequence
ttgagcttccgcgcggactcagcccacgccagcatggtaaatgtgccgaagacacgtcgaacgttttgcaagaagtgcgggaagcatcaacctcacaaagtcacccagtacaaaaaggggaaggatagcctatatgctcaggggaagcggcgatacgaccgcaaacagtctggatatgggggacagaccaagcctattttccggaagaagctgcatcaaaactgcatcgagccgaaccttcctcctagggcacagcaaagcccatag

SEQ ID NO: 16213 - DNA, 582 bp, synthetic construct
  source 1..582: mol_type = other DNA; note = Synthetic coding sequence
atggactctacattagcggtgcagcaatacatacagcagaacatcagagccgactgctctaacattgacaagatcctagaaccgccggaaggacaggatgagggggtatggaaatacgaacatttacgtcaattttgtttggagctcaatgggctcgccgtgaagcttcaatctgaatgtcacccagatacatgtacacagatgacagccactgaacagtggatcttcttgtgcgcagcccacaaaacccctaaagaatgccccgcgatagactataccaggcatacccttgacggcgccgcctgtctgttaaattcaaataagtactttccttcgagagtaagcatcaaggaaagtagtgttgccaaattaggctctgtgtgtcgcagaatctatcgaatcttcagccatgcatacttccaccacagacagatcttcgatgaatacgagaacgaaactttcctatgccaccgattcacaaagtttgtaatgaaatacaacttgatgagcaaagataacctcattgttcctatactggaggaggaggttcagaatagtgtgtcaggggagtctgaagcttag

SEQ ID NO: 16214 - DNA, 4137 bp, synthetic construct
  source 1..4137: mol_type = other DNA; note = Synthetic coding sequence
atgtccttggagcgcgagctccggcagttgtccaaagccaaggctaaagctcagcgcgctggtcagagacgggaggaggcggctctttgtcaccagcttggtgaattgctggcaggccacggaagatatgccgaagctctggagcagcattggcaagaactgcagctccgcgagagagccgatgatccactgggatgcgccgttgcccaccgaaaaattggggaacgtctggcagaaatggaggactaccccgccgctctgcagcatcagcaccaatatctcgagcttgcacactccctgcggaaccataccgaactccagagggcatgggcaacgatcgggagaacacacctggatatttacgatcactgccagtccagggacgctctcctccaggcacaggcagcatttgaaaagagcctcgctattgtggacgaggagctcgaaggtaccctggctcagggggaactcaatgaaatgcggactcggttataccttaacctgggactgacattcgaatcgttgcagcagaccgctctgtgtaatgattattttcggaaatcaatttttctggccgaacagaaccacctgtatgaagacctgtttagagcacgctataaccttggaactatacattggagagccggccagcattcccaggccatgcggtgcttagaaggtgcccgcgaatgtgctcacaccatgcggaagagatttatggaaagtgaatgttgtgttgtcatcgcccaggtcttgcaggatctgggggacttcctcgcagcgaaaagagccttaaagaaggcttatagactggggtcccagaagcctgttcagcgcgctgcaatctgtcaaaatctgcagcatgttctcgctgtggtgagattacagcagcagctcgaggaagctgaagggcgagaccctcagggggccatggtgatctgcgaacagctgggggatcttttctccaaggcaggtgactttcctcgtgcagcggaagcttaccagaaacagctccggttcgcagagctgcttgatcgtccgggcgctgagagagccattatccatgtgagtctggccactaccctgggggacatgaaggaccaccacggggccgtgaggcactatgaggaagaactacgattgcgatccggcaacgtgctggaggaagctaagacatggttaaacattgctttgtcgcgggaagaagccggcgatgcttacgaactgctggccccatgcttccagaaagctttaagttgcgctcagcaagcacagaggccacaactgcagcgacaagtcctacaacatctgcacacggtgcagctccgactgcagccgcaggaagccccagagacggagacgaggcttcgggaactttccgtggccgaggacgaagatgaagaagaggaggcggaggaagctgccgccaccgccgaatcggaggccctggaagcgggagaggtagagctgtctgaaggagaagacgacaccgacggcttaaccccccaactcgaggaagatgaggagctccagggccacctggggcgccgcaaggggagtaaatggaataggcgtaacgacatgggtgagactctgctccaccgggcgtgcattgaaggtcagctccgccgggttcaggatctggtgcggcaaggtcatcccctcaatcccagggattactgcgggtggacacctctccacgaggcatgcaattatggccaccttgagatcgtccggtttctgctagatcatggagccgcagtggatgaccccggggggcaagggtgcgaagggatcacaccccttcatgatgctctgaactgcggccactttgaagtggctgaattactcctagagcgcggagcaagtgtgacattgagaacccggaaaggcctcagccctctcgaaacactccagcagtgggtgaagctgtaccgccgggatctcgacctggaaacacggcagaaggctagagctatggagatgctccttcaggccgccgcctccggtcaggatcctcactcttcacaggccttccataccccatcatctctgcttttcgatccagagacgagcccccctctgtctccctgtcccgaacccccgtctaactcaaccagactccctgaggctagccaggctcatgtgagggtgtccccagggcaggctgctcccgcaatggccaggccacgcagaagccgacatggcccagccagctcctcgtcttcaagtgaaggtgaggatagcgcaggaccagcgagaccaagccaaaaaaggcctcggtgctccgctacggcacagcgggtggcggcttggactcccggcccagcctccaatagggaggctgccactgcgagtactagtagagctgcctaccaagccgccatccgcggtgtcggttcagcacagagtcgactgggcccgggtccaccgcggggacacagtaaggcgcttgccccacaagccgccttgattcctgaggaggagtgtctggcgggcgactggctggagctggacatgcccttaacacgctccaggcgacctcgcccgcgaggtactggtgataaccgaagaccctcaagtacctcaggctccgattccgaagaatcacgccctcgcgcaagagccaagcaagttcggctgacatgcatgcagtcttgctccgcacccgtgaacgcagggccttcgagcctggccagcgaaccgcccggcagccctagcaccccaagggtttccgagccatctggtgactctagtgccgcaggacagcccttggggcctgccccacctcccccgatacgagtgagggtgcaagtacaggatcacctttttttgatccccgtgccacattcaagtgacactcactcagtcgcttggctagcagaacaagcagcccagcggtattatcagacgtgtggactccttcccaggctgaccctgcgaaaagaaggagctcttcttgccccacaagacctgattcctgacgttctgcagtcaaacgacgaagtgctcgctgaggtgacctcctgggacctgcccccgctcacagaccgttatagacgtgcatgtcagtcacttggtcaaggggaacaccagcaggtgctgcaagcagtagagttgcagggattgggtttgtccttcagcgcatgttcactagcgcttgaccaggcccagttgactccactgttacgagccctgaaactgcacactgccctcagggagcttcgtctggcgggtaaccgtctgggcgacaaatgcgtggctgagctagtggccgcgcttggaacaatgccctccttagcccttcttgatctgtcttccaatcacctcggcccagaaggcctgagacagctggccatgggtctccctggccaggccacactacagtccctggaagagctcgacctgtctatgaatcccctcggagatggatgcggccagtccctggcctccctactgcacgcctgccccctcctaagcacgctcaggctccaggcatgtggcttcggcccatcgttctttctatcacatcaaaccgcccttggcagtgcgtttcaggacgctgagcacctaaagacactcagtctcagctataacgccttaggcgccccagcactagcccgcacccttcagtccttacccgctggtaccctgttgcacctggagctttcctccgtggcggcaggaaaaggagacagtgacctcatggagcctgtctttcgttatctggcaaaggaggggtgtgcactggcacatctgacactttcggcaaatcatctgggagacaaggccgtgcgggacctctgtcgatgtctctcgttgtgcccttctctgatcagcctggacctcagcgctaacccagagataagctgtgcctctcttgaagagctgctcagtacattgcaaaagcggccccagggacttagtttcctggggctgagcggctgtgcggtccaaggtccactggggctcggtctgtgggataaaattgctgcccagctcagggagctgcaactgtgctcgagacggctgtgcgcggaggatagggatgccctgagacaactgcaaccatcccgccccggaccaggggagtgcacgctcgaccacggaagcaagctgttttttcggaggctttag

SEQ ID NO: 16215 - DNA, 1218 bp, synthetic construct
  source 1..1218: mol_type = other DNA; note = Synthetic coding sequence
atgaactaccagcagcagctcgccaacagcgctgcgatccgcgcagagattcagcggttcgaatctgtccaccccaatatatatagcatctacgagctgcttgagcgcgtcgaagaaccagtgctccaaaatcagattcgggaacatgtaattgctatcgaagacgcattcgtcaactcacaggaatggaccttgtcgcgcagtgtgcccgagctaaaagtaggcatcgtcggtaacctcgcaagtgggaagtccgcgctggtgcatcgttacctgactggcacttacgtgcaggaggaaagcccagaaggcggcagatttaaaaaagagatcgtcgtagacgggcagagctacttgttattgatcagagatgagggggggccaccagaagcccagttcgccatgtgggttgacgcggtgatctttgtgttttccctcgaagatgagatctcatttcagacagtgtatcactattatagccgaatggcaaactatcgtaacacctcagagattccgcttgtgctcgtgggcactcaagacgccatttctagtgctaaccctcgcgtgattgatgatgcacgcgcaagaaagcttagcaacgatcttaagcgatgcacctattatgagacctgcgcgacctatggtctgaacgtcgaacgcgtcttccaggatgtggcccaaaaaatcgtggccactagaaaaaagcagcagttaagcataggcccatgcaaaagtctgcctaactcgcccagccatagcagtgtctgcagcgcccaagtgtcagccgtgcatatctcacagaccagtaacggtggagggtccctcagcgactatagctctagcgttccttccacccccagtacatctcagaaagagctgcgcatcgacgttccccctaccgctaatacgccaactcccgtacgtaagcagtccaaacgaaggagcaacctcttcacgagcagaaagggctctgaccccgacaaggaaaagaagggattggagagcagggccgattccattggttctgggcgcgctatccctattaaacagggattacctttcttcgtgctggctttaaccgctagtacttatcttcgtcctgccggggccagggcccgccaatcatcgccctggccaggcccgagagggggacagacctcccctcactgtgccgagggtccccagtcagctcaactatccggcgccatgatgaattag

SEQ ID NO: 16216 - DNA, 1245 bp, synthetic construct
  source 1..1245: mol_type = other DNA; note = Synthetic coding sequence
atggcagccgcccctccctcctattgtttcgtcgccttccccccaagagcgaaggatggcctggtggtcttcggtaagaatagcgcacgacctagggacgaggtgcaggaagtggtttacttctccgccgccgatcacgagcctgaatccaaggtggagtgcacttacatttctattgatcaagttccacggacctacgctatcatgatcagccggcctgcctggctgtggggtgcagaaatgggggccaacgagcacggcgtatgtattgccaatgaagctatcaataccagggagcccgcggccgagatagaggcactgttgggtatggacctggtacggcttggcctcgagaggggcgaaaccgccaaggaagctctcgacgttattgtatccctcttagaggagcacggccaggggggcaattactttgaagacgccaatagctgccactctttccagtctgcctacttgatcgtcgaccgcgacgaggcatgggtactagagactatcgggaaatactgggccgccgagaaggtcactgaaggagttcgctgcatatgctcccagttatctcttacgaccaaaatggacgcagagcatccagaacttcgctcctacgctcaaagtcaaggatggtggacaggagaaggcgagttcaacttctctgaagtttttagccctgtggaggaccatctggattgcggagccggcaaagacagtttggagaagcaggaggaatcaataaccgtacagaccatgatgaacactttgcgagacaaagcctcaggtgtgtgcattgacagcgaattttttctcaccactgcaagcggagttagtgtgctgccacagaatagaagctctccatgcattcactatttcaccggtaccccagatccttcaagatccattttcaagccttttatctttgtggacgatgtgaaactagtccctaagacccagagcccgtgtttcggagatgatgaccccgccaaaaaggagcctcggttccaagaaaaacctgaccgcaggcatgaactgtataaagctcacgagtgggccagagccatcatcgagagcgaccaggagcaggggaggaagctgagaagcaccatgttggaactcgaaaagcagggcctcgaagcaatggaggagatcttaacgagctccgaaccactggatcccgctgaggtcggggacctgttctatgactgtgtcgacaccgaaattaagttctttaagtag

SEQ ID NO: 16217 - DNA, 645 bp, synthetic construct
  source 1..645: mol_type = other DNA; note = Synthetic coding sequence
atgggaccacttcccaggacggtggagctcttttatgacgtcctgagcccttactcatggctgggattcgagatcctgtgccgttatcaaaacatctggaatattaatctccagctccgaccgtcactgatcactgggattatgaaggattccggcaataaaccaccagggctgttaccgcgcaaaggcctctacatggcaaatgaccttaagctgctccgccaccacctgcaaatccctatccatttcccaaaggattttttgtccgtcatgttggaaaaaggatcacttagtgccatgcgatttctaactgcagtgaacctcgaacatcccgagatgctggagaaagctagtcgtgagctgtggatgcgcgtttggagccgggccgccgaaaaggctggcatgagcgcggaacaggcacagggactactcgaaaagattgctacccccaaggtgaagaaccagctgaaagagacaacagaggccgcttgtagatatggggcctttggacttcccatcacggtcgcacatgtggacggacaaacacacatgcttttcggctccgatagaatggaactgctggcccacctcctgggggaaaagtggatgggtcctatccctccagcagttaacgcacgtctttag

SEQ ID NO: 16218 - DNA, 4206 bp, synthetic construct
  source 1..4206: mol_type = other DNA; note = Synthetic coding sequence
atggctgacaccgatctgttcatggaatgtgaggaagaggaactcgaaccctggcagaagatcagcgacgtcatcgaagattctgtagtagaggactacaactctgtcgataaaactaccactgttagcgtttcccagcaacccgtctctgcccccgtgccaattgccgcccatgcgtctgtggcaggacacctgagcacgagcaccacggtttcctcgtcaggggctcagaatagcgattcaactaaaaaaactctggtgaccctgatcgccaacaacaatgcaggaaacccccttgtgcagcaaggcgggcaacctctaatacttacccagaacccagcccccggattagggactatggtcacccagcctgtgttaaggcctgtgcaggtaatgcaaaacgccaatcacgtaacctcttctccagtggcctctcagccaattttcattacaacacagggcttcccagtgaggaacgtcaggcccgtgcagaacgcaatgaaccaggttggcattgtcttgaacgttcagcagggtcagaccgtacgccccatcacgttggttccagccccaggaacacagttcgtcaagccaaccgttggggtcccacaggtatttagtcagatgacgccagttaggcctggatccacaatgccagtccggccaacaacaaatacattcaccacagtcatcccggccactttgacaatccgatccacagtgccccaaagtcagagtcagcaaactaagagtacaccatcgactagtactacgcccacagcgacccaacccaccagtcttggccaacttgcagtccaatcgccaggacaatctaaccagaccaccaatccaaagctggtcagtatagcatcattcgtgactgtgaaaagacctggtgtcacaggggagaactcaaacgaggtggccaagctggtcaacacgttgaacaccatcccgagcctgggtcagagtcccggtcccgtggtggtctctaataacagtagcgcgcacggcagccagcggaccagtggtcctgagtctagcatgaaggtgactagctccatacccgtgtttgacctccaagatggcggacgcaagatttgccctagatgtaatgcccagttccgcgtgactgaagccttgagaggccacatgtgttactgttgtcccgagatggtcgagtatcagaaaaaaggcaagtcgttggatagcgaaccatctgtaccctccgcggccaaaccaccatcccctgaaaagacagccccagtagccagtaccccgtccagcaccccaattccggctttgagtcccccgacaaaggtgccggaacctaacgagaatgtgggcgacgcggtccagactaagctgattatgctggtggatgacttttattatggacgggacggcggcaaggtggcgcagctgacgaacttccccaaagtggcaacctccttcaggtgccctcactgcaccaaacgattaaaaaacaatatcagattcatgaatcatatgaagcaccacgtcgagctggaccagcagaatggtgaggtggacggccacacaatctgccaacattgctacaggcagttttccacgccatttcagctacaatgtcacctggagaacgtgcactctccatatgagtctaccactaagtgcaagatctgcgagtgggcctttgagagtgaaccactgttcttgcaacatatgaaagatacccacaaacccggcgagatgccctacgtgtgccaagtgtgtcagtaccggtcctccttatattccgaggtcgatgttcacttcagaatgatacacgaagatacacgtcatcttttatgcccctattgcctgaaagtcttcaagaacggaaacgcatttcaacagcactacatgcggcaccagaagcgcaatgtttaccactgtaacaagtgccgcttacaattcctctttgcaaaggacaaaattgagcataagttgcagcaccacaagacattcagaaagccaaaacaattggagggacttaagcccggcacaaaggttaccatccgcgcaagcaggggacagcctcgaaccgtgcccgttagtagtaacgacacgccgccaagcgcccttcaggaagctgctcctctgacatcctccatggatcctctccccgttttcctttacccacccgtgcagaggtctatccagaaacgtgccgtgaggaagatgtccgtcatggggagacagacttgcctcgagtgctccttcgagattccggacttccccaatcattttcccacctacgtacattgctctctatgccgatattccacctgttgttccagggcctacgccaatcacatgattaacaatcatgtccccaggaagagccctaagtacctggccctgttcaagaactcagttagcggcatcaaactggcctgcactagctgtactttcgtgacaagcgtgggtgacgccatggctaaacacctagtattcaatccgtcccatcggagctcttctatcctgccccgcgggttaacttggatcgcccacagcagacatgggcagactcgggacagagtgcacgatcgcaacgtgaaaaatatgtatccgccaccaagctttccaacaaacaaagcggcaacagtgaagtctgcaggcgccacacctgcagaacctgaggaactccttacacccttagccccagctcttccaagccctgcctccaccgctacacctcccccgacacccacccaccctcaggccctcgctttacccccattagctacagagggagctgagtgcctcaatgtagacgaccaagacgagggctcacccgtgactcaggagccggagctggctagcggcggggggggcagcggcggagttggaaaaaaggagcagctctctgtgaaaaaactcagggtggtactcttcgccctgtgttgtaatactgagcaggcagctgagcattttagaaatccccagcgccggatacggaggtggctgaggcggtttcaggccagccaaggcgaaaatcttgaaggaaaatatctttcatttgaagccgaggagaaacttgccgaatgggtgctgactcagcgtgagcaacagctcccagtgaacgaggaaacattgttccagaaggccaccaagattgggagatccttggaggggggctttaagatttcttacgagtgggcggttcggttcatgctacggcaccacctgacgccccatgccaggagggcagtggcccatactctgcctaaggatgtggcggagaacgctggactgtttatcgactttgttcagcgccagattcacaaccaggacctgccgctgagtatgattgtcgctatcgacgagattagtctcttcctggatacagaagttctgtcttctgacgaccggaaagagaatgctctccaaaccgtcggcactggagagccttggtgcgatgtggtcttggcaattctggctgatggaaccgtcctgcccaccctcgttttctatcgtggccagatggaccagcctgccaacatgccagactcaattctcctggaagccaaggaaagcggctattccgatgacgaaatcatggagttatggtcgactagagtgtggcagaagcacactgcgtgccaacggagtaagggtatgttggttatggactgtcacagaacccatctgtctgaagaagtactggccatgctgtctgcctcaagtaccctgcctgccgttgttccagccggatgctcctccaaaattcagcctctagatgtgtgcatcaagagaactgtgaagaatttcctgcacaaaaagtggaaagaacaggcacgggaaatggccgatacagcttgcgacagtgatgtcctgcttcagctggtgctggtgtggctgggagaggtactcggtgtcattggagattgtcctgagctcgtacaacgttcattcttggttgcctctgtcctgccaggccctgatggaaacattaactcgccaacacggaatgccgacatgcaggaggaactcattgctagtcttgaagagcagcttaagctctcaggggagcactcagaatctagtacccctcggccacgctccagtcctgaagagaccatcgaacccgagagtctgcatcagctcttcgaaggagaaagcgagacagagtctttttacggctttgaagaagcagatctggacttaatggagatttag

SEQ ID NO: 16219 - DNA, 1398 bp, synthetic construct
  source 1..1398: mol_type = other DNA; note = Synthetic coding sequence
atggaaccctcttccctggaacttcccgccgataccgtccaaagaatcgcagccgaacttaaatgccacccgactgatgaacgcgtggcgctgcacctggacgaagaagataaactccgccacttccgggagtgtttttacattcccaagattcaagaccttccccctgtggatttgtccttagtgaacaaagacgagaatgccatctattttctaggaaattccctagggcttcaaccaaagatggtgaagacctatctcgaggaagaactggataagtgggccaagattgcagcctacggccatgaagtcggaaaacgcccatggataactggagacgaaagtatcgtgggcctaatgaaagacatcgttggagctaacgaaaaagagattgccttgatgaatgctctgacagtgaacctgcatctactgatgctgagtttctttaagcccacacccaagaggtataaaattctgctggaagccaaggctttccctagtgatcactatgccattgagtcccaactgcaactgcatggtctgaacattgaagaatcaatgcggatgattaagccccgcgaaggagaggaaaccttacgcatagaggatattcttgaggtgattgagaaggagggggattctatcgccgtcatccttttctcaggcgttcatttctatactggccagcatttcaacattcctgctattactaaggctgggcaggccaagggctgctacgtcgggtttgatctcgcacatgccgtgggtaatgtggaactgtacctgcacgattggggcgtagactttgcttgctggtgttcttataaatatctcaatgcaggagcgggcggaatagcaggggctttcattcatgaaaagcacgctcacacaattaagcctgcccttgttgggtggttcggacacgagttgagcacccggtttaagatggataacaaattacagctgatcccaggcgtgtgcggttttcgcatctctaatccccccatactgctagtgtgtagcctgcatgcatcactggaaatttttaaacaggctactatgaaagcactccgtaaaaaatcagtgctgctgacaggctatctggaataccttatcaaacacaattatgggaaagacaaggcagctaccaagaagcctgtggtgaacatcattactcccagccatgtagaggagagggggtgccagctcaccataacgtttagcgtcccgaataaggacgtctttcaggaattagagaagcggggcgtcgtgtgcgacaaacggaaccccaacggcataagggtcgcaccagtgcccctgtacaactcattccatgacgtgtataaatttaccaatttgctcacaagcatactcgatagcgctgaaaccaagaactag

SEQ ID NO: 16220 - DNA, 3210 bp, synthetic construct
  source 1..3210: mol_type = other DNA; note = Synthetic coding sequence
atgtatttactggacggcagcggagagccagcctcgcctcccgctgacgccatgcccagagggaccccccctcggaagacagtctataggattagcgtgactatggtccgaaaggaacagcttgccgccccgggcagcggtggacctgatccacgcccggttaggcggcccagacccgctcggtcccccgacgcacctggaagattagaggaagaggctgaggaggctgaaggcgccgaggaaccagaggggccgaggccgcgggcttgggacttccggaccttccgcacacggagcacaggtcaactcgaactcggacgactgcggccgtgcgcccgcggactagaacctgctgacctggcaggatccgccccagccgaggaagaaggccgtggcagcccagcatcaggctcccccgacgtggaaggtgccagagctgccccactccggcgttctcttagttttcgccattggtccgggcccgaggctccacagggacggacactcggcggcggccgccgccatagctcgtccggtagccttgcttgggccccgtgtgacgaggctgcagccgggaccactcttgaacccgcaaccgccactcaaccagcctcagaaaaacgcaacacattggacgtgggcgaggtgctttctaagaacgatgcgttgtccgacctggagaggtgggagagaagcaaatctaaaaacagaaccctagataactcagatctgcaacggctggagagggcccgggctgccgcaggcgccggagcagcctcagaacaccggctgctgaggttcttttccggaatattcgcccgtagggatggcggaccaggtgggggcccgagcccacggtccggggcttctagaccacgggggtacttctccctgcgcagggcgccagccgaagcccattcatcttctgctgagagcatcgatggaagccctaggagggatgcatttgtgaattcgcaggagtggacgctgagccgcagtgtgcccgagctgaaagttggaatcgtcggaaatctcgcctccggcaaatcagcactcgtccatcgctaccttaccgggacttatgttcaggaagagagccctgaagggggtagatttaagaaggaaattgtcgtcgacggccagagctatctcctcctgattcgagacgagggcggcccacccgaggctcagttcgcaatgtgggtggacgcagtgatcttcgtctttagtctagaggacgagatttcttttcaaacagtttatcattactacagtcggatggctaactaccggaacacaagcgagatacctctggtgctggttggcacgcaggatgcaatttctagcgcaaatcctcgagttatcgacgacgctcgggcacgcaaactaagcaacgatcttaaacggtgcacatattacgaaacctgcgctacctacgggctgaatgtggagcgcgtttttcaggatgtggcacagaaaatcgtggcaacacgcaagaaacaacagctctctatcgggccatgtaaaagcctgccgaactccccatctcacagctcggtgtgctccgcacaggtgagtgcagtgcacatatctcaaactagcaacggtgggggatccctgtctgattactcttctagtgtcccctctaccccaagtacatcccagaaggaattgcgcatcgatgtccccccaactgccaacactcccactcccgtcaggaaacaatccaagaggagatctaacctcttcacgtcccgaaaagggagcgaccccgacaaggagaaaaaggggcttgagagccgggctgattcaatcgggtccgggcgggcgattcccatcaagcagggcatgctcctcaagcgctctggaaaatcacttaataaagagtggaagaaaaaatatgtcacactctgtgacaacggagtcctgacataccaccctagtctgcatgattacatgcagaatgtccacgggaaagaaatcgatctgctgagaacgacagttaaagtgcctggcaaacgacccccccgtgccacctccgcatgcgcccctatcagttcaccaaaaaccaatggtctgtcgaaagacatgtcctccctacatatctcaccgaacagtgacacaggtctcggggactcagtctgttcctccccttcaatcagcagtactacttcaccgaaactcgaccccccaccatctcctcatgccaatagaaaaaaacaccggaggaagaaatccacatcaaattttaaggccgatgggctatcaggcactgccgaggagcaggaagagaacttcgagtttattattgtctccttgactggacaaacatggcatttcgaagccactacgtacgaggagcgcgatgcatgggtccaggctattgagtcccagatattggcctctctccagtcttgcgagagctctaagaacaagagccgtctgacatctcaatctgaagccatggcgctgcagtctatcagaaatatgagggggaactcccactgcgtcgattgtgaaacccagaatcccaactgggcgtcactgaaccttggggccttgatgtgtatcgagtgcagtgggattcataggaatctgggcacccatttgagccgggtgcgatccctggaccttgacgactggcctgttgaactgatcaaagtgatgtcctctattgggaacgaactggctaattctgtttgggaagagagctctcaagggagaacaaagccatctgtcgactctacaagggaggaaaaagaacggtggattcgtgctaagtacgagcagaagttattcctagcaccactaccctgcacggagctctcgctaggacagcatctattgagagcaactgctgacgaggacttacggactgctattctgttgttagcgcacggctccagagatgaggtgaacgaaacctgtggagagggtgatggacgtacagcacttcaccttgcttgccgcaagggaaatgttgtgttggcacagctcctgatctggtatggcgtggatgtgaccgcacgggacgctcacggtaacactgctctcgcgtacgcccggcaggctagctctcaggaatgcattgacgtgcttctccaatacgggtgccccgacgagaggtttgtgctgatggctacccccaacttgagtaggaggaataacaatcggaataactcatcaggacgagttcccaccattatttag

SEQ ID NO: 16221 - DNA, 1260 bp, synthetic construct
  source 1..1260: mol_type = other DNA; note = Synthetic coding sequence
atgaataatcagaagcagcagaagccaaccctgtctggccaacgctttaaaacccgaaagagggatgagaaagagagattcgatcccacccagttccaagattgcatcatccaggggctgacagagactggaaccgatctcgaagccgtggcaaagtttttagatgcgtctggtgcgaagttagactaccggcgttacgcagagactctgttcgacatactggtggctggcggtatgctggcgcctggggggacactggccgatgatatgatgagaactgatgtctgtgtttttgccgcacaggaagacctggaaaccatgcaagcatttgctcaggtctttaataaactgattcgccgctacaagtacctggagaagggattcgaggatgaagtgaaaaagctgcttctgttcctcaagggtttttcggagtccgaaaggaacaaactagccatgctaaccggtgtactattagcaaacggcacgcttaacgcctccatcttgaactcactgtataacgagaacctcgttaaagagggcgtctccgccgccttcgccgtgaaactttttaagtcgtggatcaatgagaaggacatcaatgctgtggccgcttcactccgcaaagtttctatggacaatcggctcatggagttgttcccagctaataagcaatctgtagaacactttaccaagtatttcaccgaagccggcctgaaggagctgtccgagtacgttagaaatcagcagacaatcggagcgcggaaggaactccagaaagagctgcaggagcagatgtccaggggtgaccccttcaaggatattatcttgtacgtgaaggaggaaatgaaaaaaaacaacatccctgaaccagtggtgattgggatcgtgtggtcatccgtcatgtccactgtggagtggaacaaaaaggaggagcttgtcgccgagcaggccattaaacacttaaaacagtactctcccctcctggccgcttttacaactcaaggccagtctgagttgacgctgttgctgaaaatccaggagtattgctacgacaatatacatttcatgaaggcttttcagaaaatcgtagtactcttctacaaggccgaggttctgtcagaggagccaatcttgaaatggtacaaagatgcgcacgtggctaagggtaaaagcgtgtttttggagcagatgaaaaagtttgtcgagtggctgaaaaacgccgaggaggagtcggagtcagaggccgaagagggggattag

SEQ ID NO: 16222 - DNA, 2769 bp, synthetic construct
  source 1..2769: mol_type = other DNA; note = Synthetic coding sequence
atgattaccagtgccgcaggaatcatatccctgctagatgaggatgagccccaactcaaggaatttgcactgcacaagctgaacgcggtggttaatgatttttgggctgagatcagcgagtctgtcgataagatcgaggtgttgtacgaagacgaaggtttccggtcgcgtcagttcgcggccctcgtggcctccaaagtgttctaccacctaggtgcctttgaagagtcacttaactatgctcttggagctggcgaccttttcaatgtgaacgacaactccgagtatgtcgagacaattatcgcaaaatgcattgaccactacacaaaacagtgcgtggagaacgcggacctccccgaaggagagaagaagccgatcgaccagagactcgagggcatcgtcaataaaatgttccagagatgtctggatgatcacaagtataaacaggccattggcatcgcactcgaaaccagaagactggacgttttcgagaaaactatattggaatcgaatgacgttcctggcatgctagcgtactcactcaagttgtgcatgtccctaatgcagaataagcagtttagaaacaaggttctccgggtgctggtgaagatttacatgaatctagagaagccagattttatcaacgtgtgccagtgtctaatctttctggacgatccacaggctgtgtctgacatattagaaaaactggttaaggaagacaatcttctcatggcttaccaaatttgcttcgacctgtacgagtcagccagccagcaattcttatcctccgtgatacagaacctgcgcaccgttggcacaccgatagctagtgtgcctggctcaactaataccggtacagtgcccgggtccgagaaagattcagactccatggagaccgaggaaaagacatcaagtgccttcgtaggcaagactcctgaggccagtccggagccgaaggaccaaactctgaagatgatcaaaattctgagtggcgagatggcaatcgagttacatttacaattcctcattcgcaacaacaatactgacctgatgattctaaagaacacgaaggacgccgttcgtaactccgtctgtcataccgctactgtaatcgctaacagctttatgcattgcggaactaccagcgaccagttcctcagagacaacttggaatggctagcaagggctactaactgggcaaaatttactgctacggcttccttgggcgttatccacaagggacatgagaaggaagctcttcagctgatggccacctacctgcccaaggacaccagtcccggatcagcctatcaggaagggggcggactctacgcccttggtctcatacacgccaaccacggcggagacattattgactacctgttgaaccagctcaaaaatgcgtctaatgacattgtgagacacggtggcagcttaggcctcggccttgcggccatgggcaccgcacggcaggacgtgtacgacctgcttaaaaccaatctttaccaggacgatgctgtcactggggaagccgccggcctggctcttggtctggtgatgctgggcagtaagaatgcgcaggccattgaggatatggtgggctacgcccaggaaacccaacatgagaagatcttgaggggactagccgttggaatcgctctagtaatgtacgggagaatggaggaagcagatgctcttatcgaatccctgtgcagagataaagacccgatcttacgccggtcgggtatgtacacggtggcgatggcttattgcggcagcgggaataataaggctatcaggcgactgctccatgtggccgtatcagatgttaacgacgatgtgcggagggcagctgttgagtctctcggattcatactgtttcggacaccagagcagtgcccctcagtggtatccctgctgagcgagtcatacaacccacacgttcgctacggcgccgccatggctctgggaatctgttgtgccggtactgggaataaagaggcgattaacctgctggagcccatgacgaacgacccagtcaactacgttcggcagggagccttaatagctagcgccctgattatgattcagcaaacagagatcacatgcccgaaggtgaaccagttcaggcagttatacagcaaagtgattaatgacaaacacgacgatgtgatggcaaagttcggtgcaattcttgcccagggaatcctggatgccggcggccacaatgtgacaataagtttgcagtcgaggactggacatacccacatgccttccgtggttggagtcctggtattcacccaattttggttttggttcccgctgagccacttcctctctctagcctacactcccacttgtgtcataggtctcaataaagatttgaaagtttccacggcagtattgtcgatcacagccaaagcaaaaaagaaagaaaaagagaaagagaagaaggaagaggaaaaaatggaggttgacgaagctgaaaaaaaggaggaaaaagagaagaagaaagagcctgagcccaatttccaactcctagacaatcccgctagagtgatgccagcacagcttaaagtattaaccatgccagaaacctgtcggtaccaaccttttaaacccctgtccataggcggcatcataatactgaaagataccagcgaggatatcgaggaattggttgagcctgtagcggcccacggtccaaaaatcgaggaggaagagcaggagcccgaaccgcctgagcccttcgaatatatcgacgattag

SEQ ID NO: 16223 - DNA, 363 bp, synthetic construct
  source 1..363: mol_type = other DNA; note = Synthetic coding sequence
atggctcctgcgaaaaagggaggagagaaaaaaaagggccgttctgcgataaacgaggtagtgacccgtgagtacaccattaacatccataaacggattcatggtgttggctttaagaagagggccccccgggctctgaaggaaatcagaaaatttgctatgaaagagatgggaacgccagatgtgagaattgatacccggttgaataaagctgtgtgggccaaagggattcggaacgtaccatatcgcatccgagttagactgagtaggaaaaggaatgaagatgaggattctcctaacaaactgtacactttagtgacctatgttcccgtaaccactttcaaaaattgtcatcaccagtag

SEQ ID NO: 16224 - DNA, 378 bp, synthetic construct
  source 1..378: mol_type = other DNA; note = Synthetic coding sequence
atgtcaagcacactcgggaaactttcgaatcaggtggaagaaacactcccactgctgaaaaaggttcccgcaaactatttccacatatgctctgctatcctgatggggttctcattgagcaaatccgcgacccaggtctccgcaattcatatggattcaaaggtcgacgaccaccttattcgcggcaccgaaaagtctcgactggaaccagcgacgcagctgtttcaaaataccaagaaaatccggctggaggataccaaccaggagaattttactaggatcgaggggaccggcactgggtccttgtccggaaaggccttggggagcgttgtctatgtcaaagaatcggacgggctagaaatgacagacgtcgaatag

SEQ ID NO: 16225 - DNA, 1500 bp, synthetic construct
  source 1..1500: mol_type = other DNA; note = Synthetic coding sequence
atgagcacaccaagtgggatctctacatggctctctctgcccgtctctacaccagccagcatcacatcgatacgtgtgacccagaaatcatcgggcccctgggctttctcaagctgcacttacgtatcggggccaggtgtgtgcatttcaagtctgtcttgcagcagggtgggtagctcaagctttcggggtggactcgggggaggatatggaggtgccagcggcatgggaggcataattgccataatggttaatcaatcattgctgtctcctctgaacctcgaagtggatccgaatattcaagccgtctgcactcaagagaaggaacaaatcaaaaccctgaacaacaagtttgcatcgttcattgacaaagtgtggtttttggagcagcagaacaaggtgctcgagaccaaatggagtctgctccagcagcagaagatggccagatccaacatggataatatgcttgagagttatataaacaatctgcgtcggcagctcgaaactctgggacaagaaaaactgaagttagaagctgaattaggcaacatgcagggccttggcgaagactttaagaataagtacgaagatgaaattaataaacacactgaagtcgagaatgaatttgtgctgatcaagaaggacgtagacgaagcctatatgaacaaggccgagctggaaagcctcctcgaagggctcacagatgaaattaattttttgcgccaactttacgaggaggagattcgcgagctccagtcccagatcagtgatatgtctatggttctgagtatggattattcctgctccagagacatggattcaataatccctgaggtgaaggtgcaatatgaggagattgctaattgctcaagggccgaggctgaaagtatgtaccagattaagtacgaagagctacaaaccctggctggcaaatacggtgacgatctgtcacgcaccaagactgagataagtgaaatgaatcggaatataagctggctccaagcagagaccgagggcctgaagggtcaacgcgcgtctctggaggcggccatcacagatgcggagcagcggggggagctcgccgtaaaagacgcaaatgctaaactgtccgaactggaggctgctctccagagagctaagcaggacatgatgggccagctgcgcgagtaccaggagttgatgaacgttggcctgactctggacattgaaatagccacttaccggaaactactggaaggagaggaaagccggctcgagtctggaatgcagaatgttagcatacatacaaagactacaagctcatatgccgggggactctcttccgcctacggagggctgacatctccgggcatcatctatcgattgggctcctcgttcggatctgccgccgggtctagctcttttagtaggacctcatcaacaagagctgtagtggtcaggaagatagagactcacgacgggaaacttgagagcgaatcatccgacgtgctgtccaaatag

SEQ ID NO: 16226 - DNA, 504 bp, synthetic construct
  source 1..504: mol_type = other DNA; note = Synthetic coding sequence
atgtatatgggcatgatgtgtacggccaaaaaatgcggaatacgctttcagccacccgccattattctgatatacgagagcgagatcaaaggaaagatcagacagcgcatcatgccagttcgaaacttttctaaattctccgattgtacccgcgcggcagagcaacttaaaaacaacccaaggcacaagagctatctggaacaggtctctcttcgccagcttgaaaaactgttttccttcctgcggggctatttgagcgggcaaagcctagctgaaaccatggaacagattcagcgagaaacgaccattgatcctgaggaagacctcaacaaactcgatgacaaagagttggcaaagcgaaagtcaatcatggacgagctgtttgagaagaaccagaaaaagaaagacgatccgaatttcgtttacgacattgaggtcgagttcccgcaggacgatcagctgcagagctgcggctgggatacggagtccgcagatgaattctag

SEQ ID NO: 16227 - DNA, 378 bp, synthetic construct
  source 1..378: mol_type = other DNA; note = Synthetic coding sequence
atggcccctgcgaaaaaagggggggagaagaaaaaggggagatccgctattaacgaagtcgttaccagggaatacaccattaatattcacaagagaatccatggcgttggcttcaagaaacgagctcctcgggccctgaaggagatccgcaagtttgcaatgaaagagatgggtacccccgacgtccgcatcgatacccgcctcaataaagccgtttgggctaaggggatccgcaatgtcccctaccgtattcgagtcaggttgagccggaagcggaacgaggacgaagattccccaaataagctgtataccctcgtgacatacgttccggtgaccaccttcaagaaccttcagaccgtaaatgtggatgagaattag

SEQ ID NO: 16228 - DNA, 1005 bp, synthetic construct
  source 1..1005: mol_type = other DNA; note = Synthetic coding sequence
atgacccggtctttatttaaagggaacttttggagcgccgatattctctctaccatcgggtatgacaatattattcagcacttaaataatgggagaaagaattgcaaagagttcgaagattttctgaaagagcgcgcagccattgaagaaaggtacggaaaggacttattaaatctgagccgcaagaagccgtgtggtcagtcagagataaacacattaaaacgggcgctggaggtcttcaagcagcaggttgataatgtggcacaatgtcacatccaactcgctcaatcattacgcgaagaagcgaggaagatggaggaatttcgtgagaagcaaaagcttcaaagaaaaaaaactgagttaattatggatgcgattcacaagcaaaagtcactgcaatttaagaagaccatggatgccaaaaaaaactacgagcagaagtgtagggataaagatgaggcggagcaggccgtatcacgttcagccaaccttgtcaatcccaagcagcaggaaaagctgtttgtgaagttagccacctcaaagacagcggtcgaggactcggataaagcctatatgctgcacatcggaactttggataaggtgcgtgaagagtggcagtccgaacatatcaaagcgtgcgaggcctttgaggctcaggagtgtgagcggatcaatttcttccgcaacgccttgtggctccacgtgaaccaattgagccagcagtgcgtaacctcagatgagatgtatgaacaggtgagaaagagcctcgagatgtgctccatccagcgtgacatcgagtacttcgtgaatcaacgcaaaacagggcagatcccgcctgctcctattatgtatgaaaacttttattcatcacagaagaatgccgtgcccgcgggaaaggctactgggcccaacctcgcccggcggggtccgctgccaatacccaaatcaagcccagatgatcctaactacagtctggtcgatgactactcactcctgtatcagtag

SEQ ID NO: 16229 - DNA, 597 bp, synthetic construct
  source 1..597: mol_type = other DNA; note = Synthetic coding sequence
atgaagaaggtgaggctgaaagagctggagtctaggctccagcaagtggatgggtttgaaaaacccaagctccttctggaacagtacccaacccgaccacacatagccgcttgtatgctgtacacaattcacaacacatacgatgatattgaaaataaggtagtcgctgatctgggctgcggctgcggtgtactgagtattggtacggcgatgttgggggccgggctgtgcgtgggctttgacattgacgaggatgctctcgagatattcaatagaaatgccgaggaatttgagctgaccaatatagacatggtgcagtgcgacgtgtgcctgctgagtaaccgaatgtccaaatcattcgataccgtgattatgaaccctccgtttggcacaaagaacaataaaggaacggacatggcctttctgaaaactgcactggaaatggcccgaacggccgtttattccctgcataagagctctactcgggagcacgtccaaaagaaggcggcagagtggaaaatcaaaatcgacattatcgctgagctccgctacgatttgccagctagttataagttccataaaaagaagtctgtttag

SEQ ID NO: 16230 - DNA, 1125 bp, synthetic construct
  source 1..1125: mol_type = other DNA; note = Synthetic coding sequence
atgcttgccccggggtgcgaacttgatcccgaccaggaagtggtccgtacgcggccagaggatgtacccgctagtccttctactagtaccatgatcgtcagcgtcttaaggcctccctcacacgcatcctgcactgcctgcgggactgtgacctttcatatagtcgagcgtatggcgagcgtcataccggctagcaataggtctatgcgatccgaccgtaacacttatgtcgggaagagatttgtacacgtgaagaacccctatcttgacttaatggacgaagatatcctgtatcacctcgacctaggaactaagactcataatttgccagctatgttcggagacgtcaaattcgtttgcgtgggggggagtcctaatcggatgaaagcgtttgctctctttatgcacaaggagttgggattcgaagaagcagaagaagatattaaagatatttgcgcagggactgacagatattgtatgtacaaaacagggcccgttctggctatctctcacggaatggggataccctctatcagtatcatgcttcacgagctcatcaagctgctgcaccatgcaaggtgctgtgacgtcaccatcattcgtattggcacatccggaggtatcggaattgccccaggtaccgttgtgattactgacattgccgttgatagcttcttcaagccaagattcgagcaggtgattttggacaacattgtcacacggtccaccgaattggacaaggaattgtcggaggagttatttaattgtagtaaggaaattccaaatttccccacgcttgtagggcacacaatgtgtacatatgatttctatgaaggccagggcagacttgacggcgcgctgtgttccttcagtagggaaaaaaagctggattacttgaagagggccttcaaggcaggagttcgaaacatcgaaatggagagcaccgtgtttgctgcaatgtgcggcctctgtggtctgaaagcggcagtggtatgcgttacgctactcgataggctcgactgcgatcaaataaatctcccacatgacgtactggtggagtaccagcagaggccccagcttctgatcagcaattttattaggaggcgcctgggcctctgcgattag

SEQ ID NO: 16231 - DNA, 4149 bp, synthetic construct
  source 1..4149: mol_type = other DNA; note = Synthetic coding sequence
atgttacggaaacttacaatcgagcagatcaatgattggtttactattggtaagactgtcacgaatgtcgagttgctgggggctcctccagctttccctgcaggcgccgctagggaggaggtgcagcgacaggatgtggcccctggcgcaggtcccgctgcccaggcccccgcactcgctcaggcacctgcccgtccagccgccgccttcgagcgttcactcagtcagcgctcttcagaggtagagtatataaacaagtatcgccagctggaggcccaggagctcgacgtgtgccgtagtgttcagcctacttctgggcctggcccaagacccagcctggccaagctcagcagcgttacatgcattcccggaactacttataagtaccccgacctacccatctccagatataaagaggaggtagtgagcctgattgagtctaatagtgttgtgataattcacggagccactgggagcggaaaatccactcaattgccccaatacattctggatcattatgtacagcggagcgcctactgttctatcgtcgtcacacagcctagaaagattggcgctagcagcattgcccggtggataagtaaagagagggcttggaccttgggcggcgttgtcggctatcaggtgggactcgagaagatagccaccgaggatacaaggttgatttatatgactacgggcgtgctgcttcagaagatcgtgagtgcgaaatctctgatggaattcacccacatcatcatcgatgaggtgcatgaaaggacggaagagatggatttcttgctactggttgtgcggaagctgctgcgaacaaattcaaggtttgttaaggttgtattgatgtcagcaacaatctcatgtaaggagttcgcagattattttgccgtaccagtgcaaaataagatgaaccctgcctacatctttgaagtagagggtaaaccacattcggtggaggagtattaccttaatgacttagagcacatccaccactccaagctttcaccccatctgttggaggaacccgttattactaaagacatctacgaggttgccgtttccctgatccagatgtttgatgatttggatatgaaggagagcgggaacaaagcatggtcaggtgcccagttcgtcctggagcgctcctccgtgttggtgtttctgccagggttgggcgaaatcaactatatgcacgagttactgacttctctagtccacaaacgcctccaggtgtatccactgcactcatcagtcgccctggaagaacagaataacgtgtttcttagcccggtcccaggatatagaaaaattatattgtctaccaacatcgccgaaagctcagtgacagttcccgacgtcaagtacgtgattgacttctgcctgaccagaactctcgtttgtgacgaggacaccaactatcagtccttgcgcctgtcgtgggccagcaaaactagttgcaatcagcgaaagggcagggcagggcgcgtgagccgtggatattgctaccgtctggtgcataaggatttttgggataactcaatccccgaccatgtagtgccagagatgctcaggtgcccccttgggtctacaatcctgaaggtcaagctcctggatatgggggagccgagggcattactagctaccgcactcagtccacccgggctcagtgatattgagagaacaattctgctgctcaaggaggtgggggccctggcggtgagtgggcagagagaggatgagaacccacatgacggggagctcactttcctcggccgggtccttgctcagctccccgtgaatcagcagttaggcaagcttattgtgctagggcatgtcttcggctgccttgacgagtgcctgataattgccgccgctttaagtctcaaaaacttcttcgccatgccctttcgccagcatctagatggctaccgcaataaggtgaacttttcaggttcatcgaagagtgattgtatcgcactggttgaggctttcaagacatggaaagcctgcaggcagactggggaattgagataccccaaggatgagctgaattggggacgcctgaactatattcagattaagagaatacgagaagtcgcagagctctacgaagagttaaaaacccggatctcgcagttcaatatgcatgtcgactcccggcggccagtgatggatcaggagtacatatataagcagcggttcattttacaggtggtgttggctggagctttctaccccaactatttcacgttcggccagccagacgaggaaatggccgttcgcgaactcgctggtaaggacccaaaaacaactgtggttctgaaacatatacccccttacggtttcctatattacaagcagctccagagtttgttccggcaatgcggacaggtgaaaagcatcgtgttcgacggcgctaaggccttcgtggagttcagcaggaaccctacagagagattcaagactctgcctgctgtctacatggccattaagatgtctcaactgaaggtgtctctggagctgtcagttcattccgccgaggagatcgagggcaaggtacagggcatgaacgtctcaaagctgcgcaatactagggtaaacgtcgatttccagaaacagaccgtcgaccccatgcaggtctcgtttaacacgtcagatcggtctcagacagtaacggatctgctgctcactattgatgtgacagaggttgttgaagtgggacatttttggggctatcgcatcgacgaaaataactccgagatactgaagaagctgaccgctgagatcaaccagcttacgctggtccctctccccacacatcctcaccctgacctggtgtgtctcgcgccctttgcggatttcgataaacagagatattttcgcgcccaggttctgtacgtcagtgggaattctgcagaggtgttcttcgtggattacggcaataaatcgcacgttgaccttcacttactgatggagatcccctgtcagttccttgagctgccttttcaggctctcgaatttaaaatctgtaagatgaggccgtccgctaagtcactcgtctgtggaaagcactggagtgacggagccagccagtggttcgcttccctcgtcagcggatgcactctgttggttaaggttttctctgtcgtgcactccgttttgcatgtggacgtttaccagtactctggggttcaggacgcgattaacatcagagatgtgctcattcagcaaggctacgctgagctcacagaggagtcgtatgaatctaagcagagtcacgaggtgctcaagggtttgtttagcaagtcagtagaaaacatgaccgacggctcagtgccgtttccgatgaaggacgacgagaagtatcttatccggatcctcctcgaaagtttcagtacgaacaaactgggtacacctaattgtaaggcggagcttcacggacctttcaacccctatgagctgaagtgtcatagtctcacaagaatctccaaattccggtgcgtctggatcgaaaaggaaagcataaactctgtcatcattagtgatgcccctgaggatctccaccagcgcatgctggtggctgctagcctgagcattaatgctactggctctaccatgcttcttcgtgagacatcccttatgccccacatacctggcctacctgcgctgctgtcaatgttgtttgcccccgtgattgaactgcgaatcgatcagaacgggaaatattacaccggggtgctgtgcggcctggggtggaatccagctacaggagcgtcaatcctccctgagcacgatatggaactagcctttgacgtgcagttctctgtggaagatgtggttgaggtcaacatactgcgagcagccatcaacaagctcgtatgcgacggtcccaatggctgtaagtgtctaggtcccgagcgtgtggcccaattgcaggatatagcccgtcagaagctcctggggctgttttgtcagtcaaagcctcgcgagaagatagtaccgaagtggcacgagaagccctacgagtggaatcaagtggatccaaagctagtgatggagcaagccgacagggaaagttccagggggaagaatactttcctttaccagctgcataagttggtggtgctcgggacttag

SEQ ID NO: 16232 - DNA, 357 bp, synthetic construct
  source 1..357: mol_type = other DNA; note = Synthetic coding sequence
atggacgtcttcctgatgatccgtcgacacaaaacaactatttttacggacgccaaggaatctagtactgtgtttgagctgaaaaggattgtagagggaatccttaaacggcctcccgatgaacagcggttatataaagacgaccagctgctcgatgatggcaagacactgggtgaatgtggcttcacctcccagaccgcccgccctcaggcacccgcaaccgtaggtctggcctttcgcgccgacgacactttcgaggcactctgtattgagcctttcagtagcccgcctgagctgccagacgtgatgaagcctcaggactctgggtcctcagccaacgagcaagctgtccagtag

SEQ ID NO: 16233 - DNA, 3228 bp, synthetic construct
  source 1..3228: mol_type = other DNA; note = Synthetic coding sequence
atggttgtagaggtcgattccatgccagccgcctcctcagtcaagaagcccttcggtttacggtccaaaatgggaaaatggtgctgccgatgttttccatgctgcagggaaagtggaaaatccaacgtggggacttccggtgaccacgatgatagtgctatgaagaccttaaggtccaagatgggaaaatggtgtcgccactgtttcccatgttgccggggaagcggcaagtcaaacgtcggcgcaagcggggaccatgatgactctgccatgaagacactgagaaataagatgggaaaatggtgttgccattgtttcccatgttgccggggctcctcaaaatcaaaagtgggagcatggggagactacgacgacagtgcgttcatggaaccacgataccacgtgaggggggaagacttggacaagctccaccgggccgcctggtggggcaaagtccccagaaaagacctgattgtgatgctgagagacactgacgtcaataaacaggataagcagaaaagaaccgcactccacctggcttccgccaatggaaactctgaggttgttaaactcctgttagaccggcgttgccagcttaacgttttggacaataaaaaacgtactgccctgatcaaggccgtgcagtgccaggaggatgaatgcgcacttatgttgctagagcatggaacagatccaaacatacccgacgagtatggaaacacgacactccattatgcaatatacaacgaggacaagttgatggctaaggctcttctcctgtacggcgccgacattgagagcaagaataaacacggcctgaccccactcctgcttggagtgcacgagcagaaacagcaagtcgtgaaattcttgatcaaaaagaaagccaacctgaacgctctagatagatacggcaggacagctttgattttggccgtgtgctgtggatcagcaagcattgtttccctcttgcttgagcaaaatatcgatgtcagctcccaagacttgagcggccagactgctcgcgagtacgccgtaagctctcatcaccacgtaatctgccagctgctatccgattataaagagaaacagatgcttaaaatatcatctgaaaacagtaatccagagcaggacctcaagctgacgagcgaagaggagagtcagagatttaagggaagtgagaacagccaacccgaaaagatgagccaagaacccgaaattaacaaggacggcgaccgtgaggtggaggaggagatgaaaaagcacgaaagcaacaatgtgggcttgttagaaaatctcacaaatggcgtaacagcaggcaatggcgacaatgggctgattccccagcggaagtcccgcacgccagagaatcaacagttcccagacaatgagtccgaagagtatcacagaatctgtgaactcctctccgactataaggagaagcaaatgcccaagtatagttccgagaactctaacccagagcaagacctgaaattaacttccgaagaggagtcgcaacgactgaagggcagcgagaacgggcaaccagagaagcggagccaggaaccggagattaataaagatggtgaccgcgagctcgaaaacttcatggccattgaggagatgaagaaacaccgttccactcacgttggattccctgaaaatctgaccaacggggctacagccggtaacggagatgatggattaatcccgccaagaaaatcccggaccccagagtctcagcagtttcctgacactgagaatgaggaatatcatagcgacgaacagaacgacacacagaaacagttctgcgaggagcaaaacaccgggatactccatgacgaaattctgattcacgaggagaaacagatagaggtagttgagaaaatgaactcagaactgtctttgtcctgcaaaaaagagaaggacattttacatgaaaactccaccctccgggaagaaatcgccatgttgaggcttgaactggatacaatgaagcatcagtcccagctgagagaaaagaaatacttggaggacattgagtcagtgaaaaaacgaaatgacaatcttctcaaagccctccaattgaatgaacttaccatggacgacgatactgcggtgctggtgatcgacaacggatctggcatgtgcaaggctggtttcgctggtgacgacgcgcccagagcagtgttcccctctatagtgggccggcccagacaacagggtatgatgggcggaatgcatcaaaaggagagctatgtgggcaaagaggcccaaagtaaaagagggattttaacactgaaataccctatggagcatgggattattactaactgggacgatatggagaaaatctggcaccatacattctacaacgagttgagagttgcccccgaggagcaccccgtgctgcttaccgaggcaaccctgaatccaaaggctaacagagaaaaaatgacccagataatgtttgaaacttttaacactccagccatgtacgtcgccatacaggcagttttatccttatacacgagcggaaggacgaccggcattgtgatggactccggagatggcgtaacacatacagtccccatttacgaaggcaacgcgctaccccatgcgacccttcggttggatctcgccggaagagaactaccagactacctcatgaagattctgacagaacacggttacagattcaccacaatggctgagagagagatcgttcgggacatcaaagagaaactgtgctacgttgcattggactttgagcaagagatggcaaccgtggcttctagcagctcgttagagaagtcttatgagctgcctgatggtcaagtgattactatcggcaacgaaaggtttcggtgcccagaagcgctgtttcagccctgttttctcggcatggaatcatgtggtattcacgaaactactttcaatagcatcatgaaatcggacgtggacattcgaaaggatctgtatactaatactgtgttgtcaggggggaccactatgtaccctggtatggcacaccggatgcagaaggaaatcgctgcactggccccttcaatgatgaaaattaggattatcgcacccccgaagagaaaatactctgtttgggtcggggggagcatcctggcctcactatccaccttccagcagatgtggatctctaaacaggagtatgatgagagcggaccgtctatagtccatcgcaagtgtctctag

SEQ ID NO: 16234 - DNA, 381 bp, synthetic construct
  source 1..381: mol_type = other DNA; note = Synthetic coding sequence
atgacagcaacagaacaatggatattcctgtgcgcagctcataaaacccccaaggagtgtcctgccatcgattacaccagacatacactggatggagccgcttgtctccttaactccaataagtatttccctagccgcgtttctattaaagaatcctcagtggcaaagttagggtccgtatgccggcgcatctatagaatcttcagccatgcctatttccaccaccgtcagatatttgatgagtatgagaacgagacttttctttgtcatagattcacaaaatttgtcatgaaatacaatctgatgagcaaggacaacctgatcgttcctatcctggaagaggaagtgcagaatagcgtgagcggcgaaagcgaggcttag

SEQ ID NO: 16235 - DNA, 2811 bp, synthetic construct
  source 1..2811: mol_type = other DNA; note = Synthetic coding sequence
atggagcctgacatcattcggatgtacagctcctccccccccccacttgacaatggcgcggaggatgatgatgacgacgagtttggcgaattcggtgggttttccgaagtgtctcctagcggcgtcggctttgtcgactttgataccccagactacacccggcccaaagaggaatttgtgcccagtaaccactttatgcccatccatgaattttctgaaaacgtggacagcttgacatcctttaagtccatcaagaacgggaacgataaggatattacagctgagttaagtgcccctgtgaaaggccaatcagacgttctgttgagcactacgtctaaggaaatcattagttccgagatgcttgcaacaagcattgacggaatggagagaccaggcaacctgaataaagttgttgaacagcgacagaatgtggggacactggagtctttcagccctggggactttaggacaaatatgaatgtggttcaccagaataagcagctggagagctgcaacggcgagaagcctccttgccttgagattctgaccaacggattcgctgtcctagagaccgtgaatcctcagggcactgatgatttggacaatgtggcggactctaaaggccgtaagcccctcagcacgcactctaccgagtacaatctggattccgtcccaagccccgcagaggaattcgcagatttcgcaaccttttccaagaaagagaggatccagctggaggagatcgaatgcgcagtgctgaacgaccgcgaggctcttacaatcagggagaacaacaaaatcaatagggttaatgagctgaacagcgtcaaggaagttgctctcggcagaagccttgacaacaagggagatactgacggtgaggatcaagtttgtgtaagcgagatcagcattgttacaaatcgcggcttcagcgttgagaaacagggcttgcccactctgcaacaggatgagttcttgcaaagcggtgtgcagtctaaagcttggagtttggtggatagcgccgacaactccgaagccatccgaagagaacagtgtaagacagaggagaaattagacctgctcacctcaaaatgtgcgcatctgtgtatggatagtgtgaaaacaagcgatgacgaggttgggtctcccaaagaggagtctcgcaaatttactaattttcagagccccaatattgaccccactgaggaaaatgatctagacgacagcctttccgtgaaaaatggcgatagctctaacgattttgtaacatgtaacgatattaatgaagatgacttcggggactttggtgactttggtagcgcatccggctcgacccctccttttgttactggaacccaggatagcatgtctgacgccacatttgaggaaagcagtgagcacttcccgcatttctctgaaccgggcgatgacttcggcgagtttggcgatattaacgcagtgagttgtcaagaggaaaccatactgacaaagtcagatctcaaacagacgtccgacaatcttagcgaggagtgccaactagccagaaagtcatcaggaaccgggaccgagccagtcgccaaactgaagaatggacaggaaggcgagataggccattttgattccgtgccaaatattcaggatgattgtaacggatttcaggatagcgacgacttcgctgatttttcttctgcaggaccaagtcaagttgtggactggaatgccttcgaagacgaacagaaggattcgtgttcttgggctgcctttggagaccagcaggcaacagagtcacaccaccgcaaagaggcctggcagagccacaggacggatgagaatatcgacactcccgggacccccaaaacgcactctgtcccctccgctaccagcaagggagcagtcgctagtgggcatctccaagagtcagccaccagcgtgcagacagcactgctgaaccggctggagcggatctttgaggcttgcttccccagcatactggtacctgatgcagaggaggaagtcaccagtctgaaacacttgctggagacttctactcttccgatcaaaacaagagaagccttacccgaatcgggtgaactgctggacgtgtggaccgagttacaggatatccacgacgctcacggccttagataccaatggggagggtcgcactcaaataaaaaactgctctcatctctaggaatcgataccaggaatattttgttcactggcaacaaaaagcagcccgtcatcgttcccatgtacgcagcagggttgggtatgctggaaccaacaaaggagccccttaaacccttgtccgcggcagaaaaaatagcctccatcggacaaaccgcgactatgtcccctgacatgaacacatgcacttctgatcagtttcaggaaagtctgccacctgtacagtttgattggagcagcagtgggctgacaaatccactggacgcaagcggagggtcaaccctgctcaacttagacttttttggaccagtcgatgacagctcttccagcagctcaactactattccaggcgtagaccctgagttatatgagctgactacctctaaactggaaatttctacttcgtcactgaaagtcacggacgccttcgctagactaatgtcaaccgtcgagaaaacctccacatcgacccgaaaacctaaacgcgaggagcaccttagcgaagaagctattaaggtcattgcgggtctgcctgatcttacattcatgcacgccaaagtgctcatgtttccagctacactgacccctagcactagtagccaagaaaaggccgacggctag

SEQ ID NO: 16236 - DNA, 1860 bp, synthetic construct
  source 1..1860: mol_type = other DNA; note = Synthetic coding sequence
atggacgatcagcaagccctgaactcaataatgcaggatctagcggtgctccataaggcttcgaggcccgctttgtcgttgcaggagacaagaaaggctaagagttcttcacctaagaaacagaatgatgtgcgtgttaaattcgagcatcgtggtgagaagcggatccttcaattccccagaccagttaaactggaagacctaaggagcaaggccaagattgctttcggacagagcatggacttacattacaccaataacgagctggtgatccctctcactacccaagatgatctggataaagctgtggagttactggaccggagtatccacatgaaaagtctgaagatattgctggtcattaacgggtccacgcaggcaaccaatctggagccccttccgagcctcgaggacctggataacaccgtgtttggagccgagcgtaagaagcgcttgagcataattgggcccacctctcgcgacaggtcgtctcctcctcccggctacatacccgatgaactgcaccaagtagcgcgcaatgggtcctttacatctatcaacagcgaaggcgaattcatccctgaatccatggatcagatgctggacccactgtcgctttccagcccagagaatagcgggtccggctcctgcccgtcgcttgacagcccccttgacggagagagctatcccaagtctcgcatgcctagggcccaaagttatcccgacaaccatcaggagttcagtgattacgacaatcctatcttcgaaaagttcggaaaaggcggtacatacccaaggcgataccatgtgagctatcatcaccaggagtacaacgatgggcgcaagaccttccccagggctcggaggacacaggggacatcgctgcggtccccagtgagcttcagcccaactgatcatagtctctcaactagctcaggatcatccatcttcacgcccgagtacgacgactctaggatcaggaggaggggatccgatatcgataatcctaccttgactgtgatggacatttcgccgccatcccgttcgcctagggctcctaccaactggaggctgggaaagctcctgggccagggggccttcggtcgcgtctatctctgctatgacgtcgacacaggccgtgagctggcagtgaaacaggtgcagtttgatccagacagtcccgaaacctctaaggaggttaatgctcttgagtgtgagatccagttgctgaagaacctcctacatgagagaattgtccagtattacggttgcttgcgcgatccacaagagaagacgctgtctatcttcatggagtacatgcctggaggttcaattaaggaccaactgaaagcatacggggcactgactgaaaatgttactcggaagtataccaggcagattctcgaaggagtgcattatctgcattcaaatatgattgttcacagagatattaaaggcgctaatattcttcgagactccaccggcaacgtaaaattaggagactttggggccagcaaaagattgcagaccatatgtttgtccgggactggcatgaaatcagtgaccggcacaccttactggatgtcccccgaggtgatctcaggcgagggctatggaagaaaggctgatatttggagtgtggcttgcacagtggtggaaatgctgactgaaaaacctccatgggctgagtttgaagccatggctgcaatcttcaagattgccacgcagccaactaaccccaagctgccaccccatgtctctgattacactagggatttcttaaagcgaatattcgtggaggctaaactgcgacctagtgctgatgaactcctccggcacatgtttgtccattaccactag

SEQ ID NO: 16237 - DNA, 513 bp, synthetic construct
  source 1..513: mol_type = other DNA; note = Synthetic coding sequence
atgacgaggggaaaccagcgcgagctggcacggcaaaagaatatgaaaaaacaaagcgatagcgtgaaaggaaaacgcagggacgacggcctgtcagcggcagcacgcaagcagcgcgttggggtccaacagcctaatgcagagctgtctccaatccacttccacctgatcctgtgcgccttacacccgcccgcatcttgtcctttctgccctctcgtcccgccatcagctccatcttctctcccaccaggcacgcgacgcagctgctcgcggtccagaaaacggcaaactcgaagaaggagaaatccgagctcattcgtcgcctcctgtcctacccttctcccattcgcctgcgtccccggcgccagccctaccaccttggcgtttcctccggttgttctaactgggcccagcactgatggaatcccattcgctctgagcctgcagcgtgttcctttcgtactcccttccccgcaagtggcgagcctaccactggggcacagtaggggttag

SEQ ID NO: 16238 - DNA, 630 bp, synthetic construct
  source 1..630: mol_type = other DNA; note = Synthetic coding sequence
atgaagaaagttaggctgaaggagcttgaaagtaggcttcagcaggtggatggcttcgaaaaacccaaactcctgcttgagcagtatccaacgaggccacacatagcagcttgcatgttgtatactattcataatacttacgacgatatagagaataaagtggtggctgacctgggctgcggatgcggcgtgctgtccatcggcactgctatgctgggtgccgggctttgcgtcggcttcgatattgatgaggacgcactagagatttttaaccgcaatgctgaagaatttgagctgacaaacattgacatggtccagtgtgacgtctgccttcttagtaatagaatgagcaagagctttgatacagtgataatgaacccgccatttgggacaaaaaacaataagggcaccgatatggctttcttgaaaaccgcgctggaaatggctcggacagccgtctattcactccacaagtcatctaccagggagcacgtccagaagaaggctgccgagtggaagattaaaatcgacattattgcagaactgcggtacgaccttccggcctcctacaaatttcacaaaaagaaaagcgttgatatcgaggtagacttgattagatttagtttctag

SEQ ID NO: 16239 - DNA, 1755 bp, synthetic construct
  source 1..1755: mol_type = other DNA; note = Synthetic coding sequence
atggctgctagcgctaaacgcaaacaggaggagaaacatctcaagatgctgcgagatatgacaggcctacctcataacagaaagtgtttcgactgcgatcagcggggccccacttacgtgaacatgacagttgggtcgtttgtgtgtacgtcctgttctggaagccttcgaggtctgaaccctccacatcgagttaaatcaatctcaatgactacctttacacaacaggagatagaatttttgcaaaaacacggcaacgaagtatgcaaacagatttggctcggcctttttgatgatcgcagttcggctatacctgattttcgggacccgcagaaggtcaaggagttcttacaagaaaaatacgagaaaaagagatggtatgttccacctgaacaagcaaaagtggtggcctcggtgcacgctagcattagcggtagctccgcaagctcaacctcttcgacacccgaggtgaagccactgaaaagccttctcggggactcagccccaactttacacttaaacaaaggcactcctagccaatcccctgttgttgggcgctcacagggacagcagcaagagaagaaacaatttgacctgttaagcgacttaggtagcgacattttcgcagccccagcaccacagtcaacggctaccgccaacttcgcaaattttgctcattttaactctcacgccgcccagaattctgcaaacgcagattttgccaactttgatgctttcggccagtcctcaggctcttcaaattttgggggattccccaccgcatcccacagtccttttcagccacagaccactgcttttaggatgctgtcctccagctgctccttcggggaatttacctcggcgtttcctctacaggctactcactctggttctgcagcttcggttaatgcgaactttgcccattttgacaacttcccaaaatcctcatccgctgattttgggactttcaacacatcccagtcccatcagaccgcctctgcagtgagcaaggtgagtacaaataaagccggcttgcagactgccgataaatatgctgcgttggcaaacctggataacattttctctgccgggcagggaggagaccagggctctggattcggaactaccggaaaagcaccggtcggctcagtggtctctgttccttcccagagtagtgcaagtagcgacaagtatgccgcattagcagaattggattccgtgttctcaagcgctgccacctcttctaacgcttacacctccacctctaatgcctcttcaaatgtgttcgggaccgttcctgtggttgctagtgcccagacacaacccgcctcttccagcgttccagctccattcggggcaaccccttctactaatccttttgtcgccgccgctgggccgtcagtggccagttcgaccaacccttttcagaccaatgcaagaggcgcgaccgcagccacctttggcactgcttccatgagtatgcccactggatttggaactcctgccccatactcactacctaccagtttttctggaagcttccagcagcccgcctttcccgcacaggctgcattcccacagcaaacggccttttcccagcagccaaatggcttcgcagcctttgggcagacaaagccggttgtcacaccattcgggcaggtcgccgccgcaggagtaagctctaatcctttcatgacgggtgcaccaactgggcagttccccactggcagctcttcaaccaatccattcttgtag

SEQ ID NO: 16240 - DNA, 795 bp, synthetic construct
  source 1..795: mol_type = other DNA; note = Synthetic coding sequence
atggcgggagagcagaagccaagctctaatcttttggaacagttcatcctgctggcaaaaggaactagcgggtcggccctgaccgccctcatttctcaggtgctagaggcgcccggcgtgtacgttttcggggaactccttgagctggcaaacgtccaggagctggcagaaggcgccaatgccgcttacctgcagctccttaatcttttcgcctacggcacctatcctgactacatcgccaacaaggagtctttgcctgaactgtccaccgctcagcagaacaaacttaagcaccttacaatagttagccttgcaagccggatgaagtgcatcccctacagcgttcttcttaaagatctggaaatgagaaatctgagagaattggaggacctgatcattgaggctgtttacactgacataattcaaggcaagcttgaccaaagaaatcaacttctagaagtcgatttttgcattggaagggatattcgcaagaaagatataaacaatattgtcaagacactgcatgagtggtgcgacggctgtgaggcggtcttgttgggcatagagcagcaggtattacgcgctaaccagtacaaggagaaccacaataggacacagcaacaggtcgaggctgaagtgaccaatatcaagaagacgttgaaggcaacagccagctcttccgcacaggaaatggagcagcagctcgctgagcgcgagtgccccccacacgcggagcaaagacaacctacgaaaaaaatgtcaaaggtgaaggggctggtgtcgagtagacactag

SEQ ID NO: 16241 - DNA, 1506 bp, synthetic construct
  source 1..1506: mol_type = other DNA; note = Synthetic coding sequence
atgagcagcgaacaggacaagtcggccagcaaggagaagagtaagaaacctgtgcggttccttccccagctctcaatggagaaattagcaagcaaagaaaaattcaaggcgcctgcccgcgccctgccccagctgagcatggtgtctactaagcctcactggcagcaggcagcgccaagctttcatctgagcgtcaaacaagatgatgaatcccccgagccctttagcgtgaagaatgagcaaagtcatgcagagtatatggagagatttggaaaaaaaggcaaattgccacaccaggttgacgatagttatgttggtccctctacctctaaaagcaaaggcaagtcccctcacaaagaacgcgagaactttaggtctactctagtcaacgtgattatgcagcaagacgccgatctagacagtgccgtgccagatgggtccacaatccctaaacctaccgcttcagcgattgaaaaggacattttgcgttactactactatatacaccacggaatcgacactgatcatgtggctcccatggaggacagttggcttgagcatgtgcttgacctggtaccccagcatctgaaggtgtttactgactcaattgtcacactcagtgacgagatgcgtgaggattatcttctctcagttcgtaaatccatagttgacttcgtgctcaaagacccacgagaaaagggcgacgacaaaaagaccgacgaactaccagcacaccgcgccgagatggaaatcctcccgaaaccttggcggaagagcttcctcgctgccagctcatacatcagagatcatctgaacgccatgaatcctacaatgctcgctgtgctggatctgtggcacaccaatttcaagaaactccggcttgtagacatcaaagagttccataactgccaggatgcgctggagctgagtagcttccagaacatcatcatgagacacatggatagcgctaaggagacattgctaaaaatgtggttccccgaggttcagaacatttactaccagggcaacaaaaagaagcaactgcctactggggacagctctgccaagcttgagtcattttttaattgcgcagcagcattgatgaccctgcagttgcaagatctcacactggtctccatgcaggatttcaccgatctcatagcacagccccctgatagtgtgcgtgcctttgagcatccaggctttattatgagactgattctcgacaacgatacgattaaattcgagcccgagctgtccgattacatcgatatctttctgaatgtgtatgacgtcatgataaaggccgtaagcttcgtgcctcgtgtggaaacaaaactctacagtaaatggcggaacaaagctaaaccaggccacttttatttttcacatatccaaagatccgtcaccttccagcattctgaggtgtcgtccccacaaaatagccactttaaaatcgtctccccattcagtgttctggggttcacgtggaggtgccagctttag

SEQ ID NO: 16242 - DNA, 855 bp, synthetic construct
  source 1..855: mol_type = other DNA; note = Synthetic coding sequence
atgaccgatgttcccgccacatttacccaggctgaatgtaacggcgataagccgccagagaacgggcaacaaactattacaaagatcagtgaggaactgacagacgtggattctcccctgcctcattaccgggtcgagccgtctctagagggcgccttaactaaagggtcccaggaggagcgaaggaaactgcaaggaaacatgcttcttaattcttccatggaggataagatgttgaaggagaatcccgaggaaaagctgtttattgtgcacaaagccattaccgacttgtctctgcaggaaacatctgcggacgaaatgaccttccgggagggacaccagtgggaaaagatacccctcagcggatctaaccaggagattcgccgtcaaaaggaacgcattacagaacagcctctgaaggaggaggaagatgaggaccggaagaacaaaggccatcaggcggccgagatcgagtggttgggcttcagaaaaccaagccaggcggacatgctgcactcaaagcatgacgaagaacaaaaagtgtgggatgaggagattgacgacgacgatgatgacaactgtaataacgatgaggacgaggtacgggtgatcgagtttaagaagaagcatgaggaagtttcacaattcaaggaagagggcgacgctagtgaagacagtcccctgtcgagcgccagctctcaagctgtgacccccgacgaacaaccaactttagggaagaagtctgatattagtcgtaatgcatattcacggtacaatacaattagctacaggaagattagaaaaggcaatactaaacagagaatcgacgagttcgaaagtatgatgcacttatag

SEQ ID NO: 16243 - DNA, 735 bp, synthetic construct
  source 1..735: mol_type = other DNA; note = Synthetic coding sequence
atgaaaaaagtacggctgaaggaacttgaaagtagactgcagcaagtggacggcttcgaaaagccaaagcttctgctggagcaatatccaacaaggccccatattgccgcgtgcatgctctatacaattcacaatacctacgatgatatcgaaaacaaagtggtagctgaccttgggtgtggatgcggagtgctttctatcggtacggccatgctaggtgcgggtctctgcgttggcttcgacattgatgaggatgcactggaaattttcaataggaacgccgaggaattcgaattaaccaatatagatatggtccagtgcgatgtatgcctgctgtccaatagaatgagcaaatcatttgataccgtgatcatgaatcccccttttggaacaaaaaacaataaaggcaccgatatggcatttctcaagacagctctggaaatggctcgtacagccgtttattcactccataagtcctccacgagggagcatgtccagaagaaagccgccgagtggaaaattaaaattgatattatcgcagagctgagatatgacttgccagcctcatataagtttcataagaagaagtccgtgagcctcctcatcttagccgggctccacagtgtgctgaaaagcttccttggtcgcatgtggtggttcatgccagtgataccagctactcgtgaggccgaggccagagaatccctggagctgaggaggcagcgccttcagtag

SEQ ID NO: 16244 - DNA, 885 bp, synthetic construct
  source 1..885: mol_type = other DNA; note = Synthetic coding sequence
atgaataaccaaaagcagcaaaagcctaccttgagtgggcaacgctttaagactagaaaacgcgatgagaaggaacggttcgatcctactcagtttcaggattgtattatccaaggattgacggagaccggaaccgacctggaggctgtggctaagtttctggatgcatccggagccaagcttgactaccggagatatgccgagaccctctttgacattttggtggctggtggcatgttagctccaggcggtactctcgccgacgatatgatgcgcaccgacgtgtgcgtttttgccgcacaggaagatcttgagactatgcaagcgttcgcgcaggtgttcaacaaactgatccgcaggtacaaatacttggagaagggatttgaggacgaggtgaagaagctgctcttattcttaaaagggttttcggaatccgagaggaacaagctcgctatgttaacaggggttttactggcgaacggcactctgaacgcctctatcttgaatagcctttataacgaaaatttggtcaaagagggcgtatcagctgcgtttgctgtgaagctttttaagtcctggataaatgagaaggatatcaacgcagtcgcagcttcactgcggaaggtgagcatggacaacagactgatggaattatttccagccaacaagcagagcgttgagcactttactaagtactttacggaagccggtcttaaggaattgtccgagtacgtgcgcaaccagcagactatcggagccaggaaggaactccagaaagaattacaggagcagatgagtaggggtgatccatttaaggacatcatcctatatgtgaaagaagaaatgaagaaaaacaatatccccgagcccgtggtgatcggctag

SEQ ID NO: 16245 - DNA, 1374 bp, synthetic construct
  source 1..1374: mol_type = other DNA; note = Synthetic coding sequence
atgaatcagccttgtaactctatggaacccagagttatggatgacgatatgctcaagctcgctgtgggcgaccaggggccccaagaggaagcggggcagctcgctaaacaggaagggatcctctttaaagatgtgctaagcctgcagttggactttcggaacattctgcgcatagacaatctttggcagttcgagaacttacgaaaactgcagcttgacaataacataattgagaagatcgagggcctcgagaacctggcccatctagtatggctcgacctttcttttaacaatattgagacgatcgaaggtttggacaccttggtgaacctcgaggacctttctctctttaacaatcggattagcaagatcgactctttggatgcccttgttaaactgcaagtgctcagccttggaaacaaccgaattgacaatatgatgaatatcatatatctgcgcagattcaaatgcctgcggacgctgtctttgtccaggaatcccatttcagaggccgaggactataaaatgttcatttgcgcgtatctgcccgacctcatgtacctagactataggcggattgacgaccacacgaagaaactggccgaggccaagcaccagtattctattgacgagcttaagcaccaggagaatttgatgcaggctcagctggaagacgaacaagcacagcgcgaggagctggaaaaacacaagactgcctttgtggagcatctgaatgggagttttttgtttgatagtatgtatgctgaggattccgagggtaataaccttagttatcttcctggcgtgggcgagttgctcgagacctacaaggacaagtttgtaataatctgtgtcaatatttttgagtatggcctcaaacagcaggaaaagaggaaaactgaactagacactttttctgaatgtgtgcgcgaggctattcaagagaatcaagagcaggggaagaggaaaatcgccaaatttgaagagaaacatctgagtagcctgtccgcgatccgggaagagctggaattacctaatattgagaaaatgatcctggagtgctccgccgacatctcagagctgttcgatgcactgatgacactggaaatgcaattggtagagcaactcgaagagaccatcaatatgtttgagagaaacattgtagatatggttggattatttatcgagaacgtccagagtcttatggcccaatgccgtgatctggaaaaccaccatcatgagaagttgctggagatttctatctctactctggagaagattgtcgaaggagacctagatgaagacctgcccaacgatctgagggctggtcgcttccagaaattcaattacgttgaggcatctggcacgttctag

SEQ ID NO: 16246 - DNA, 1638 bp, synthetic construct
  source 1..1638: mol_type = other DNA; note = Synthetic coding sequence
atgtcatcctccggctaccctcctaaccagggggcttttagcacagagcagtctcgctaccctccgcactccgtgcagtacactttccctaatactagacaccagcaggagttcgcggtccccgattacaggagcagccacctcgaagtgagccaggcatcacagttactccagcagcagcagcaacagcagctgaggcgacgtccatcgctcttgtccgagttccatccgggcagcgatagaccccaggaaagaagaacctcttacgagcctttccaccctggcccttcccccgtcgatcacgattctcttgaaagcaagagacctaggctcgagcaggtcagtgacagtcacttccagagagttagcgcagcagtgttgcccttggtgcatcctctgccagaaggtctgcgcgcatccgccgatgctaagaaggacccagccttcggtgggaaacacgaggccccctcctcccccattagcggtcagccgtgtggagacgatcagaatgctagccccagtaagctctccaaggaagagctgatacagagcatggaccgcgtcgatcgggaaattgctaaggtggaacaacagatcctgaaactgaaaaaaaagcagcagcagctggaggaagaggccgccaagcccccagagccagaaaaacctgtttcaccgccgccagtggagcagaagcacagatcgatagttcaaatcatctacgacgagaaccggaaaaaagccgaagaagctcataaaattttcgagggcctcggcccaaaggtggagctccccctgtataatcagccgagcgatacaaaagtctaccatgaaaatattaagaccaatcaagtcatgcggaaaaaactaatcctgttctttaagaggaggaaccacgctaggaagcagcgcgagcagaaaatttgtcagcgatacgaccagctaatggaggcatgggagaagaaagttgatcggatagaaaacaaccccaggcgcaaagccaaggaatcaaagactcgggagtattacgagaaacagttcccggagatccgaaaacagagagagcaacaggaaaggtttcagcgtgtgggccaaagaggagctggtcttagtgccacgatcgcgaggtcggagcacgagatttcagagattatcgacgggctcagcgagcaagaaaacaatgaaaagcagatgcggcagctcagcgttatcccacctatgatgttcgacgccgaacagagaagggtaaagtttatcaatatgaacgggctcatggaggacccaatgaaagtatataaagaccgacaattcatgaacgtttggactgaccatgagaaggagatttttaaagataagttcattcagcacccaaaaaacttcggactgatcgcatcgtacctggaacgtaaatcagtccccgactgcgtgctgtactattacctgaccaaaaagaacgaaaattacaaggccctcgtgcgcaggaattatggtaaacgtagaggacgaaatcagcagcagatcgcccgcccctctcaagaagaaaaggtggaggagaaggaagaggataaagccgagaagacagagaagaaagaggaggagaaaaaggatgaggaggagaaagacgagaaggaggattcttag

SEQ ID NO: 16247 - DNA, 480 bp, synthetic construct
  source 1..480: mol_type = other DNA; note = Synthetic coding sequence
atgactcactgttgctcaccctgttgccaaccgacctgctgcagaacaacttgctggcagccaacaactgtgactacctgcagctccactccctgttgtcagccctcctgctgcgtgagtagctgttgtcagccttgttgccaccccacttgctgccaaaacacatgctgtcgcactacctgttgccaacccatttgcgtaacatcctgctgtcagccctcttgctgtagcacaccctgctgtcagccaacttgttgtgggtcatcatgcgggcagtcctcctcatgtgcccccgtatattgccgacgcacttgctatcaccctacatccgtctgccttcccgggtgcctcaatcagtcatgcgggtctaactgctgtcagccgtgctgtagacctgcttgttgcgagacaacgtgttgccgcaccacatgcttccagcctacatgcgtgtacagttgttgccagccttcttgttgttag

SEQ ID NO: 16248 - DNA, 1071 bp, synthetic construct
  source 1..1071: mol_type = other DNA; note = Synthetic coding sequence
atggagggacacgatcctaaagaaccagagcagctgagaaagctgttcatcggaggattgtccttcgaaactacggatgactccctgcgagagcattttgagaaatggggcaccctaaccgattgtgtagtcatgcgagatccgcaaactaaacggtcgaggggattcgggttcgtcacatattcctgtgtggaagaggtggacgccgcaatgtgcgccaggccacacaaagtggacgggcgggtcgtggagccaaagcgcgccgtttctcgggaggactccgtgaagccaggcgctcatctcaccgtaaagaagatcttcgtgggaggcatcaaggaggatactgaagagtataacctacgggactactttgagaagtacggcaagatcgagactatagaggtgatggaagaccgtcaaagcgggaaaaagcgtggctttgccttcgtgactttcgacgaccatgacacagtggacaaaattgtggtacagaaatatcatacaataaacggacataactgcgaagtaaagaaggcgctttctaaacaggagatgcagagcgcaggctcccagcggggaaggggtggagggtctggaaatttcatgggcagaggcggtaacttcggcgggggtggcggcaactttggaagggggggtaactttggcggacgcggtggctacggcggtggaggaggaggtagcaggggcagttacggcggcggggacggcggttataacgggttcggcggcgatgggggaaactatggaggggggcctggatattcaagccggggtggctacggcggcggaggacccggctatgggaatcagggcggaggttacggcggcgggggggggtacgacggttataacgagggaggcaacttcggtggcggaaactacgggggcggtgggaactacaacgacttcgggaattactcgggtcagcagcagagcaactatggacctatgaaaggaggttcgttcggaggcaggtcaagcggatcgccctacggaggtggttacgggtccggcggtggttccggcggatatggttcgcgccggttctag

SEQ ID NO: 16249 - DNA, 186 bp, synthetic construct
  source 1..186: mol_type = other DNA; note = Synthetic coding sequence
atgccattcttcgggaatacctttagcccaaaaaaaaccccaccgcgcaagtccgcttcactctccaacctgcactccttggatcgatcaaccagggaagtggagctcgggttggaatatggttctcccaccatgaatctcgctgggcagtcactgaaatttgagaatggccaatggatcgcttag

SEQ ID NO: 16250 - DNA, 981 bp, synthetic construct
  source 1..981: mol_type = other DNA; note = Synthetic coding sequence
atgccacacctccccctggcctcatttcgccccccattctgggggctgcgccattcaaggggcttgcctcggtttcattcagtgtccacccagtccgagccacatggatcccccatctctcggaggaatagggaggctaagcaaaagcgcctgcgggaaaagcaggccacgctggaagctgaaattgccggagaaagcaagtctccagccgagtccatcaaggcttggcggcccaaggagctcgtgttgtatgagatacccaccaaaccaggagagaaaaaggacgtcagtggccctcttccaccggcctactctcctaggtacgttgaggcagcatggtacccttggtgggttagggagggcttctttaaaccagaataccaggcccgcctgcctcaggccactggcgaaactttcagcatgtgcatacctccccccaacgtaaccggaagcttgcacattggccacgctctaaccgtcgcgatccaagacgctctggtgcggtggcaccgtatgcgtggcgatcaggttctctgggttcccggatccgaccatgcaggtatcgctactcaggcagtggtcgagaagcagctttggaaggagagaggtgtgagacgccatgaactctcccgcgaggcattcttgcgggaagtgtggcagtggaaggaagcaaagggtggcgagatatgcgaacagttaagagcccttggagcctccctggactgggaccgcgagtgtttcacgatggatgtcggtagctccgtggctgttaccgaggcttttgtgcgcttgtacaaggcagggctcttatataggaaccatcaactagtgaactggtcttgtgcactcagatctgctataagcgacattgaagtagagaatcgccctctgcctggacatacacagctgagattgccaggctgccccacccctgtgtcttttggtctgctgttctccgtggcattccccgtcgacggatag

SEQ ID NO: 16251 - DNA, 2031 bp, synthetic construct
  source 1..2031: mol_type = other DNA; note = Synthetic coding sequence
atgatccctccacaggaggcttctgcccggagacgtgagatcgaggataaactcaagcaggaagaggagaccctatccttcattcgggattctctggagaaatccgatcagttgaccaaaaatatggtctccatccttagctccttcgaatcaaggcttatgaagttagaaaatagtataatcccagttcacaagcagactgagaatttacagagactgcaggagaatgtcgagaaaacattatcctgtctcgatcacgttattagttattaccacgtggcttctgacaccgagaaaatcatccgcgagggacctaccggtagactggaggagtacctgggatccatggccaaaattcagaaagcagtcgaatatttccaggacaactcgcctgactcccccgagctcaacaaggtgaaactgctgttcgagcgcggtaaagaggcactggaatccgagtttcgaagtctcatgacacgtcactcaaaggtagtcagcccggtcctgatcctggacctgattagcggtgacgatgatttagaagctcaggaagatgtcaccttggaacatttgccagagagcgtactccaggacgtaattagaatctctcggtggttggtggaatatggccgaaatcaagacttcatgaacgtgtattatcaaatccgatcctcgcaattggaccgcagcattaaagggcttaaagagcacttccataagagttcctcatcaagcggcgtaccttattcaccagccattcccaacaagaggaaagacacccccactaagaaacccgtcaagcggcctgggcacgaacacgacttcagggtgaaacacctgtccgaagctctcaatgacaaacatggccctttggccggccgagatgatatgctcgacgtggagaccgacgcctatatccactgtgtgtcagcttttgtgaagcttgcgcagtccgaatatcagctgcttgctgatatcatcccagaacatcaccagaaaaagacgtttgactctttgatacaggacgctttggacggcctgatgctagaaggagagaatatagtgtcagccgctcgcaaagctatcgtgcgacatgacttctctactgtactgaccgtttttccaattctgcggcacctgaaacagaccaaaccagagtttgatcaggtcctacaaggaactgccgcctctacgaaaaacaaactgcccggactgattacatctatggaaaccatcggcgcaaaggctttagaggactttgccgataatattaagaacgatcccgacaaagagtataatatgcccaaggatgggacggtgcatgagttaactagcaacgcaatcttgtttctccaacagcttttagatttccaagaaactgctggagccatgctcgctagccaggaaacatcctccagcgccacctcttatagtagtgagttttcaaagcgcttactctcaacatacatttgcaaggtgctgggaaacctgcagcttaatctgttgtccaagagtaaggtctatgaggacccagccctgagcgccatcttcctgcataacaattacaactacatcctgaaatccctcgaaaagtcagaactgatccagctggttgcagttacgcagaagaccgccgaacgcagttatcgggaacacatcgaacagcagatacaaacctatcagcgctcttggcttaaagttaccgactacatcgccgaaaaaaacttgccagtgttccaacctggagtaaaactaagggacaaggaacggcagattatcaaggaacgatttaaaggattcaacgatggcttagaggagctgtgtaaaatccagaaggcttgggcaattccagacaccgagcagcgcgaccgcattcggcaggcccaaaaaaccattgttaaggaaacttacggagcctttcttcaaaaatttgggtcagttcctttcacaaagaaccccgaaaagtatatcaagtacggggttgaacaagtcggtgacatgattgaccgactcttcgataccagcgcctag

SEQ ID NO: 16252 - DNA, 459 bp, synthetic construct
  source 1..459: mol_type = other DNA; note = Synthetic coding sequence
atgacagacgtcccagccacctttacccaggccgaatgcaatggcgataagcccccagagaacggccagcagaccattacaaagatctcagaggagctcactgatgtcgactccccgttgcctcattacagagtagaaccatccttagaaggtgctctgactaaaggctctcaggaggagcgacggaagctccaagggaacatgctgctcaactcatctatggaggacaaaatgttaaaggaaaatcccgaagagaagttgtttattgtgcataaggcaattacagacctttccctgcaggagacttccgccgacgagatgacttttagagaaggacaccagtgggaaaaaattcccctctctggaagcaatcaggagatccgacgtcaaaaagagagaattactgagcaacctttgaaagaggaggaggatgaagaccggaagaataaagggcactag

SEQ ID NO: 16253 - DNA, 768 bp, synthetic construct
  source 1..768: mol_type = other DNA; note = Synthetic coding sequence
atgtggcctttcccgagccgatcactgtttccaccccccacccaagcgtggttgcagacggtcagctctgaccccgaagcccagggatggggtgcctggaatgaaactaaagagatcctggggccagagggaggggaaggaaaagaggaaaaagaagaggaggaagacgcggaagaagaccaggatggcgacgcggggttcctgttaagcttgctggagcaggaaaacctagcagaatgccctttgccagatcaggaactcgaagcaattaagatgaaggtgtgcgctatggagcaggccgaggggacacctaggccgccaggggtccagcaacaggcggaagaagaagagggtacagccgccggccagctgctctcacctgaaaccgtgggctgccccctgtccgggactcccgaggaaaaggtggaggcagaccatagaagcgtttatgtcggtaacgttgactacggtggatcagcggaagagttggaggctcacttttcaagatgtggcgaggtacaccgcgtgaccattctgtgcgataaattttcaggccatcctaaagggtgctgtcggaaggagccaacatcactgggctcagcgccgcaaaccgccggagccttcgaggacacccaggcacctgggggccacccctctccaactgccgccagccgcgccggaccgggcagtgaccacaaaggcaggactgggccggttgaaaatagccaccatggctttcacaggatcaaagggaaaaccaggttttag

SEQ ID NO: 16254 - DNA, 3561 bp, synthetic construct
  source 1..3561: mol_type = other DNA; note = Synthetic coding sequence
atggaaaaagcaaccgtccccgtagctgccgcaaccgccgccgaaggagagggtagtccacctgctgtagctgccgtggccgggccgcccgctgctgctgaagtggggggcggcgtaggagggtcgagtcgggcacgttcagcatcttccccacgcggtatggtacgagtgtgtgatctcttgttgaaaaagaaacccccccagcagcagcaccacaaagccaaacgaaaccgcacttgtcgccccccgagctcttccgagtcctccagcgactccgacaactctgggggtggcggcggcgggggcggaggaggtggcggcggcggggggacctccagcaataattccgaggaggaggaggatgacgacgacgaggaggaagaagtgagcgaagtggaaagcttcattctggaccaagacgatctcgagaaccctatgctagagacagcgtccaaactgttgctgtcaggaacggccgacggcgccgatctccggacagtcgatcctgagactcaggctcgtctggaggccctgctagaggcggcaggaattgggaaactgtcgaccgctgatgggaaggcgttcgccgatcctgaagtgttacggcgcctcacaagcagcgtgtcatgcgctctggatgaagcagccgccgcgctgacaaggatgcgggcagaatccactgctaatgcaggccagagcgacaaccgctccctggccgaggcatgctcagaaggcgatgtcaatgctgttcggaaactgctaatcgaggggagatcagtgaacgagcatacggaggagggcgagtctctgctgtgcctggcctgctcggctggctactatgagctggcccaggttctgctggcaatgcacgctaacgtggaagacaggggaatcaaaggtgacatcacacccttgatggccgctgcgaacggcggccacgtgaagatcgtaaagctgctgcttgcccacaaagccgacgtcaatgcccaaagctcaactggtaatacagccctcacttacgcttgcgcaggtggatatgttgatgtagttaaggtgctgcttgaaagcggggccagtattgaggaccacaatgaaaacggtcacacccctctgatggaggccggttccgcagggcatgtcgaagtagcccgtctactgctggagaacggcgctggaattaacacccacagcaatgagtttaaggaaagtgctcttacactggcttgctataagggtcacctggagatggtgagatttctattggaagccggcgcggaccaggaacacaaaacagatgaaatgcacacagctcttatggaggcatgcatggacggccacgtcgaagtcgcaaggctccttctggacagcggagcccaagttaatatgcccgctgatagtttcgagtccccactgacgcttgccgcgtgtggcgggcacgtagagctggccgccctcctaatcgagcggggtgccagtctggaagaggtcaatgacgagggatacacccccctgatggaagcggccagggaaggtcatgaagagatggtcgcattgttattgggccagggcgccaatatcaatgcccagacggaggaaactcaagaaaccgcactcaccttggcatgttgtggtggttttctggaggtcgccgattttctcatcaaggccggggccgatatcgaactgggttgcagtacgcctctgatggaggccgcccaggagggccatctcgagcttgtgaagtatctgctcgctgccggcgccaacgtacatgcaaccacagcaacaggagataccgccttgacctacgcgtgcgagaacggccatactgatgtagctgacgtcctgcttcaggcgggtgcggacctggaacacgagagcgaaggtggacggacaccacttatgaaggctgctagagctggacacgtgtgcactgtccagttcttgatcagtaaaggggcaaacgtgaataggacgacagcaaataatgatcacacagttctgtcactggcctgtgctgggggtcacttggctgtggtagagctcctgctcgcccacggcgccgaccctacccacaggttaaaggacggcagtacaatgctgattgaagccgccaaaggcggacacacttcagtggtttgttacttattagactaccccaacaacctcctgtccgcccctccacccgacgtcactcaactgactcccccatctcacgacttgaaccgggccccacgggtgcccgtgcaagcgcttcccatggtcgtgccgccacaggagccagataagccaccagccaacgtggcaaccacactcccaatccggaataaagcggccagcaagcaaaagtccagttcacatcttcctgctaatagtcaagacgtccagggatatattaccaatcaatctcctgaaagcatcgttgaggaagcccagggcaagcttaccgagctagagcagcgaatcaaggaagcaatcgaaaaaaacgcccagcttcagtccctggagcttgcccacgccgaccagttgaccaaggagaagatcgaggagcttaacaagacgagagaagaacaaatccagaagaagcaaaagatcttggaagagctccaaaaagtggaaagagaacttcagctgaaaacccaacagcagctaaagaaacagtacctcgaggttaaagcgcagcgcatccagttgcaacagcaacagcagcaatcttgtcagcaccttgggctgctcacgcccgtcggagtgggagagcaactaagtgagggcgactacgctagactgcagcaggtggaccccgtgctgctgaaggatgagcctcagcagaccgccgcccaaatggggttcgctcccatccagccgttggcaatgccacaagccctaccgctggcagcaggacccttaccacccggctctattgccaatttaacggaattacaaggcgtgattgtgggacagccagttctgggacaagcccaactcgcagggctcgggcaggggattcttactgaaacccagcagggcctgatggtcgcaagcccagctcagaccttgaacgatacattggatgacatcatggcagctgtcagtggacgagctagtgcaatgtcaaatacgcctactcatagtattgcagcctccatctcccagcctcaaacccccacacctagtccaataatttctcccagtgctatgctccccatctatccagccatagatatcgacgcccagactgagtcaaatcatgacaccgctttgacactggcttgcgccggcggtcatgaagagctcgtgcaaactcttctggagcgcggggctagtattgagcacagagataagaaagggtttacgcccctcatactggccgctacggctggccatgtgggagttgtggagatcctcctggacaatggtgcagatatcgaggctcagtctgagagaaccaaggatacacccctcagcctggcatgcagcggaggacggcaggaagtagtggaattactactggctaggggagcaaacaaatccaccggaatgttcctgataacgcatctgtag

SEQ ID NO: 16255 - DNA, 2682 bp, synthetic construct
  source 1..2682: mol_type = other DNA; note = Synthetic coding sequence
atggccgccacagttgagggccctgagctggaggccgctgctgctgccggggatgcttctgaggacagcgatgccggaagcagggctttgcctttcttgggcggcaaccggttgtccctcgacctgtaccctggtggttgccagcagctgctgcacctctgcgttcagcagcctctgcagcttcttcaggtggagtttctgcgcctctcgactcacgaggatcctcaactgcttgaggccacactcgctcagcttccccagagtctgagctgcctgcggtctctcgtcctcaaaggtgggcaaaggcgggataccctcggcgcctgtttaagaggcgctctcactaatctgccagcgggactaagcggactggcccacttagctcatctcgacttgagctttaacagtttagaaaccttgccagcttgtgtgcttcagatgagggggctgggtgccctcttgctttcacataattgcttaagtgagctccctgaagctctaggcgccctgcccgccctcacatttctgaccgtaactcacaatcgcctgcagaccctgccccccgcattgggggccctgtccacactgcagcggttggatctgagccaaaacttactagacaccttaccacccgagatcgggggcctggggagtttactcgaactcaatttggcttctaatagattacagtctctgcccgcaagcctggctggtttaagatctctgcggctcctggtgctgcatagcaatcttctggccagcgtgcctgcggacttagctagactgcctctgctaacacggttggatctgcgcgataatcaacttagagacctgccgcctgaattgctagatgctcctttcgtgcggttacaggggaaccctctgggagaggcatcgcccgacgccccgtccagtcccgtggccgcactgatacctgagatgcccagattgttcctgacttcagatcttgactcctttcctgtaactcctcagggctgttccgtcacccttgcctgtggcgttcgcctgcagttccctgcgggcgccactgctacgccgatcacgattaggtatagactcctgttgcctgaaccaggtctggtgcccctgggaccccatgacgctctgctgtctcacgtgctggagctccaaccccatggggttgcctttcagcaggatgtcggtctctggctgctgttcactccccctcaggcacgcagatgcagggaagtcgtcgtcagaacaagaaatgacaactcatggggagacttggagacttatctggaggaagaggctccacagcggttgtgggcccattgccaggtgccgcacttctcctggttcttggtggttagccggccagtgagtaatgcttgccttgtaccacctgaagggacattgctgtgtagcagcggacaccctggcgtcaaggttatctttccccctggcgctacggaagagcctagacgggtgtcaatgcaggtcgttcgtatggctggcagggagttgcaggccctcctaggtgaacccgaagctgctgtttcccccttactgtgtctgagtcagtccggcccccctagctttctgcaaccagtgaccgtgcaacttccgctgccgtcgggcattactggcctctccttagaccgctccaggctgcatttattgtactgggccccacccgccgccacatgggacgacattacggcacaggttgttctagaattgacccatctgtatgcacgttttcaggtcacccacttttcctggtattggctgtggtacacaaccaagaactgtgtcggtggtctggctagaaaggcctgggaacgtctgcggttgcatcgggttaacctcattgccctccagcgaaggagggatccagaacaggtgctcctccagtgcctcccccgcaacaaagtggatgccactctaagacggttgctggaaagatataggggccctgaacccagcgatactgtagagatgttcgagggtgaggagttttttgcggcttttgaacggggcatcgatgtcgatgcagacagacccgattgcgtggaaggcagaatctgttttgtgttctatagccatctcaaaaatgtcaaagaagtctcattctataggggggcagtccccgtacgcgttcctgaggaggccgaggctgcgaggcagcggaagggcgcagacgccctgtggatggcgaccctccctatcaagttacctcgtcttaggggaagcgaggggccacgaagaggtgctggtctgagtttagcaccgttgaatctcggggatgctgagactggcttcctgacccagtctaatttattgtcagtggcaggccggctcggtcttgattggcccgccgtcgccttgcacctcggtgtgagctatcgcgaggtgcagagaatcaggcacgaatttcgggacgatttggatgagcagattcgccacatgctgttttcatgggcagaacgacaagccggccaacccggcgctgtaggtctgctggtgcaggccttggaacagtccgataggcaggatgtggcggaagaggtgcgagctgtactcgagttgggaagaaggaagtaccaagatagtatcaggcgaatgggcctggccccgaaggatccggctctgcctgggtcatctgccccacaacctccagagcccgcccaagcttag

SEQ ID NO: 16256 - DNA, 1482 bp, synthetic construct
  source 1..1482: mol_type = other DNA; note = Synthetic coding sequence
atggacttcctgctagggaaccccttttcttcccctgtcgggcagaggatcgagaaggccactgacgggtccctgcaatctgaggactgggccttgaatatggagatctgcgatattatcaacgagactgaagagggtccaaaggacgcattaagagccgtgaaaaagcggatagtgggcaataagaacttccatgaagttatgcttgctcttacagtcttagaaacctgcgtaaagaattgtggacaccgctttcacgtgctggtagcatcacaggatttcgtggagagtgtgctagttcgaacgattctccctaaaaacaatccacccacaatcgtccacgataaggtgttgaatctgatccaatcctgggccgacgcgttccgatccagtcccgacctaacaggcgttgttactatctacgaggatctgcgacgcaagggactggagtttccaatgacagacctcgatatgctgtccccgattcatacccctcagcgaaccgtattcaattcagagacgcagagcggacaggattcagtgggaactgatagtagccaacaggaagatagtggtcagcacgcggcccctttaccagccccgccaatcttgagcggagatactccaatagctccaaccccagaacagattggaaaactgaggagtgagcttgaaatggtgagcgggaatgtgagggttatgtccgaaatgctcacggaacttgtccctactcaagcagagcctgctgacctggagcttctgcaggaactgaaccggacttgccgcgctatgcagcagcgcgtgctcgaactgattccccagatcgcaaacgagcagctcactgaggaactgctcatcgttaatgacaacctgaacaacgtttttctgcggcatgagaggtttgaaaggttccgtaccggacagacaaccaaagcccccagcgaggcagaacccgctgccgacctgatcgatatgggtccggaccccgccgctaccgggaacctgtcctcccagctcgctggcatgaacctgggttcctcctctgtccgcgctggacttcagagcttggaggcctctgggagattggaagacgaattcgatatgttcgctctgaccagaggttcctctctggccgatcaaaggaaggaggtgaaatacgaagcaccccaagccactgacgggctggcaggcgccctcgatgctcgccagcagagcaccggagctatccccgtcacgcaggcgtgtcttatggaggacattgaacagtggctgtccacggatgtaggaaatgacgccgaggagcccaaaggcgtaacgagcgaaggaaagtttgacaagttcctggaggaacgcgcaaaggcagccgacaggctgcctaatttgtcctcaccctccgccgagggtccaccagggcccccctctggacccgctcctcgcaagaagactcaggaaaaggacgacgacatgctgtttgctctctag

SEQ ID NO: 16257 - DNA, 663 bp, synthetic construct
  source 1..663: mol_type = other DNA; note = Synthetic coding sequence
atgaattctcagcctcagaccagaagccccccatcacgaaccgttcctatacattgcacagataactggaagcgtcgaaaggtacttgagcagacgcctgtttatcgttccctagccggacgtggttggattaaatactgcatctttttccagaggccccagatccagcctcctcgggctaccattcctaattcctctcccagtatcaggcctggggcccaaacgcctaccgccgtgtaccaggcaaatcaacacattatgatggtaaaccacctgcccatgccatacccagtaccccagggcccacagtactgcatcccccagtatcggcactccggtcccccctatgtcgggccaccacagcagtatcctgtacagccccctggacctggtcctttttacccaggccctggaccaggcgacttccccaatgcatatggaacacctttctacccttcgcagcctgtatatcagagtgctcccattatagtcccaacgcaacagcagccaccgcccgcgaaaagagagaagaaaaccatccgtatacgggacccgaaccagggcggcaaggacatcaccgaggaaatcatgtctggaggaggtagtcgcaatccaacgccccctattgggcgacccacatccaccccaactcccccccaatag

SEQ ID NO: 16258 - DNA, 414 bp, synthetic construct
  source 1..414: mol_type = other DNA; note = Synthetic coding sequence
atgtctttgtttgggacaacttcgggttttggaacctcaggcaccagcatgttcgggagtgccacaaccgacaaccacaatccaatgaaagacattgaagtaactagcagtcctgacgatagcataggctgtctgtccttcagccccccaacattgccagggaattttcttatcgctggttcctgggccaatgacgttagatgctgggaggtgcaggactctggccagacaattcctaaagcccaacaaatgcatacaggtccggtcctggatgtgtgctggtccgatgatggaagtaaggtatttacggcctcctgcgataaaacagctaagatgtgggacctcagttcaaaccaggcgatacaaattgcccaacacgacgcacccgtcaaaaccatccattggatcaaatag

SEQ ID NO: 16259 - DNA, 7809 bp, synthetic construct
  source 1..7809: mol_type = other DNA; note = Synthetic coding sequence
atgaagaggaaggtggttaacacccataagttacgactgagccctaacgaagaggcgttcattttaaaggaagactacgaaaggagaaggaaattacgactgttgcaggttcgagagcaggagagggacatcgcactgcagataagagaagacattaagcaacgtaggaatcagcagttcacaagactcgccgaggaactaagagccgagtgggaggaatcccagacccagaaaatccagaatctggaaaaattatacctcgccagcctgcggagtatgggagaaggtcatagacaggcaaaagaaaacgagccggacctagacgcgttagcacagagggctgccgaacggaagagaaaagcggacctcagacacaaagaagctttaaaggttcaaaagaatcagaaagagatcctgttgaagcagaagacgtggcacattaaagcgcggaaggaggccttactagtggaaaaagaacgttcagccaagattaccagtctccccccaccaccacctaccttatttgagaacatcgaggttaagaggatctcggccgtgaagacgaattctagtacgtaccaccacctacatacttttgtcaaccgggagaccgacactaaacggcctgatgcacggctggctgccgaagaagaagcaaaacgtctcgaggagctccagaaacaggctgctcaagaaagaatggaacgcttcgaaaaagcccacgtgagagggttccaggctatgaagaagattcacttggctcagaaccaggaaaagctaatgaaggagttgaaacagttgcagcaggaagatttggctcgtcgccgccagacagtcgcacagatgccgccacagctggtggagctaccctacaagaggagtgagatgaaagaggactggcaacgtgaactggagtttgccttcgaggacatgtacaacgccgatcggaaggtgaagggtaatctgattttgcacttggagcccgagccacttcccaccgttaccaatcagattcaggacgaggaactagacctttcaatggagcaggaaaatttgggtgctgcagaggatctgccggtgacagaggccgagatctgctcatctgagacagatgttcctctggttatgaaaacacagcagattcccagtaaggttttatttaaaaagctactaaataaaattaggtcacaaaaatctttgtggaccatcaagagtatgtcagaggacgagtctgagatgataactactgtcagtgaaatagaaagcaaggccccaaccgtggagtcaggcactatcgccagtaaagaacgaacgctcagtagcgggcaagaacaggtggtggagtctgacactctgacaatagagtccggtcctctggccagtgaagataaaccactcagttgtggaactaatagcggtaaagagcaagagatcaacgagaccttaccaataacaaccgtagctcagtcatccgtgttgctgcacccacaagaggctgcggctaggatccggatgtctgcccgccagaagcagataatggaaatcgaagaacagaagcagaagcaactggagctgctggaacagatcgaacaacagaaacttcgtctggaaactgactgctttcgcgctcagcttgaggaggagaaaagaaaaaaaactcagcctaccggcgttggcatcgcccctgcctcgtgtcccgttatctcagatgaagattcgcaccgacagatgattcgtaattaccagcatcagctgctgcaacagaaccgactccacaggcagtccgtagagaccgccaggaagcaattactcgagtaccaaaccatgcttaaaggaagatgtccttccgtctctgccccttctttaatcactgactccgttatttcagtacctagttggaagagtgaacgacccacggcaataagtgagcactgggaccaaggacagaggctgaaactcagtcccaacaagtaccagcccatccagcctatacagaccagcaaactagagcaggaccacttccaggtggcacgccaaaatcactttccacagagacaggttgagactactgagacgctgagggcctcagacattctgaccaatcaggccctggagtcacaggagcacttgcgtcaattttcccagaccgagactcagcagcgcgactataagttagtccctaaggacagcgagactctatcgcgggctctctcgcacgatcgccagcttatctctcaggatgccaggaaaatctccgagacatttggggccaccacctttcagtcactggaatcacagcagctgttctctgagaacagcgagaacatcagttaccaccttacagagcccagctcattcgtcccactggttccacagcatagcttttcttcactgcccgtgaaggtagagtctggcaaaatacaggaaccatttagcgcaatgtcaaaatccacagtgtcaaccagccactccatcatcagccagatgcacgatcggcccctactccctagcgagaatataaccgcacagcagggcaacatgaaagcgcttcaggagcagctggatttacaaaaaaaggtccttcaggccacccaggaggcccaggagcaactgttactgtgcaagcaaaaggaagtcgagcagcagaccgggctcagcgtgtttctacccctggtgacacctgactcgagtgcattattaccatccgccaaagccgaccttggacggatccaggagtcttcacctaccaagaataacattgctgttagctcagaccaccatgtgatatctcagctgcaggacaagagactctccctgtcacaaccaatattaagccagcagaataactttaagtttttgcaggagcaattgaacatacagaaagactctttacaagctcgcagagaagcacaggaagtgctgtatgtgcacaagcaaagcgagctggacagaagggtgtgctcagagcaggcagagccatccttcccttttcaggtcgcacagcataccttcacaagcttgcctagcgctgatacaaagtcagggaaaatccaggaacagcattccagtaaatctgagaaaggactggtgtcttgccagtctgatataccaatatcccaagacggctctctcagttttctgcaacaatttcttcccctgcacgactcgcttaagctactgcaggagcagttaacaaagcagagagacacgttgcaggcccggcacgaggcgcaggtggagctgctgctccataggcagagagatctaggagatagcaagtctggtctagtgtcgagtagctcaagtcccgtggtggttcaacacagcgttgcgtctcaggctagcgctaaggcagagcctcggaggatccaggaactgtatctgagtgaaaaggaaaatgtcggaccatcttgccacctgatcataccaacatttcaggataagtctctgagctttccccagcattcgctcgcacaacaggaaaatttaacaatcctgcaggaacaatcccagattcagcgggttatactgggggctaaagagggcacccaggagtttgtacatacggagagtgaacttgaaaaacggatctctagtgagcagactggtacatcctcctcgttgagccaggtggatgagtcagagagattccaggaatgcatatcaatcaaaagcgattctacgatcccactatcccacccaaagattcccaggtgccaggagaggctgctcagagtgtcacaacatatgttaccactgcaggacaacctcgaggaacaccaagcctggctggacaccgaaaaagaagccttccactttagtcagaagactcaggagaacacctcttcggagcagacaggatccagcagctttatcccccagcttgttcaactgtcctttaccagtcttgcttccgccgaatctggaactatactagaacccttatttaccgagtcagaatctaaaatcttctcatcgcatcttcagattcctcagttgcaagaccgtctgctgagaatttcccaactgatccagcctcagcaagataatcttaaagctttacaggagcagttggcaacccagcgcgaggccataattctggcacggcaggaagctagagaagaactccttctgcatcaaagcgagtgggaggggagaatttcgcctgagcaggtggacacttcttctctgccactggttccgcagcattccttcgctagcttgcccttgaacgaatctgaacgcaaccaagagccatgcagtattaactccgacaatatcgtctcatcgggacattcggaaatacctactcttcccgacgggctactgggactgagtcatctggtcctacctcagcaagataacctgattgccttggaggagcacctgcatgctcagactgatttcctacctagcatcgaaaaaacacagaaagagctagtcctgagtaaaccctgtaagttcgaagagaaagtgtccagcgaacatttcatccaatcccatcacggcgacctgcaggctctgcagcagcagttggatacacagaagaaggcaatccgctccatccaggaggtgcaggaggaattgctgctccagaggttatcggaactggagaagagagtgagctcagagcaagtttgtagttccagctttgtgagccaggtgcctgtggccgattctgagaggacccagaagagctttcccacaaaaagcaacgacaccctgccaagctcgcacagagagatccctcggttacaagataggctcttgagccttagcaagccgattctgccccagcaggataatatgactgcacagttggacgcgcaacgcgaagtgatgtattcatatgaaaaaccccaggaggaactgagtcttaacaaacagcgcaagcttaataaaagcgagtctgccgagcacacaataccttcgctgttcctgccgaaggaaaccgagcacagcttcattcctctgcccttcgctgaggcgaagcccaagagcacgtgcgagctatatagcagccagaacgagcacgccgcccctccatctaatcccgtgatcccgggatttcaggaccgacttctgtccttttcacaatcagtgctgacacagcaggacaacttgggcctccagaaacagctggatctgcagcgagaggtcttacattacagccagaaagctcaggagaaactccttgtgcagcgacagactgcccttcagcaacagatccaaaagcatgaggaaaccctgaaggacttttttaaggactcccagataagtaagccaacagtggagaacgacttgaaaacacagaagatggggcaactgcgcgactggttccccaacactcaggacctggccggcaatgaccaggaaaacattcgtcatgctgaccgcaataattcagacgataatcatctggcctccgaagatacaagtgccaaacagagcggtgaacaccttgaaaaggacttgggacggcggtcttccaaaccccctgtcgccaaagtcaagtgcggcctcgacttaaatcagcatgagctctcagccattcaggaggtggaaagtcctgcaattggaaggacctcgatccttggtaaaccaggcatctatgaagaccgggacccactgcgagtgagtatatcgcgggaacagtccttctttggcagtccgctggcacacgatccattctcttgtcttcagcttgtcggccaggagaatgtatgcggtgacgattacgatgaagctgtcaagctaaaggaaagcgtggtggagaatcacgccgtgctgtcttatgccgtagaggaggaacacgcctacttggggccgaccgttaagcctgacgacaaagcgaaaacacttagctacgaacctctgagttcggccacagtttcgaccggcagtttactgagctacgagaacaccgatctctctctgactgatcctgagtccttctcagaacacatggacgatagtaaacaggagtccaccacaagcaaagaagaggagacaaacatcatatccagtattgttccatccacccaggacatttatcaaaggcagaattcctcggatgtacataagagtctgctccccgcagtagacgaaaccacgtgtgggcacacccatttccaacagatgatcgacaagtatataaacgaagctaatctgattccagaaaagaccgatttacaggaactcgaacatatcttccccaatctgcaccaccagctgtttaaacctctagaacctcacccggatttcgatttgtcctccagctcatcaggcattagccccgataacagagacttttaccagcgctccgactcttccagcgagtcacactgcgctacaggcctgagtaaatctaccgtgtatttcaccgccttaaggagaacctccatgcattccagcctcaacacctctcccaaccagcagcctgataccaatcttgcccatgtcggagcccactcatttgcaacagagaatatcattggtggctctgagcagtgttttgaacagcttcaacccgagtactcgagccaggaagaatcccagcacgcagatctgccgtcaattttttcaatcgaggccagggattcgagccaggggatgaagaaccagaattatccctcagaagagcacactgagattctccagaacaaaaagaaaatcgttcattttcagctttccattgggaatctgagcagcgtgtactcttcttcagacgaggctaatgtatttgatcaactgaacgtccagcattctactccctgtggcagcaattcttcggagtgcagtaccaaacaccagctcgaatcaaggaaagagagtatgggatttgaagagcttagcaaacgaggagtcgtgaccatgcttcagtctcaagggctcattgaggataataagaacgagacctgccgggtgctggacattaatcctcaggtggaggaaacagactctagactgtgcgtgagaacggtggagatgggaacttccatacaagctccatatagcctaaccactcaaaacgagaagtactttgagaactcagctgaaaccgatattcccaaaatcaccaagaaactctctcagctgggcgagtctgagctctttgcgtcttcagggtcgttttccctccaaagtagtatccccgtgtgggaaaccgaaaccggccatgggataatggaagagcccgagttaacactgatctcgaccacagacacatccatagctgagatggatttcgctaacctgaccctggaggagaagagcgaaaatgaggctaagtgcttcttccaagtttccgagtttctccctctggtttccgctactgaagccagcgattaccccgctgtgagcgaactcagcatcgaaaaaccccgaacagcctctacagcggagacacctcgccgacttacacccgtgccgggatccctgcaggaggcattcataaaacgcaaaaagtcatttatggagaggagtcaccagaggcagaaggagataagaaataaaatccatgtgtcagaaaatagtcagatcaagactgtgaaagagaagccaagtatctcgagctcagtgtcccggctgaagggcgtgaacaaggtccgcgccagtttccccgaggaccggaagaccactcaggctctccgacaccaaagaggtctgaggctttataatcagctcgctgaagtgaaacagcagaaagaggagaagacaaagcaggaagcttacgcccagaacagagcaagagccaaagagttccacaagaagactctggagaaattgcgtgcaaagaatacctgctag

SEQ ID NO: 16260 - DNA, 1602 bp, synthetic construct
  source 1..1602: mol_type = other DNA; note = Synthetic coding sequence
tctgcaccttccgtaggaaatgatatgggcaacgacgatgccattggaggaaacgtttcaaaatatattgttctgcctacagggtactgcggacagcccaaaaagggccaccttatcttcgacgcgtgtttcgaatccggcaacctggggagagtggaccaagtctcagaattcgagtacgatctatttatccgtcccgatacttgcaacccacgctttcgcgtctggttcaacttcactgtagagaacgtcaaagaatcccagagggtgatctttaatattgtgaatttcagcaagacaaagagcctgtatcgcgacggcatggcaccgatggtcaaatcaactagtcgccccaaatggcagcggctcccaccaaaaaacgtgtattactaccgatgtccagatcacaggaagaactatgtgatgtcatttgccttctgttttgacagggaagaagacatctaccagttcgcttactgctatccttacacttataccagattccagcattacctggactctcttcagaaacgaaatatggactactttttccgtgaacaactgggtcaatccgtccaacagcgaaagcttgacctgctcaccatcacctcccctgataatctgcgcgagggcgcagagcagaaagtcgtgttcatcacaggaagagttcatcctggcgaaacccccagttctttcgtttgccaggggataattgactttctggtgagtcagcaccccatcgcttgcgtgctgagggagtaccttgtcttcaagatagctcctatgctgaaccccgatggagtttacttagggaattatcgatgcagcctgatgggattcgacctcaatcgccactggctggacccctctccttgggttcatcccactctccatggtgtgaaacagctcatagtgcagatgtacaacgatcctaagactagtctggagttctatatcgacatccatgcccactccacaatgatgaacggattcatgtacggaaacatcttcgaggatgaagagcggttccagcgtcaggcaatctttccgaagctgctctgtcagaatgccgaggattttagctactcttccacgagcttcaatagggatgcagtgaaagccgggaccggccgcaggttcctcggaggactgttagatcacacatcttattgttatacacttgaagtgtccttttatagttacataatctctggcacaaccgccgcagtcccctataccgaagaggcatacatgaaactgggaagaaacgtggcacggaccttcctggactactaccgcttgaaccctgttgtagagaaggtcgccatcccgatgcctcgcctgagaaataaagagatcgaggtgcagaggcggaaggagaaaagccctccttataagcacccccttctcagaggacctgcgtcaaactatcccaattctaagggggataagaagagcagtgtcaaccacaaagacccaagcacaccctttaagacccggagcccaggcagatcttatggcgaccgatccatgcacttcttgttgggtaacgagattaaccatagcagtctggctagtaaggatctctggatcaacgcttag

SEQ ID NO: 16261 - DNA, 1509 bp, synthetic construct
  source 1..1509: mol_type = other DNA; note = Synthetic coding sequence
atgcccgaaattagggtcacacctctgggcgcctgtcctgtgctatcttggaatctcgtgcttcctccagggcgcgggtccagggcacctagctctaccgacactaggaccggctttcatgtgttacctcacggcgtggacgacgagttggaaataaaagcctactacgctggacacgtccttggagccgctatgttccagattaaagtggggtcagaaagcgtggtttacaccggggactacaatatgacccctgacaggcatctgggtgcggcctggattgataagtgcagaccaaatctactgattaccgaatctacttacgccacaaccattcgagactcaaaaagatgtagggagcgcgattttctgaaaaaggtgcacgaaacagtggagcgtggaggtaaggtcctgattcctgtgttcgcattaggtcgggctcaagagctctgcatcctgctagagactttctgggagcggatgaacctcaaagtgccaatctactttagcacaggactcactgaaaaagcaaaccattactacaagctcttcatcccgtggactaatcagaaaattcggaagaccttcgtccagcgaaacatgttcgagttcaagcatattaaagccttcgaccgggccttcgccgacaaccccggcccaatggtcgttttcgccacaccggggatgctccatgccggacagtctctgcaaatttttcggaagtgggcaggcaacgaaaaaaatatggtgattatgcccggctactgcgtccaagggacggttggacataagattttgagcggccaaagaaagttggaaatggagggcaggcaggtgctcgaggtgaagatgcaggttgaatacatgtcatttagcgctcacgcagacgccaagggtatcatgcaactcgttggtcaggccgagccagaatccgtgcttctggtgcacggcgaggctaaaaaaatggagtttctgaaacaaaagatcgaacaggagttgagagtcaactgttatatgccagccaacggcgagaccgtgaccttgccaacctccccctcgatacccgtcgggatttctctcggactcctcaagagagaaatggcacaaggcctcctcccagaagcaaagaaacctcgtcttctgcatggaactttgatcatgaaagatagcaatttcaggctagtgtcatcagagcaggctctaaaagagttggggctggctgagcaccagttacggttcacgtgcagggtccatctgcacgacactcggaaggagcaagagactgccctgagagtttattctcaccttaaatccgtgctaaaagaccactgcgtgcagcatttacctgatggcagcgtcacagtagagagtgtgctgctgcaagccgcagccccgagtgaagatcccgggacaaaagtgttgcttgtaagttggacgtaccaggacgaggagcttggctcatttctgacgagcctgctgaagaagggcctgccacaggctcccagctag

SEQ ID NO: 16262 - DNA, 1371 bp, synthetic construct
  source 1..1371: mol_type = other DNA; note = Synthetic coding sequence
atggccgactctctggagtctacgccgctgcctagccctgaggacagactcgccaaactccaccccagcaaggaattgcttgagtattatcaaaagaagatggctgagtgcgaagctgagaacgaagacctgcttaaaaagctcgagctttacaaggaggcatgcgaggggcaacacaagctggaatgtgacctacaacagagggaggaagagatcgcggagctgcagaaggctttgagcgatatgcaggtctgcctgtttcaggagagggaacacgttttgcgcctttattcggagaatgatagactcaggataagagaactggaggataaaaaaaagatccagaatttgcttgctctcgttggcaccgatgctggggaggttacatatttctgtaaggagcctccccataaagtaacaattttacagaaaaccatccaggcggtgggggagtgcgaacagtctgagagtagtgcgttcaaagccgaccctaaaatctccaagagacgccccagccgggagcggaaggaatctagcgagcactatcagcgtgacatacagacgctaatcctccaagtggaagccctgcaggcccagttaggcgagcaaaccaaactgtccagggaacagatcgaaggtctgatcgaagaccgccgaattcacctcgaagaaattcaggttcagcatcagaggaatcagaataaaattaaagaactcaccaaaaatctccaccacactcaagagcttctgtacgagtcaaccaaagacttcctccagctgcgttccgaaaaccagaacaaagaaaagtcatggatgttggagaaggataacctcatgtccaaaatcaagcagtaccgtgtgcagtgcaaaaagaaggaggataagataggcaaagtgctgcccgtgatgcatgaatcacatcacgcccagagtgaatacattaaatccttaaaggataagttagtgcaggaaaaaaaactctcaaacatgtaccaagagcaatgcatcagtctcgaggaggaacttgctcggatccgggaggaggagggcatgcggagggagatctttaaggatcggaccaacaagatgggcaagcggctgcagattatgactaaaagatacgaagccttggaacgacggcggatccttgaagtggagggattcaagacagatatcaaggtcctgcggcaaaaactgaaagatcttgaacaaatgctgtacaaggcaacagtaaacgcccgtgcaaatcaggatcttgccctcctttgtgaagtcagagactcaaatcgaagggcccacaagatacaaggggagctgaagaatctcaagagtaaagtctttggcttggaaaatgagttacgactctgctag

SEQ ID NO: 16263 - DNA, 270 bp, synthetic construct
  source 1..270: mol_type = other DNA; note = Synthetic coding sequence
atgagcgagcaaggggatctcaaccaggcaatagcagaggaggggggaacagaacaggaaacagctacacctgagaatggcattgtgaagtctgaaagtttggacgaggaggaaaagctcgagctacagcgcaggttggaggcccagaatcaagagaggcgaaagagtaaatctggggccggcaaggggaagctgactcgctcattagccgtatgcgaggaaagctccgcccgcccgggcggagagtcgctccaagatcagacgctgtag

SEQ ID NO: 16264 - DNA, 453 bp, synthetic construct
  source 1..453: mol_type = other DNA; note = Synthetic coding sequence
atgcaccccgaggactcggtcgtgtcctcgaaggtgctggggtgctcccacttcccagtagccagcaggcctgctggcagtcacgacccccagccaggtcaccgcggcagagtgttgggacctgccagggctcccggttgggttagatacgctgagagggtcctggggcgccccatcacggcacatctgtgcacagccaaaagtccacagcaagtgatgggttccctggtaaaagactactttgccagacagcagaacctaagtcctgaaaagatttttcacgtgatagtggctccgtgctatgataaaaagttagaggccttacaagagagcttaccacctgccttgcacggcagtcggggtgctgactgcgtgttaacttccggagagattgcacagatcatggaacagggcgatctatccgttcgggatgctgctgtcgataccctgtag

SEQ ID NO: 16265 - DNA, 534 bp, synthetic construct
  source 1..534: mol_type = other DNA; note = Synthetic coding sequence
atgggctgttgcggctgcagcaggggatgtggtagcgggtgtggtggatgtggatcttcatgtggcggttgtgggtctggctgcggggggtgcgggtcaggccgcggcggttgcggttctgggtgcggcggttgtagctcatcgtgtggcgggtgcggctctcgctgctacgtgccagtgtgctgctgtaagccagtctgttcttgggttccagcgtgctcgtgcactagttgtggttcctgtggggggtctaaggggggctgcggctcctgcggcggctcaaagggggggtgcggatcatgcggggggagcaaaggcgggtgcgggtcttgtggatgtagccaaagttcttgttgtaaaccgtgttgctgcagctccggctgcggctcctcctgttgccaatcttcttgctgtaagccttgctgctgccagagtagttgctgcgtacctgtatgctgtcagtccagttgctgcaagccatgttgctgtcaatcaaattgttgcgtgcctgtctgttgtcagtgtaaaatctag

SEQ ID NO: 16266 - DNA, 294 bp, synthetic construct
  source 1..294: mol_type = other DNA; note = Synthetic coding sequence
atgcccgccgagctgtggctaacctcttatggagtccgggaagtggaccaagtgaaacgcctcacaggaccaggattgagtgaagggcccgagccctcgataagcgtgatggtcacagggggtccctggcccacccgcctttctcgcacctgtcttcactatttgggggaatttggcgaggaccagatctatgaagctcaccagcaaggccgtggcgcactcgaggcactgctgtgcgggggaccacagggcgcgtgttccgagaaggtatcagctaccagggaggaattatag

SEQ ID NO: 16267 - DNA, 264 bp, synthetic construct
  source 1..264: mol_type = other DNA; note = Synthetic coding sequence
atggaaaatcaacttgcaaagtccacagaggagcgtaccttccaatatcaggattcactgccaagtctccccgttccttccctggaagaaagcctgaagaaatatcttgagtccgttaaacccttcgctaatcaagaggagtacaagaaaaccgaggagatagttcagaagtttcagagtgggattggtgaaaaattgcaccagaagctgttggagcgagctaagggcaagaggaactgggttttcgtggttatcattgaatag

SEQ ID NO: 16268 - DNA, 1881 bp, synthetic construct
  source 1..1881: mol_type = other DNA; note = Synthetic coding sequence
atgtgcagcacccttaagaaatgcgggacttaccggacggaggtcgcagaatgtcacgaccatgggtcaaccttccaggggagaaagaagggaggtagctccttccgagacaatttcgataagagatcgtgtcattacgagcacggcggatatgagagacccccatctcactgccaggaaaatgacgggagtgtcgagatgagagacgttcacaaagaccagcagctgagacataccccctatagcatacgctgtgagagaaggatgaagtggcattccgaagatgagattagaatcaccacctggagaaacaggaagccgcctgaacgcaaaatgtcccagaatactcaagacgggtacacacggaattggtttaaagtgaccattccatacggcatcaagtatgacaaagcatggttgatgaactctattcagtcacattgttctgataggtttaccccagtagacttccattatgtgcgaaacagggcttgttttttcgtccaggacgcaagtgcagcctccgctctgaaggacgtctcttataagatttacgatgacgaaaatcagaaaatatgcatattcgtgaatcacagcactgccccctacagcgttaagaataagctcaaaccaggacagatggagatgcttaagttgacaatgaacaaacgttataacgtcagccagcaagccctcgaccttcaaaatctcagattcgatcctgatctgatggggcgagatatcgatattatacttaaccggagaaactgcatggcagcaactctgaagatcatcgaacgcaatttcccagaattgctgtctcttaatctgtgtaacaacaagctgtaccagctggacgggctgtccgatataacagagaaagcccctaaagttaagacattgaacctgtctaagaataaactcgagagcgcctgggaactggggaaagtcaagggactgaaactggaggagctgtggctagaggggaaccccctgtgctctacctttagcgaccagtccgcgtacgtctccgccatccgggactgctttcccaaactcctcaggctcgacggccgcgagcttagcgcccctgtaattgttgatatcgattcatccgagacaatgaaaccttgcaaggagaatttcactgggagcgaaacattaaagcatttggtactacagtttctccagcagtactattcaatttacgattccggagataggcagggactgttaggggcctatcatgatgaggcatgcttttctttggcaatcccttttgaccctaaggattcggccccgtccagcctatgcaagtacttcgaggattcacggaacatgaagaccctgaaggatccttatctgaaaggtgaactgctccgcaggacaaaaagagatattgtggactcgctaagtgccctccccaaaacccagcacgacctaagtagcatcctcgtagatgtatggtgccagactgagaggatgctgtgctttagtgtgaacggtgtatttaaagaagttgagggccaatcccaaggtagcgttctcgcgtttacacgtacttttatcgcaacccccggttcctcttcctccctctgtatcgtaaacgacgagcttttcgtacgagatgcctctcctcaggaaactcagtctgctttcagtattccagtgtctaccctgtcctcctcatccgagcctagcctgagccaagagcagcaagaaatggtccaagccttctcggcccagagtggcatgaaattagaatggtctcaaaagtgcctgcaggacaatgaatggaactacaccagggcaggtcaggcttttacgatgctccagacagaaggcaagattccggcagaggctttcaagcaaatcagctag

SEQ ID NO: 16269 - DNA, 2940 bp, synthetic construct
  source 1..2940: mol_type = other DNA; note = Synthetic coding sequence
atgctgtgttggggcaacgctagctttggtcagttaggcttaggggggattgacgaagagatagtactggaacccagaaagagcgacttcttcataaataagagggtacgcgacgttggatgtgggctgcgacacaccgttttcgttctggacgatggcaccgtctacacctgtggatgcaatgacttggggcagctggggcatgagaaatcaagaaagaagccagagcaagtggttgctctagatgcccaaaatatcgtcgctgtgagttgcggggaggcacacacgctggccttaaatgacaaaggacaggtgtacgcttggggtcttgattccgacgggcaactgggccttgtaggatccgaagagtgtatcagggtcccgcgcaacataaagtcacttagtgacattcagattgtgcaagtcgcctgtggttattaccactctctcgctctttccaaggcctccgaggtcttctgctggggacagaataaatatggtcagttaggactcgggacagactgtaagaagcagacctccccacagcttttgaagtccctacttgggatacccttcatgcaggtcgccgctggcggtgcccactccttcgttctgactctgtccggggctattttcgggtggggcagaaacaagtttgggcaactgggtctcaacgacgaaaatgaccggtatgtgcctaacctgttgaagagtctccgcagtcagaagattgtgtatatttgctgcggtgaggatcacactgctgctctgacaaaggagggaggagtcttcactttcggagcaggaggctatggtcaacttggtcacaatagcacctctcacgagatcaacccgcgcaaagtgtttgagcttatggggtcaattgtcaccgaaatcgcctgcgggagacagcacacttcggccttcgtgccttcttccggccgcatatactccttcggtctcgggggaaacggccaattgggcaccgggtcaacaagtaaccggaagtcaccattcaccgtcaagggaaactggtacccttataatgggcagtgtttaccagacatcgattccgaggagtacttctgcgttaaaagaatattctcgggcggggatcagtcattctctcattattcctcaccccagaactgcgggcctcccgatgactttcgctgccctaaccccacaaagcagatttggacagtgaacgaagccttaatccagaaatggctgtcatacccatccggaaggtttcccgtggaaatcgccaatgaaatcgacggaaccttcagctcttccgggtgccttaatgggtcgttccttgccgtgagcaacgatgaccattacagaactggcaccaggttttctggggtggatatgaacgccgctcggctgctgttccacaagctgatccagccagatcaccctcagattagccagcaggtggcagcctctctggagaagaatctaatacccaagctaacctcttctctgcccgatgtggaagctctgcgcttctacctgactttacccgagtgtcctctgatgtctgactctaacaactttacaacgatagccatcccattcggcactgccctcgtgaatctcgaaaaagccccacttaaggtgctggaaaactggtggagcgtcctggaacctccactgttcctcaaaatagtggaactgtttaaggaagtagtggttcatctcctgaagctctataaaatcgggatcccgccctccgagaggaggatattcaactcatttctacatacggctctgaaggtgttggagattcttcatagagtgaacgaaaaaatgggccaaattattcagtacgataagttttatatccacgaagtgcaggaacttattgatattcgcaacgattatatcaattgggtgcagcagcaagcatacggaatggacgtgaatcatggccttacggagctcgcggatatcccagtgacaatctgcacctacccatttgttttcgatgctcaagcgaagaccaccctgctccaaaccgacgcagtgctccaaatgcagatggccatagaccaagcccaccggcagaatgtttcctcattgttcctccctgtaatcgagagcgttaacccgtgtctgattttggtcgttcgaagagagaatatcgtcggcgatgcaatggaagtgcttaggaagactaagaatattgattacaagaaaccacttaaggtgatcttcgtgggggaagacgcggtggacgccggcggagtccggaaggagttcttccttctcataatgagagagctacttgaccccaagtacggtatgtttcgatattatgaggattcaagactgatttggtttagcgataaaatcaccgtcgagaacttcggagccacggaagtgaaggagctcgtgctgaacggggcggacactgccgtcaataaacagaaccggcaggagtttgtggacgcctatgttgattacatcttcaacaaatctgtcgcttctcttttcgacgcgttccacgctggctttcacaaagtgtgtggaggaaaagtcctgctcctgttccagccgaatgagctccaggctatggtaataggcaacacaaactacgactggaaagaactagaaaaaaatacagaatacaagggggagtactgggccgagcatcctaccatcaaaatattctgggaggtcttccatgaactccctttagagaaaaagaagcagtttttgctgttcctgaccggttccgatagaattcctatcctggggatgaagagtctgaagctcgtcatacaaagcacgggcggaggagaagaatatctgccagtgagccacacctgctttaatctcctggatcttccaaagtacactgagaaggaaacattgcggagcaaactgattcaggccattgatcataatgagggcttctcactgatctag

SEQ ID NO: 16270 - DNA, 1020 bp, synthetic construct
  source 1..1020: mol_type = other DNA; note = Synthetic coding sequence
atgaaaatctttgtggggaatgtggatggtgctgataccaccccagaagaacttgctgccctctttgcgccttacggcactgtgatgtcttgcgccgtgatgaagcagtttgccttcgtccatatgcgcgagaacgccggcgccctgagagctattgaggccttgcacgggcacgagctccgcccggggcgtgctctagtcgtggaaatgagtaggccgcgccctttgaatacttggaaaattttcgtcgggaatgtcagcgctgcttgtactagccaggagttgcggagcctgttcgagagacgtggcagagtcattgaatgtgacgtagtcaagggcaagcggatgcacgtgcagctgtccacctcgagactgcgcactgcgcctgggatgggagaccagtcaggctgttacaggtgcggaaaggagggccactggagtaaagagtgtcctatcgataggagtgggagagtggcagatttgaccgaacagtataacgagcagtatggcgcagtcaggaccccttacacaatgagctatggggacagcctttattacaataatgcctatggcgctttagatgcctactacaaacgatgccgcgccgctcggagctacgaagcagttgctgctgctgcagcctcagtttataattacgccgaacagaccctgtctcaactgccacaggtgcagaatacagctatggcatctcacttgacctctaccagtctggatccgtatgatcgacacttgctacctacctctggcgctgcagccaccgctgcagctgctgctgcggccgctgcagccgtgactgccgcaagtacctcttattacggccgagatagatctcccctgagaagggccaccgctcccgtgccgacagtgggcgaagggtacggttatggacacgagagcgagctgtcccaagcatctgcagcagcgcggaactctctatacgacatggcacgctatgaacgtgaacaatatgctgatcgagcccggtacagcgccttttag

SEQ ID NO: 16271 - DNA, 390 bp, synthetic construct
  source 1..390: mol_type = other DNA; note = Synthetic coding sequence
atggcagagctgattcagaaaaagctgcaaggtgaagtggaaaaatatcagcagctgcagaaagacctttctaagtctatgtccggacggcaaaaattagaggctcagttaaccgagaacaacatcgtgaaggaggaattggctttgctggatggctctaacgtggtattcaagctgctgggaccggtactggtcaaacaggagctgggcgaagccagggctaccgtggggaaacgtctggattacataacagcagagatcaaacggtatgaatcacagctgagggatttggaacgacaaagcgagcaacagcgtgagacattggctcagctgcaacaggagttccaacgggcccaagcagctaaggcaggcgcaccagggaaagcctag

SEQ ID NO: 16272 - DNA, 1695 bp, synthetic construct
  source 1..1695: mol_type = other DNA; note = Synthetic coding sequence
atgagctatcctgctgatgactacgaatctgaggcagcgtatgatccctatgcctacccctctgactatgacatgcacactggggaccctaaacaggacttggcctacgagagacaatatgaacagcagacctatcaagtgatcccagaggtgatcaagaacttcatccagtacttccataaaacagtgagcgatctgatagaccagaaagtgtacgaactgcaggcttcccgggtatcatccgatgttattgatcaaaaggtgtatgagattcaggacatttacgaaaattcctggactaaacttaccgagcgattcttcaaaaatacaccatggcctgaggccgaggcaatcgcaccccaggttggaaatgatgccgttttcctgatcctgtacaaggaactgtattatagacatatttatgcaaaggtctcaggaggaccctcccttgaacagcgcttcgagtcttactataactattgcaatctgtttaactacatcctcaacgctgatggtcccgctccacttgagttgccaaaccaatggctctgggatattattgatgagtttatttaccaattccagtccttctcacagtacaggtgcaagactgcgaaaaagagcgaagaggaaatagacttccttagatcaaaccctaaaatttggaatgtacactcagtgctgaacgtgctacattccctggtggacaaatccaacattaaccgccaactcgaggtgtacacttctggaggagaccccgaaagcgtggcgggagagtacggcagacactccctctataagatgttgggatatttttctctcgtggggcttctccggctccactccctgctgggggactactatcaggcgattaaggttttagagaatattgaactgaacaagaaatccatgtacagccgggttccagagtgccaggttacaacatattactacgtaggctttgcgtacctgatgatgcggagataccaggacgctatacgggtgtttgcaaacattcttctgtacatccaacgaactaaaagtatgttccagaggaccacatataaatatgaaatgatcaacaaacagaatgaacagatgcacgcccttctggcaattgctctgactatgtacccaatgcgcatagatgagtccattcatttacagcttagagagaagtacggagataagatgctacgaatgcaaaagggtgatccacaggtttatgaggaactgttctcatacagttgcccaaaattcctgtctcctgtggtgccaaattatgataatgttcaccccaactaccacaaagagccattcctacagcagctgaaggtttttagcgatgaggtccaacagcaggcgcagctgagcaccatccgaagctttcttaagctatacactactatgcccgtcgcaaaactggctggctttctggatcttaccgagcaggaattccggattcaactgttggtgttcaagcacaagatgaaaaatctagtttggacgtctggcatcagtgctctggacggtgaatttcaatccgcatcagaggttgatttttatattgacaaggacatgatccacatcgcggacactaaagttgcacgtagatatggtgatttctttataagacaaatccacaaatttgaagagcttaaccggacgctgaagaaaatgggccagaggccatag

SEQ ID NO: 16273 - DNA, 789 bp, synthetic construct
  source 1..789: mol_type = other DNA; note = Synthetic coding sequence
atggccctgagcctgggatggaaggcccaccgcaatcactgcggtttactcctccaggcacttaggtccagtggcctgttgctgtttccttgcggacagtgtccctggcggggcgccggtagcttcttggatcctgaaatcaaggccttcctggaggagaacacggaagtgaccagctctggtagcctgacaccagagatccagctccgcctgctgaccccacgctgcaagttttggtgggaacgcgccgatctctggccccacagtgacccttattgggccatttattggcctggcgggcaggccctatcccgctatctgttggataatcctgacgtagttcgcgggaaaagcgttctcgatctgggctctggctgcggagcaactgcgattgcagctaagatgagcggggcatcacgcattcttgccaacgacatcgatcccattgccggcatggccataaccctaaattgcgagttgaatcggctaaatccctttcccattttgatccagaacatacttaacttagagcaggacaaatgggatctggttgtcttaggagacatgttttacgacgaggacctcgcggactccctgcaccaatggctgaaaaaatgcttctggacatacaggacccgagtccttatcggagatccaggaaggcctcagtttagtgggcactccatccagcatcacctccacaaagtggtggaatactcactactggagagtacaagacaagagaatagcggactcacaacctctaccgtgtggggatttcagccttag

SEQ ID NO: 16274 - DNA, 1626 bp, synthetic construct
  source 1..1626: mol_type = other DNA; note = Synthetic coding sequence
atgtcttcgtgtgttagtagccagccatcgtctaaccgtgctgccccccaggatgagttggggggcaggggaagctcatcttctgagtcccagaagccctgtgaagcacttaggggtctgtcctccctcagcattcatctaggcatggaaagctttatagtggttaccgagtgtgagccaggatgcgctgtagatctgggcctagctcgtgataggcctctggaagctgacggccaggaagtccccctagatacatctggcagccaagccaggccacatctgtcggggcgcaaactgtcactccaggaacgcagccaagggggattagctgccggagggagcctcgatatgaatggtcgctgtatctgtccgtctcttccttattcccctgtttcctcaccgcagtcttctccaagacttccccgtcggcctacagttgaatcacatcatgttagtataaccggaatgcaggactgcgtgcagctgaaccaatacacccttaaggacgagatcggcaaaggatcctacggtgtggtgaaattagcttacaacgaaaatgacaacacctattatgccatgaaagtgctgtcaaagaaaaagctgatccgacaggccggcttccctcggagacctcctcctcgtgggaccaggccagccccgggtggctgtattcaaccgaggggcccaattgaacaggtttaccaggaaattgccattttgaagaaacttgaccatcctaacgttgttaaattggtcgaggttctggatgaccccaacgaagatcatttgtacatggttttcgagctagttaatcaaggtccagtcatggaggtccccaccctgaaaccgctatcagaagaccaggctagattctactttcaagatttgattaagggaattgagtatctgcattatcagaagatcattcaccgcgacatcaaacccagcaatttgctggttggagaagacggacacatcaagatcgccgatttcggggtgtccaatgaattcaagggcagtgatgctctgttatcaaacacggtgggcacaccagcattcatggccccagagtcattgtccgagaccaggaagattttttccggaaaggcattagatgtgtgggccatgggcgtcacactgtactgtttcgttttcggccaatgcccttttatggacgagcgaatcatgtgtctgcacagtaagatcaagtcccaagctctcgagtttccagatcagcctgatatcgcagaggacttaaaggacctgatcacgcggatgctggataagaatcccgagtctagaattgttgtgccagagatcaagctacacccttgggtgacacggcatggtgctgagccgctgccgagtgaggacgagaactgtacactcgtggaagttacagaggaggaggtcgagaatagcgtaaagcacataccctccctggctaccgtaatcctcgttaaaacgatgattcggaagcggtccttcggaaatccattcgagggctccaggcgggaagagagaagcttgtcagctcccggaaaccttctgaccaaacagggcagcgaggataatttgcagggtaccgacccaccccctgtaggcgaagaggaagtacttctatag

SEQ ID NO: 16275 - DNA, 303 bp, synthetic construct
  source 1..303: mol_type = other DNA; note = Synthetic coding sequence
atgtccaccataggttccttcgaggggtttcaagctgttagcctcaagcaagaaggtgacgatcagcctagcgaaacagaccacctgtctatggaggaggaggacccaatgccgcggcagattagcagacagtcctccgtcacagagagcaccctctaccccaacccttatcatcaaccttatatctccaggaagtacttcgccacacgccctggggccatcgaaactgccatggaagacctcaagggacatgtggccgagacctccggcgaaacaatacaggggttttggctcctaacttag

SEQ ID NO: 16276 - DNA, 1425 bp, synthetic construct
  source 1..1425: mol_type = other DNA; note = Synthetic coding sequence
atggagcggtctggccagcgcgtcacgacttgggattgtgatcagggtaaacactctgattcagactatcgggaagacggcatggatctgggctccgatgctggaagcagctcatcgtcaagccgcgcgagttcacagagtaactccaccaaagtgacaccctgttctgagtgcaaatcaagctccagtcccggagggtccctggatctggtaagcgccctcgaggattatgaggagcctttccccgtttaccagaagaaagtgattgacgaatgggcccctgaggaagacggtgaggaggaggaagaagaggacgaaagagaccaacgcggatatagagacgatcggagccctgccagggagcccggagacgtctcagcgaggacccgcagtggtggaggtggcggccgttccgcgacaacggcaatgcccccaccggtgcctaacggaaaccttcatcagcatgatccccaggatctcagacataacggcaacgtcgtggtggccgggagacccagctgcagcagaggtcccaggcgggccatccagaagcctcagcctgcaggtggcaggagatctggcagggggcccgcagccgggggactctgcttgcagcctcccgatggaggaacttgcgttcccgaggagccccccgtgccacccatggattgggaagccctggaaaaacatcttgctgggttacagttccgggagcaggaagctcagaaaaacgagcgggaatcaattagacagaagctggccctggggtccttctttgacgatgggccaggaatttacaccagttgctcgaagagtgggaaaccctcactctcctcacgcctgcagagtgggatgaatctccagatatgcttcgtgaacgactccggaagcgataaagattctgacgccgacgactcaaagaccgagacatcactggacacacccctgtcaccaatgagtaaacagagtagcagctactccgatcgtgatactacggaagaggagtcagagtcactggacgacatggactttctgacccgacaaaagaagttgcaggccgaggcaaaaatggctttagctatggccaaacccatggccaagatgcaggtggaggtggaaaagcagaatcgtaagaagtcgcctgtggccgacctactgccacacatgccacacatatcggagtgcctgatgaagcggtccttaaagcccacagatctgcgagacatgacaatcggtcagctgcaggtgattgttaatgacctgcacagccagatagagtccttgaatgaggagctggtccagctgctgctgatccgagacgaattacataccgagcaggacgctatgctggtggacattgaggacctgacacgccacgccgagagccagcaaaagcacatggcggagaagatgcccgcgaagtag

SEQ ID NO: 16277 - DNA, 690 bp, synthetic construct
  source 1..690: mol_type = other DNA; note = Synthetic coding sequence
atgcagcagagggtcttagagctgatacctcagatagccaatgaacaactgaccgaagaattgctcatcgtcaacgacaaccttaataacgtctttcttagacacgagcggtttgagcgatttaggacgggccagactaccaaagcacccagcgaggccgaaccagccgctgacctcatcgatatgggaccagaccctgcggctactggcaacctttcttctcagcttgccggcatgaacttgggaagttcatccgttagggccggactccagagccttgaggcttcaggccggttagaggatgagtttgatatgtttgctctgaccagaggcagttcactggcggaccagcgcaaggaggttaagtatgaagcaccacaagccactgatgggctggccggggcattagatgctcgacagcaatcaacaggcgcaattcctgttacacaagcatgtctcatggaagacatagaacagtggctctccaccgacgtgggcaacgacgcagaggaacccaaaggtgtaacctccgaggagtttgacaaattcctcgaagaaagggcaaaggccgccgatcgcttgcccaatctctcttcgcctagcgccgagggccctccgggacccccttccgggcccgcgccacggaaaaagacccaggagaaagacgacgacatgctatttgccttgtag

SEQ ID NO: 16278 - DNA, 1650 bp, synthetic construct
  source 1..1650: mol_type = other DNA; note = Synthetic coding sequence
atgtcgagggtagccaagtacaggagacaggtgtcagaagatccggacatagactccctgcttgagacgttatccccagaagaaatggaggaactggaaaaggagctcgacgtggttgaccccgacggctccgttcccgtgggcctgaggcagagaaaccagactgagaaacaatccaccggcgtgtacaatcgggaagccatgctgaatttttgcgaaaaggaaaccaagaagctgatgcagcgggaaatgtcaatggatgaatcaaagcaggttgagaccaaaaccgatgccaaggaggaaaagatcatcagagggattgataaaggacgcgtgcgggctgcagtggataaaaaagaagccggaaaggacggacggggagaagagcgggcagtggcaactaagaaggaagaggagaagaaaggctcggatcgtaacacaggcctctcccgggacaaagataaaaagagggaagagatgaaagaggtggcaaagaaagaagacgacgagaaggtaaaaggagagagacgtaacacagacaccaggaaggaaggcgaaaagatgaaacgagctgggggaaacacagatatgaagaaggaggacgagaaagtaaagcgtggaaccggtaacacggacaccaagaaagacgatgagaaggtgaagaaaaatgagccgctccacgaaaaagaagcaaaggacgattcgaagacaaagacccccgagaagcagacaccttctggccctaccaaaccttcggaggggcccgcgaaggtggaagaagaggcggctccatctatttttgatgagcccttggaacgcgtcaaaaataatgatcccgaaatgacagaggtgaatgtgaacaatagcgactgcattaccaatgagattttggtgaggttcaccgaggcccttgagttcaatactgtcgtcaagctgttcgcactggcaaacacccgagctgacgatcacgtagcatttgccatagccattatgctaaaggctaataagaccatcacttctctgaacctggactctaatcacattacgggaaagggaatcttagctatctttagagccctcttgcagaataataccctgaccgagctgagatttcacaaccaacggcatatttgcggcggtaaaactgagatggagatcgctaaactgcttaaagaaaataccaccctgctgaaactgggttaccattttgagttggctggtccacgaatgactgtcaccaatttgttgtctcggaacatggacaaacagcgacaaaagagactgcaggagcaaagacaggcccaggaggcaaaaggggagaagaaggatctgttggaggtcccaaaggctggcgcagtggccaagggctctccgaagccgtctccccagccttctccgaagccatcccccaagaattcccccaaaaagggtggagcaccagccgctccccctccacctcccccaccattagctccaccactcattatggagaacctaaaaaactctctctcgccagcgacacagcggaaaatgggcgataaggtcctccccgctcaggaaaaaaatagtcgcgaccagcttctcgccgccatccgctcatctaatctgaaacaactgaaaaaggtggaggtgccaaagttgctgcagtag

SEQ ID NO: 16279 - DNA, 231 bp, synthetic construct
  source 1..231: mol_type = other DNA; note = Synthetic coding sequence
atgagcgcttcttgtgatggctgcgtcggtagcagacctccggtgcatcttgcttctgggtatagtctggccgacctgctagttctggaaatgggtatggggacccagtgctggacggaggatcaacgccgctggagtagtctctggccatggtcacatcttagttccgatcctagcctcccaaacgtgcaagttacacgcctaaccttgctctctgagcaggctccatag

SEQ ID NO: 16280 - DNA, 1416 bp, synthetic construct
  source 1..1416: mol_type = other DNA; note = Synthetic coding sequence
atggctaactcttttgcggctcgcatcttcacaacattatctgatctgcagactaatatggctaatctcaaagtgatcggtatagtcattggcaagacagatgtgaaaggtttcccagaccgtaagaatattggcagcgaaaggtacacattctcttttacaattcgggatagccccgcccatttcgtgaatgcagcaagctggggaaatgaagactatattaaatctctctccgattcgtttagggtgggagactgcgtgatcatcgagaatcctctcatccagaggaaagagatcgagagggaagagaaattctccccggccacaccttcaaactgcaagctcctgcttagcgaaaaccacagtacagtgaaggtgtgttcctcttacgaagttgacaccaagttactttcacttattcacctgcccgtgaaggagtcgcatgactactattccttgggcgatatagtggcaaacgggcactctctaaatggcaggataattaacgtgctggctgcagtcaaaagtgttggggagcccaagtatttcactacctcagatcggagaaaaggacagaggtgtgaagtgagactgtatgacgagaccgagtcgagcttcgcaatgacctgttgggacaacgaatccattctgctcgctcagtcatggatgccgcgggagaccgtaatatttgcaagcgacgtgcgaatcaacttcgataagttccgtaactgcatgactgctacagttataagcaaaactattattacaactaatcccgatattccagaagccaatatactgctcaattttattagggaaaataaggaaaccaacgttttggacgatgaaatcgacagttattttaaagagtctatcaacctgtcaactatcgttgatgtgtacaccgtggagcaattgaaagggaaagctctgaaaaatgagggaaaggccgatcccagttacggaatcctgtatgcctatatcagtacccttaatatagacgacgaaacgaccaaagtagtgcgcaatcggtgttcgagctgtggctacattgtcaacgaggcttctaatatgtgcaccacatgcaataagaacagcctggatttcaagtctgtcttccttagctttcatgtcttgatcgatctgaccgatcacacgggaacactccactcttgctccctgacggggtctgttgccgaagaaactcttggatgtacagtgcacgagtttcttgccatgactgacgaacagaagacggccctgaagtggcaatttctccttgagaggtcaaaaatttatttgaaattcgtattatctcaccgggctagatcgggtctgaaaatcagtgtgctcagctgcaagctggccgacccgacagaggcatcacgaaacctgtccggccaaaagcacgtatag

SEQ ID NO: 16281 - DNA, 747 bp, synthetic construct
  source 1..747: mol_type = other DNA; note = Synthetic coding sequence
atggctacctccgccccactgagatccctggaagaagaagtgacctgttccatttgcctcgactatctgagggatccggttactattgactgcgggcacgtgttttgtcgctcctgtactacagacgtaaggccaataagtggatctcggcccgtgtgtccactatgtaagaagcccttcaaaaaggagaacatcaggccggtctggcagctcgcctcgctggtggagaacatcgaaaggctgaaggtggacaaagggagacagccgggggaggtgacccgagagcaacaggacgccaagctatgtgaacgacatcgggagaagctgcactactactgcgaagacgatggaaagttactgtgcgttatgtgccgtgagagccgcgagcatcgtcctcacaccgccgtactcatggagaaggccgctcagccccaccgcgagaaaattcttaatcatctgagcaccctgcgccgtgaccgggataagattcagggttttcaagcgaaaggtgaagccgacattctggcagctctgaagaagctgcaagaccagcgtcagtacatcgttgccgagtttgaacaaggtcatcagttcctgcgggagcgggaagagcacctgctagaacagctggcgaagctggagcaggagctgacagaaggacgggaaaagttcaagtcacgcggagtgggcgaactggcccgcctggcccttgtcataagcgagctggagggcaaggctcagcaatag

SEQ ID NO: 16282 - DNA, 2646 bp, synthetic construct
  source 1..2646: mol_type = other DNA; note = Synthetic coding sequence
atgttttggaagttcgacttgcacacatcctctcatctcgacacactgctcgaaagggaggatttgtccttgcccgagctgctggatgaggaggatgtactgcaagaatgcaaagtcgtgaatagaaagttgcttgacttccttttgcagccgccacacttacaggcaatggtggcatgggtgacacaagagccacctgacagcggagaggagcggctaaggtacaagtacccgagtgtggcctgcgaaatcctcaccagcgacgttccacaaatcaacgatgccctgggtgctgatgagagcctgctgaacaggttgtacggcttcctgcaaagcaccggatcgctgaatccattattggcttctttcttttctaaagttatgggaattctgattaataggaaaactgaccagctggtgagttttcttcgcaagaaagatgattttgtggacctgctgctgcagcacatcggtacaagcgccattatggatctcttgctgcgcctactcacttgcgttgagaggcctcaactccgtcaggatgtggtaaactggctgaatgaggagaaaattgtccaacgactgatcgagcagatccatccgagtaaggatgaaaatcagcacagcaacgcttcacaatctctgtgtgatattattcgtctgtcccgagagcaaatgatacaggtgcaggattcaccagagcccgatcagctcctggctaccctggagaaacaggagacaatagagcagctcctctccaacatgttcgagggtgagcagtcccagtccgtcattgtgagcggaatacaggttctgctgacattattggaaccacgcaggccccggagcgaatctgttaccgttaatagtttctttagttctgtagacggccaactggaactgctggcccagggggccctcgagtcaactgttagctccgtgggagcattacacgcgctgaggccaaggcttagctgcttccatcagctgttgttagagcctccaaaactcgaaccgctccagatgacttgggggatgctagctccacctttaggaaacactcgcctccatgtggtaaagctgctagcctccgccctgagtgcaaacgacgccgcattgacccatgagctcctggctcttgatgttccgaacaccatgctggatctcttctttcattacgtttttaataacttcctgcacgcccaggtcgagggatgcgtctccacaatgttaagcctcggacctcccccagacagctctccagaaacacccatccagaatccggtggtcaaacacctacttcagcagtgtaggctggtcgaaagaattttgacaagctgggaagagaacgaccgggtccaatgcgcgggcggccctcggaagggatacatgggccacttgacccgcgtggccggcgcactggtgcagaatacggaaaaaggtcccaatgctgagcagttacgccagctgctgaaggaacttccatcagaacagcaggaacagtgggaagccttcgtaagcggcccactggccgaaacgaacaagaaaaatatggtggacttagtgaatacccaccatctccactcatcgagtgacgatgaggacgacagacttaaggaattcaattttcccgaggaggccgtgcttcagcaggccttcatggacttccagatgcagagaatgacttccgcttttattgatcatttcggattcaacgacgaagagttcggtgaacaggaggagtcagtgaatgcaccttttgataagacggctaatattacattctcgcttaacgccgacgacgaaaacccaaacgccaacttgctggaaatttgctataaggatagaattcagcagttcgacgatgatgaggaggaagaagatgaggaagaggctcaaggatctggtgagtcagatggcgaggatggcgcttggcagggaagccagctcgcccgaggggctaggttgggccaacctcccggagtgcgtagtgggggctccacggactcagaggatgaagaagaagaagacgaggaggaggaggaagatgaagagggcatcgggtgcgcagcaaggggtggcgccactcccctgtcatacccatcccccggtccacagcctccgggaccgagctggaccgccacatttgaccccgtgcccacagacgctcctacatctcccagagtatctggcgaagaggagctccacaccgggccccccgctccacaaggcccgctcagcgtgccccagggactgccaacacagtccctcgcttcccctcccgcacgagatgcacttcagcttagatcccaggatcctacacctccttccgctccacaggaggctacagaagggtcaaaggtcacagaaccatctgctccttgtcaggctctggtgtccatcggcgacctccaggcaacctttcacggaatcagatctgcccctagttcaagtgattctgcaacacgggatccatccacctcagtcccagccagcggggcgcaccagcctccccagaccaccgagggcgagaagagtcctgagcccctgggattgccacaaagccagtccgcacaggccttgacccctccacctattcccaatgggtcggctccagaaggccccgcatctccaggatcccagtag

SEQ ID NO: 16283 - DNA, 354 bp, synthetic construct
  source 1..354: mol_type = other DNA; note = Synthetic coding sequence
atgaaattccagtataaagaggtgcatcccttcgaatatcgtaaaaaggagggcgagaagataagaaaaaaataccccgatagggtgcccctgattgtagagaaggcgccgaaagcacgggttcccgacctggacagacggaaatatctcgttccaagcgacttgaccgacggccagttctaccttctgattcgcaaaaggatccacctgcggcctgaagacgcactgtttttcttcgttaacaataccatccctcccacgtctgccacaatggggcagctgtacgaagacagccatgaggaagacgattttctatacgtggcctattcaaatgagagtgtttatggaaaatag

SEQ ID NO: 16284 - DNA, 1089 bp, synthetic construct
  source 1..1089: mol_type = other DNA; note = Synthetic coding sequence
atgcgcgagatcgtgcatctgcaggcaggccagtgtggcaaccagattggagcaaagttttgggaggtcatcagtgatgagcacggcatcgacccgacgggtacataccacggagacagcgacctgcagctcgaacgtataaacgtctactataatgaggccactggagggaactatgtcccaagagccgtcttggttgatctagaacctggcaccatggactcagtacgttccggaccattcggccagatatttcgtccagacaatttcgtcttcggccaatctggagccggaaataattgggctaagggccattacaccgagggcgcagaactggtggatgctgtgttagatgtcgtgcgcaaggaggctgagtcctgtgactgtctccagggattccaactgaccacgcctacctatggtgatcttaaccatttagtttcagcgacaatgagcggtgtcacgacgtgtcttcggtttccgggacagctgaacgcagatctgcgaaagttggctgtaaacatggttccgttccctcgcttacatttcttcatgcctggcttcgcccccttaacttcaaggggctcccaacagtatagggccctgacagttcccgagctgacgcagcagatgttcgatgccaaaaatatgatggccgcatgcgatccccgccacggacgctacctcactgtcgcagctgtgtttagagggcggatgtccatgaaggaagtcgacgaacaaatgctgtcagtccagagcaagaattcttcttatttcgtggaatggatccctaataacgtcaaaaccgccgtgtgcgacatcccccccagggggctgaagatggccgcgacattcatcgggaacagcaccgcgatacaagagctgttcaagcgaatctcggaacagtttacagccatgtttcggagaaaggcctttttgcactggtataccggcgaggggatggacgagatggagtttacagaggcagagagcaacatgaacgatcttgtgtctgagtaccaacagtatcaggacgccaccgccgaagaaggcgaatttgaggaggaagccgaagaagaggtcgcctag

SEQ ID NO: 16285 - DNA, 654 bp, synthetic construct
  source 1..654: mol_type = other DNA; note = Synthetic coding sequence
atggaggaaaccatgaagctcgcaacaatggaggatacagtggagtattgtttgtttctaatccccgacgagagtcgggactcagacaaacataaggaaattctccagaagtacatcgaacgcatcatcacgcggttcgcacccatgctcgtgccttatatttggcagaatcagccctttaatctaaagtacaagcctgggaaaggaggagtgcctgctcatatgttcggggtgaccaaattcggcgataatatcgaggacgaatggttcattgtttacgtgattaaacagattaccaaggagtttcctgagctggtggcaagcaccaatcgagtgttcttctgccacggcgagttatgcataatcccggcacctaggaaaagcggcgctgagtcatggctgccgacaacccctccaaccattccccaggcactgaacattattactgctcattccgaaaaaatcctggcttcagaatctatcagagccgctgttaataggagaatcagaggttatcccgagaaaatccaggcatccctccaccgagcccactgctttctccctgccggcatagtggctgttctcaagcagcggccgagactggtggctgccgccgtccaagccttctaccttagagatccaatcgatctgtag

SEQ ID NO: 16286 - DNA, 1188 bp, synthetic construct
  source 1..1188: mol_type = other DNA; note = Synthetic coding sequence
atggccagcgcagccagcgttacatcactggcggacgaggtcaattgcccaatctgtcaagggacccttcgggagccagtcacgatcgattgtggtcacaacttctgccgagcctgtctcactcggtattgcgagatccctggtcctgacctcgaagaatccccaacatgccctctctgtaaagagcctttccgcccaggcagcttccgacctaattggcagctggctaacgtggtagagaacatcgagcggttgcagctcgtatccacactcggattgggagaggaagatgtctgccaagaacacggggagaagatctattttttctgtgaagacgacgagatgcagctttgcgtcgtctgcagggaggctggagaacacgctacacacacaatgcggttcctcgaggacgccgccgcgccatatagagaacagatccacaaatgtctgaaatgtctgcgtaaggagagagaagaaatacaagagatccagtccagagagaacaaacgcatgcaggtgctactgacacaggtttccacaaaaagacagcaagtgatctctgaattcgctcaccttcgtaagttcctggaagagcagcagtccatcctactcgcacagctggagagtcaagacggagacatcctgaggcagagggacgagttcgaccttctggtcgcaggcgagatctgccgattctccgccttaatcgaggaactggaagagaagaacgagagaccagctcgagagctgttaaccgatattagaagcaccctcattcgctgtgagacacgtaagtgccggaaacccgtagctgtatctccagaactgggccaacggatccgtgacttccctcagcaagcactgcccctgcaaagagaaatgaagatgttcctggaaaagctgtgcttcgaactggattacgaaccagcccatataagtctcgatcctcagacctcacaccctaagcttttgctatctgaggaccaccagagggcccagttctcctataagtggcagaatagccccgacaacccccagcgtttcgatagggcaacctgtgtgctcgcccacaccggcattaccggaggaaggcacacatgggtctggatggccagggtgcccggcgattcaggatgctgccaattttgcagcccaccaagcgtcttaggaacagaggtggccgcatag

SEQ ID NO: 16287 - DNA, 102 bp, synthetic construct
  source 1..102: mol_type = other DNA; note = Synthetic coding sequence
atgagcatcagcagcgacgaggtgaattttttggtgtataggtatctacaggagagcggcttcagccatagcgctttcacttttggcatcgagtcacactag

SEQ ID NO: 16288 - DNA, 1242 bp, synthetic construct
  source 1..1242: mol_type = other DNA; note = Synthetic coding sequence
atgttcgcttctgacctgctccgcgccctggattgctgccctggcgcagggtcttccgggctgttgccacaattaggcccgcggcagctgttggccttcaccgtcaattgcctgggtaaccacagatatcttggattttttgaagatctcgagcaaaggcataaggcccaagttctggtggaggacatttcagatatcctggaagaacacgccgagaaacattttcacccctatatagcctactgctctaatgaggtgtaccagcagagaacgctgcagaaactcattagctcgaatgctgcctttagagaggccctgcgcgagatcgaacgccgcccagcgtgcggaggtctacccatgctgtcttttttgatcctccccatgcaaagagtgacacggctgccccttctgatggacaccctgtgcctgaaaactcaggggcactctgaacgctacaaggcagcctcacgtgcattaaaagcaatcagcaaactggttaggcaatgcaacgagggagctcaccgaatggaacgtatggagcaaatgtatacattgcacacgcagctcgacttctccaaagtgaagagcctccctctcatttcagcctcgaggtggctcctgaaacggggggaattgtttctcgtggaggagactggtctctttagaaaaatcgctagccggcccacatgctacctcttcctcttcaatgatgtcctggtcgtcacgaagaaaaaaagcgaggaatcatatatggttcaggactacgctcagatgaatcatatacaggtcgagaaaatcgagccaagtgaacttccccttccaggcggcggtaacaggagctcttccgtgccacacccttttcaagttactcttttaagaaatagcgagggccgacaagagcagctccttctctcttccgactcagccagtgacagagcccgatggatcgttgccctcacccatagtgagaggcagtggcaaggtctgtcctccaaaggagatcttccacaagttgagattaccaaggccttctttgctaagcaggccgacgaggtgaccttacagcaggcagacgttgtgctagtgcttcagcaggaagacggatggctgtatggagagaggctgcgcgacggagaaacaggatggtttcccgaagacttcgctagatttatcacctcccgggtcgccgtagagggtaatgtgcggaggatggagcggctgagggtagagacagacgtctag

SEQ ID NO: 16289 - DNA, 1890 bp, synthetic construct
  source 1..1890: mol_type = other DNA; note = Synthetic coding sequence
atggaagagtcgcctctttcccgcgccccttcccgcggcggcgtgaattttctcaatgtagcgcgcacatatattcctaatactaaggtcgagtgtcattatactcttccaccagggaccatgccctcagccagtgattggataggaatctttaaggtcgaagccgcttgcgtacgggattaccacacttttgtttggagctcagtgccagaatcaacgactgatggctcccccatccacacctcagtgcaattccaggcatgcaaccagctcgatgaaagccaacaggagcgaaatgatctgatgcagctgaaactccaacttgaaggtcaagtgacagaactgcgctccagagttcaggagctggagagagcgctggcgactgccaggcaagagcacactgaactcatggagcagtacaagggtatctccagaagtcatggtgaaattaccgaggagcgcgacattctaagcaggcagcagggggaccacgtagcgagaatcctcgaactggaggatgatatacaaacaattagcgagaaggtattgactaaggaagttgagctcgaccgcttgagagatacagtaaaggccctgactagagagcaggaaaaactgctaggccaactcaaagaggtgcaagctgataaggaacagtctgaggctgaacttcaggtggcacagcaagaaaaccaccatctgaatttggatctgaaagaggctaagtcttggcaggaagagcagagcgcccaggcccaaagactgaaagataaagtggcccagatgaaggatacacttgggcaggcccagcagagagtggctgaattggagcctctcaaggagcagcttcggggagcccaggagcttgctgccagcagtcagcagaaagcaacactgttaggcgaggagcttgccagcgcagcagctgcgagggataggaccattgcagaactgcacaggtcacgactggaggtcgctgaggttaacgggaggttggctgagcttgggctgcatctcaaggaggaaaagtgccagtggagtaaggagcgggccgggttgttgcaatccgtcgaagccgaaaaagacaagatcctcaaactatccgccgagatcctgagactggagaaggcagtccaggaagaaagaactcagaaccaggtattcaaaactgaattggcacgcgaaaaggacagttcactggtgcagctctccgagagtaaaagggaactgacagagttgagatccgccctgagggtgctgcagaaagagaaagagcagctccaagaggaaaaacaggagctgctagagtatatgcggaaactggaggcaaggctcgaaaaggtggccgatgaaaaatggaacgaggacgctaccacggaggacgaggaggcagcagtggggctgtcatgccctgcagcattgactgattcagaagatgaatcccctgaggacatgagattgcctccctacggcctgtgtgaaagaggagatcctggatccagtccagctggtcccagagaagcctcccctctggtggtcatctcgcagcccgcacctattagccctcacctcagcggccccgctgaagatagtagctcggattctgaggctgaggacgaaaagagtgtgctcatggccgctgtccagtctgggggggaggaagcaaaccttttgctcccggaactaggatccgcattctatgacatggccagcggcttcactgtcggcacgctctctgagaccagtaccggcggacctgcgactcctacatggaaggagtgccctatatgcaaggagcggttcccagcagagagcgataaggacgccttggaagaccatatggatggccactttttcttctcgacccaagatccttttacgttcgaatag

SEQ ID NO: 16290 - DNA, 2451 bp, synthetic construct
  source 1..2451: mol_type = other DNA; note = Synthetic coding sequence
atgccattaagcagcccaaatgcagctgcaaccgcctccgacatggacaagaactccggctctaactcatcctccgcaagctccggttcatcaaaggggcaacaaccaccccgctccgcttccgccgggccagccggggaaagcaaacctaagtccgatggcaagaactccagcggctccaaacggtataaccgcaaacgagagctcagttacccaaaaaacgagtcatttaataatcaaagccgccgctcttctagccagaagtcgaagacgttcaacaaaatgcccccccagagaggcggcgggtcctccaagctgttcagctcatccttcaatggtggaagacgagacgaagtggctgaagcccagagggccgagttttcccccgcccagttctcaggtccaaagaagattaatcttaaccacctcctgaactttacctttgagccaagagggcagacgggtcacttcgagggcagcggacatggcagttggggcaagcgaaataagtggggacataaacctttcaacaaggagctgtttctgcaagcaaactgtcagttcgtcgttagcgaagaccaggattacactgcgcactttgccgatcctgatacactggtaaattgggactttgttgagcaggtgcggatctgttcacacgaagttccaagctgtcctatctgcttgtatccccctactgccgcgaagataactaggtgcggtcacattttctgctgggcctgcatactgcactacctgagcctctctgagaaaacttggtccaagtgccccatctgctactcttccgtgcacaagaaggatctgaagtccgtggtggctaccgaatcacatcagtacgtggtaggtgacacgatcaccatgcagcttatgaagagagaaaaaggggtattggtcgccctgccaaaatctaaatggatgaacgtggatcatcctatccacctgggcgatgagcagcatagccagtactctaaattgctgctcgctagcaaagagcaagtgctgcacagagtggtccttgaggagaaagtggccctggaacaacagctagctgaggagaagcacaccccagaaagttgctttatcgaggcagcaatccaggaactgaagactcgtgaggaggctctgtctggcttagcaggctcgcggagggaagtgacaggagttgtcgctgcgttggagcagttggtactgatggccccattggctaaagaatccgtgtttcagccccgaaagtctctgctacagcagggcgtgttggagtatctctccgcctttgacgaagaaaccacagaagtgtgctcactggacactccctctcgtcctctggccttgcccctagtggaagaagaagaggcggtttctgaacctgaaccagaggggctcccggaggcttgtgacgacctcgagcttgcagacgacaacttaaaggaggggactatatgcaccgagagctctcagcaggagcccatcactaagagtggctttaccagacttagctcaagtccatgttattacttttatcaggccgaggacgggcagcacatgtttctacatcccgtgaatgtgagatgcctggtgcgcgagtatggcagcctggagaggtctcctgaaaagataagcgccactgtggtggaaatcgctggatactctatgtccgaggatgttcggcagcgccacaggtacctcagccacttgccccttacctgtgaattctcaatttgcgaacttgctttgcagcccccagtcgtgagcaaggaaactttggaaatgttttcggacgacatcgagaaacgcaagcgacagcgccagaagaaggcccgggaagagcgtcgtagggaacggagaattgagatagaagagaacaagaagcagggcaaatatcctgaggtgcatatcccgctggagaacctgcagcagttccccgccttcaactcatatacctgtagcagtgacagtgccctggggcctactagcaccgaaggccatggggccctctccatcagccccttatccagaagccctggctcacacgccgacttcctgctgacgcccctatctccgactgctagccaaggcagtccgtctttttgtgtgggatctctggaagaggacagtccgtttccctcatttgcccagatgttgcgcgtagggaaagccaaagctgacgtgtggccaaagacagcacctaaaaaggacgagaattcactagtgcctcctgcccctgttgattcagacggcgagagtgacaacagcgatagagtccccgtgccgtcattccaaaattctttctcccaagccatcgaggccgctttcatgaagctggatacccctgcaacctcagaccctcttagcgaagaaaaggggggtaaaaaacgcaagaagcagaaacaaaagctgctgttctctactagcgtagttcacacaaaatag

SEQ ID NO: 16291 - DNA, 429 bp, synthetic construct
  source 1..429: mol_type = other DNA; note = Synthetic coding sequence
atggcctccccaggtaaggacaactatcgcatgaagtcttacaagaacaaggcactgaatccgcaagaaatgcggagacgtcgcgaagaggagggaatccaattaagaaagcagaaaagagaagagcaactttttaagcgccgcaatgtgtatcttcctcgcaacgatgagtctatgctcgaaagtcccatccaggatcctgacatatcaagtacagtcccgatcccagaagaagaggtggttaccacggacatggtccaaatgatcttttccaacaatgctgatcagcagctcacagctactcagaagttccgcaaactgctgtcaaaagagccgaatcctccgatagaccaggtaatccagaaacctggggtggtgcagcggttcgtcaagtttctggaaaggaacgagaattgtacgctccagtag

SEQ ID NO: 16292 - DNA, 297 bp, synthetic construct
  source 1..297: mol_type = other DNA; note = Synthetic coding sequence
atgagcgaacagggcgacctaaatcaggctatagccgaagaagggggtacagaacaggagaccgccacaccagaaaacggcatcgtgaagtcagaatctctggacgaagaggagaaattggaactgcagcggcggctggaagcacagaaccaagagagaaggaagtcaaaaagcggagctggaaaagggaagctgacacggtcacttgcagtctgtgaggagtcatcagcgcgacccggcggagaaagtctccaggatcaagagagcatccatctacagttatcatcatttagttag

SEQ ID NO: 16293 - DNA, 1917 bp, synthetic construct
  source 1..1917: mol_type = other DNA; note = Synthetic coding sequence
atggagaacctgcaaactaatttttcactcgtgcagggctcaactaaaaagctcaatggaatgggagacgacggcagcccccctgccaagaagatgataacagacatccacgccaatggcaagaccattaacaaggtacctactgtaaaaaaggaacaccttgatgactatggtgaagcacctgtcgagacagatggagagcacgtgaaaaggacatgcacttcagtccctgagacgctgcacctcaacccatcacttaagcatactctcgctcaattccacctgtcctcgcagtcgtcgttgggaggaccggcggcattcagtgcaagacacagccaggaaagcatgtctccaaccgtgtttttgcccctccctagcccacaagtcctgccagggcctctgctcatacctagcgatagctctactgagctcacccaaactgtactggaaggagagtcaatttcttgctttcaggtgggaggtgaaaaaagattgtgtctgcctcaagtacttaatagcgttctcagagaatttactttgcaacaaatcaacacagtgtgcgacgaactatacatatattgcagtaggtgtacctccgatcagcttcacattttaaaggtgttagggatcttgcctttcaacgccccaagctgtgggctgattacattaacggatgctcaaagactgtgcaatgctcttttacggcccaggacgtttcctcagaatggttctgttctgccagctaagtcatctctggcacaacttaaggaaacagggtcagctttcgaggtagagcacgagtgtctcggaaaatgtcaaggcctcttcgcccctcaattctatgtgcagccggatgccccgtgcatccagtgcctggaatgttgcggcatgtttgcgccccagacctttgtgatgcactcccacaggagccctgataaacgaacttgccactggggctttgaatctgcaaaatggcactgctacctccacgtcaatcaaaagtatctgggaacaccagaggaaaagaaactgaaaatcattctcgaggaaatgaaggaaaaattctccatgagaagtggtaaacgcaatcagagcaagacagacgcacctagcggaatggagctccagagttggtatcctgtaatcaagcaggagggagaccatgtatcccagacacactcatttctacaccccagctattacctgtatatgtgcgacaaggtggtcgcaccaaacgtgtcattgacgtcagctgtgtctcagtctaaagaactgactaagacagaggcaaatgcctcaatttctaataactctacctccaaacgcaagagtgagtcggctacgtgtaacctcgttagggacatcaataaagtgggtataggactcgtggctgctgccagctctccactcctggtcaaagatgtaatttgtgaagatgacaaagggaagatcatggaagaagtgatgcgcacatatttgaagcagcaggagaagctaaatttgatcctccagaagaagcaacagctgcagatggaagtcaaaatgttatcaagcagtaagtctatgaaggagttgacagaagaacagcaaaacctgcagaaagaactcgaatccctgcagaatgaacacgcccaaagaatggaggagttttacgtcgaacagaaggatcttgagaagaagttggagcaaataatgaaacagaagtgtacatgtgatagcaacctggagaaagacaaagaagctgaatatgcaggccagctggctgaactgcgccaacggttggaccacgcagaagctgatcgacaagaactccaggatgaattgcgccaggagcgcgaagctcggcagaagctcgagatgatgatcaaagagctcaaactgcaaattctgaaatcatcaaaaacagctaaagaatag

SEQ ID NO: 16294 - DNA, 1530 bp, synthetic construct
  source 1..1530: mol_type = other DNA; note = Synthetic coding sequence
atgaagagaggcaggctccccagcagtagtgaggatagcgacgacaacggcagcctgagtaccacatggtcccagaacagcagaagtcagcaccgaaggtcttcttgttctcgacacgaagaccgtaaaccttccgaggtcttccgcacagatctcattacagccatgaagctccacgactcttaccagttgaatcctgacgaatactatgtcctagcagatccatggaggcaggagtgggagaaaggggtccaggtccccgtctctccaggaaccatccctcagcccgttgcgcgggtggtgagcgaggagaaaagtctcatgttcatcagaccaaagaagtatattgtatcctccggctcggagccccctgagctggggtacgtcgatattaggaccttggctgattctgtgtgtcggtacgatttaaacgacatggatgctgcgtggcttgagctgactaatgaagaattcaaagaaatgggcatgccagaattggatgagtacactatggaacgagttctggaagagtttgagcagcgctgctacgataacatgaatcacgcaatcgaaaccgaagagggccttggcatagagtacgatgaggacgtggtgtgcgacgtctgccagtccccggacggcgaggatggtaatgagatggtgttctgcgacaaatgcaatatatgcgttcaccaggcatgttatgggattctgaaggtgccggaaggctcatggctctgtcggacatgtgcactgggagtgcagcctaagtgcctgctgtgcccgaaaaagggcggggcgatgaaaccaacccggtccgggactaagtgggtgcacgtgagctgtgctctgtggatccctgaagtaagcatcggatctcccgaaaagatggaaccaattaccaaggtctctcatattccctcatcaagatgggcactggtgtgcagcctctgtaatgaaaagttcggcgcctcgatccagtgcagtgtgaagaattgccggacagccttccatgtgacgtgcgcttttgaccgcggcctcgagatgaagacaattctcgccgaaaacgatgaggtgaagttcaagagttactgccctaaacacagctcacaccgtaagcccgaggagtccctcgggaagggggctgcacaggagaacggcgctcctgaatgcagtcctcggaacccgctggaaccattcgcgtctctcgaacagaatcgggaggaggcccacagagtcagcgtgcggaagcaaaaactgcagcagctggaggatgaattttacacgtttgttaacctgttagacgtggcccgggctttaagactgcctgaggaggtggttgactttctttatcagtactggaagctgaagaggaaggtcaattttaacaaaccgctgattacaccaaagaaggatgaggaggataacttggcaaagagagagcaggatgtcctgttccgccggctccagctcttcacgcacctgagacaggacctggagagggttatgatcgacactgatacactgtag

SEQ ID NO: 16295 - DNA, 354 bp, synthetic construct
  source 1..354: mol_type = other DNA; note = Synthetic coding sequence
atggccttttcaggtcgggcaaggccatgcattatccccgaaaatgaggaaatacctcgggcagccctgaatacggtgcacgaggccaacgggaccgaggacgaacgggctgtatcaaagttgcagcgcagacatagcgacgtgaaggtatataaggaattttgcgatttttacgctaaattcaatatggcaaatgccctcgctagcgctacgtgcgagcggtgcaaaggcggtttcgcgccagcagaaacaatagtcaactctaatggcgaactgtaccatgagcagtgttttgtttgtgcccagtgctttcaacagtttccagaaggactgttttatgaggagagaacttag

SEQ ID NO: 16296 - DNA, 1110 bp, synthetic construct
  source 1..1110: mol_type = other DNA; note = Synthetic coding sequence
atgaaagatacacaagatatacaggaagcatccaaagccatgcagaacaaggtgcacgagcaggaggacaagaatgaaaaacaaaagcagagggaggacaagttgggcgtgtatagcctggtacacttctctcccaagatgctaggcagtgtagccaccaccctgcctctttccagctctaatagttctggaatgccccttggttattatctttctagtcctcaaatcagccgggtcacgatctcaaccacggggcagttgacgtccaaagcgacggtcggatcttgttctcgcgtggagaactcactcgacgcctcaccattcagcgtcccaaagaaacaggacgagagtccaatgattggtgatggagaggactatttcctgtctctgttcggggatagcaagaaactgaccgctcacagtaattacacccagaagactctgaagtattttagcatgatacttgaagaggttgggcaattcacctctagctctctgggcgatgtggagatcgccgaagtgaacgtgaagggactgtttgtgaaactcatcaatagcagcctcgataaagagatggctattggcgatcacattctccagcagaacgtcaatgggcagactatctccctgtacagattcctccccaacatagtaatgcaggccaatagcacagtcaccgctattgcctggtatacgcctattcactggaagcaggcttgggagaagctggacgccgacgtggagtttaacagatgttctgtggtgagccccacattccggaagagagtgttccagtggaccgcctccacagctacaataacaaaggaaaagcaagaccagccaaagaaggatatcagtaactaccaggtggagcaggcccaggtgctcctgaagcgcgagaaagagattcctcctaccgtgtttccaaatagatcaccttggtgccagaacccttacgtgtctgcacacccatactgccctctcatagaaccacacaacacaagcacagccggagggagactagatcggcagccaagaactaggtctaccagacctaaccgggcatcagggtccaagaaaaagaagacctctgagtcccagaaacaatag

SEQ ID NO: 16297 - DNA, 681 bp, synthetic construct
  source 1..681: mol_type = other DNA; note = Synthetic coding sequence
atggaccagagccgcgtcctcctgtgggtgaaagccgaacctttcattgtgggggccttgcaagtaccgccgcccagtaagttttctctgcactacctgagaaagatctccacttatgtacagatcagggccactgaaggcgcttatcctcgcctctactggtcgacctggagacatattgcatgtggcaagcttcagctcgccaaggacctggcctggctctactttgagatctttgactcgctgtctatgaaaacccccgaggagcgactggaatggtcagaagtactgtccaattgcatgagcgaagaggaggtggaaaagcagaggaaccaactgagtgtagacacattgcaattcctgctcttcctgtacatccagcagctgaacaaagtttcccttcggacttccctgattggtgaggagtggcctagtccacgtaataagagtcagagtccggatctcacagaaaaatccaactgtcataacaaaaactggaacgactactcacatcaagcttttgtttatgatcacctgtcagatctcctcgagttattgctggatcccaagcagcttacggcttcgttccactccacacatagtagcctcgtcagcagagaggcggtggttgctctgagctttctgatcgaggggaccatctccagggctaggaagatttag

SEQ ID NO: 16298 - DNA, 747 bp, synthetic construct
  source 1..747: mol_type = other DNA; note = Synthetic coding sequence
atgaatgaccggctgggggaggatgaatctctgctcatgaagctgtactccttcctgttgaacgatagccctctaaatccactactcgcgtcttttttttccaaggtgttaagcattctcatcagccgtaaacccgaacaaatcgtggattttctcaagaagaagcacgacttcgttgacctaataatcaagcatattggcacgtcagcaatcatggatctgctactgcgattattgacatgtatcgaaccaccccagcctcgccaggacgtactgaattggctcaacgaggagaagatcatccaaagactggtcgaaattgttcatccatcccaggaggaagatcggcactccaatgcctcccagtccctttgcgagattgtgcggctttcccgtgaccaaatgctgcaaattcaaaactctacagaacctgacttgctgctggcttcaggactgcccgaccttaacggtgtgggcccccggggactactggtcgacaacatgctgtggtctcgcctggtggtgtcattcgcaagccacggccagggcctggcgccactggtcgcccacgtggcctctgtagtctggacgtggtggctccttcacccaaccgttgcttccgttgtctggacttggtggctgttgcatcccacccaggggaactctgttctgctccatccaacagattgttgggagagggctagcggtacatttctatggggtataattctcttctgtctgagctag

SEQ ID NO: 16299 - DNA, 1869 bp, synthetic construct
  source 1..1869: mol_type = other DNA; note = Synthetic coding sequence
atggccatggcgccctcaccaagcctcgtgcaggtgtataccagcccggcggccgtcgccgtgtgggagtggcaggacggcctgggaacctggcacccctacagcgcaaccgtttgtagttttatcgaacagcagttcgtacagcaaaaggggcagaggttcgggctgggctccctggctcatagcattcctcttgggcaagctgacccatctctagctccatacatcatcgaccttcccagctggacccaatttcgccaggacactggaacaatgcgcgccgtgaggcggcacctgttcccacaacattctgcccccggcaggggggtcgtctgggagtggctgtctgacgatgggtcctggaccgcttatgaagcctccgtctgtgactacttggagcagcaagtcgcccgaggtaatcaactggtggatttggctcctctaggctacaattacacagtaaattacaccactcatacccagacaaacaaaacatcgtctttttgtaggtcggtgcgaagacaggcaggcccaccctaccccgtcaccacgattatagccccccccggacacactggggtggcctgtagctgtcatcagtgcctgagtggatcccgaacagggcctgtctccgggcgctatcgtcactcaatgactaatctgcccgcttatccagtaccccagcaccccccccacagaacagcttctgtgtttgggactcaccaggccttcgcgccttacaacaagcctagtctgtccggggccaggagcgccccacggctcaatactacgaacgcctggggtgcagctccgccttctctggggagtcagcctctgtaccgaagctccctttctcatctgggcccacagcatctaccacctgggtcgagcacatctggagcagtgagcgcctccctgcccagcggaccctcgagctcccccggctctgttcctgcaacagtccctatgcagatgcctaaaccatcccgggttcagcaggctctggctgggatgacgtccgtgctgatgtccgccatcggattaccagtctgcctttcacgagcgccgcagcccacttcccctccagcttccagactagcttccaagtctcatggatcagtgaagagacttagaaaaatgtccgtgaagggtgctactcccaaacccgagcctgaaccagaacaggtgatcaagaattataccgaggaactgaaagtgccaccagatgaagattgcattatctgcatggaaaaactcagtaccgcatccggctatagcgacgtgacagactccaaggcaataggcagcctggccgtcggccacctgacgaagtgtagccatgctttccacctgttgtgtctcctggccatgtattgtaacgggaacaaagatgggtccctccagtgcccctcgtgcaaaactatctatggagagaaaaccgggacccagccacagggcaagatggaagtgcttaggttccagatgagcctgccaggacatgaagactgcgggacgatcctgattgtatattcaattccacacggcatccaggggcctgaacatccaaatcctggcaaaccctttaccgcacgggggttccctaggcagtgctacctccccgacaatgcccagggccggaaggtgctagagcttctaaaggtggcttggaaacgccgtttgatatttaccgtgggcactagcagtactacgggggagacagacacagtggtctggaatgaaatccatcataaaactgaaatggaccgaaacatcacagggcatggctatcctgacccaaactacctgcagaacgtcctggccgaacttgccgctcagggtgtgaccgaagattgtctcgagcaacaatag

SEQ ID NO: 16300 - DNA, 4008 bp, synthetic construct
  source 1..4008: mol_type = other DNA; note = Synthetic coding sequence
atggaagagattcccgtaaaagtggccgtgcgcatccgtccgttactgtgtaaagaagcccttcacaaccatcaggtgtgcgtgcgcgtgattcctaacagccaacaagtcattataggtagggatcgtgtgttcacattcgactttgtttttgggaaaaatagtacccaggatgaagtctataacacgtgtataaagcctctcgtgctctccctgatcgagggttataatgccactgtcttcgcctatggacagaccggctcgggcaagacgtacactatcggaggaggccacatagcatctgtcgttgaagggcagaaaggaatcatccccagggccattcaagagatatttcagtcaatatccgagcacccaagcatcgacttcaatgtcaaagtcagctacattgaagtatataaagaggacctgcgtgacctgcttgaattggagacatcaatgaaagatctgcacattcgggaagacgaaaaaggcaataccgtgatagtgggggcgaaggaatgccacgtggagtccgctggcgaagtgatgagtctgctcgagatggggaatgcagcccgtcacaccggaactacccagatgaacgagcactccagccggagtcacgccatcttcaccattagtatttgccaggttcacaaaaacatggaagcggcagaagatggcagctggtactctccacgccacatagtttccaagttccatttcgtggacctagccggtagcgagagagtgaccaagaccggaaatactggcgagcgctttaaggaatcaatccaaatcaattcggggctacttgcccttggaaatgtcatatctgcattaggggacccgcgaaggaagtccagccacattccgtacagggacgccaagatcaccagacttctgaaagacagcctgggcggatcggcaaagaccgtgatgatcacatgtgtaagcccttcctccagtaattttgacgagagcttaaatagcctcaagtacgccaaccgggctcgaaatataagaaacaaaccaaccgttaatttctcgcccgagagcgataggattgacgagatggagttcgaaattaagttgctgcgcgaagcactgcaatcgcagcaagccggggtctcacaaacaactcagatcaaccgcgaggggtcgcccgacacaaataggatacactccctggaggagcaggtcgctcaacttcagggtgaatgtctgggctaccagtgctgcgtggaggaggctttcacttttctggtggacttaaaggacactgtgagactgaatgaaaagcagcagcataaactgcaggagtggttcaatatgatccaagaggtgcgcaaggccgtgcttactagcttccgcggcatcgggggtacagcctcactggaagagggcccacaacacgtgacagtgttgcagttgaagcgcgaactgaagaaatgccagtgtgtgttagccgcagatgaagtggtcttcaatcagaaagaactggaggtgaaagaattaaagaaccaggtccagatgatggtgcaggaaaacaaggggcatgctgtatctctgaaggaagctcagaaggtgaatagactgcagaacgagaaaataattgagcagcagctgcttgtcgatcaactgtccgaggaactgacaaagctcaacctgtcagttacatctagcgcaaaggaaaattgtggcgacgggcccgacgccaggatacctgaacggcgcccctatacagttcctttcgatactcatcttggccactatatctacattccttctcgccaggacagtagaaaggttcatactagtcctcctatgtacagtctggatagaattttcgccggctttagaaccagaagccagatgttactggggcacatcgaagaacaggacaaagttcttcattgtcagtttagcgacaacagtgacgacgaagaaagtgagggccaggagaaatccggcacaagatgtagaagccgaagctggatccagaaacctgattcagtctgctcccttgtggagctgagcgacactcaggacgagacccagaagtcagatctggaaaatgaggacctcaagatcgactgtctccaagagagccaggaacttaatctccagaaactgaagaactcagagcggattctgaccgaagctaaacagaagatgcgcgagttaacaatcaacatcaaaatgaaggaggatcttataaaagagcttataaagacaggaaatgatgctaaatcggtgtccaaacagtattcactcaaagtgaccaagctggagcatgacgccgaacaggccaaggttgagctcatagaaacgcagaaacaactccaagagctggagaacaaggatttaagtgacgtcgccatgaaagtgaaacttcagaaggaatttcgtaagaagatggacgcggctaagctccgagtgcaggaaattcagctgaagaccggtcaggaagaaggactgaagcccaaggctgaggatctggacgcctgtaacttgaagcggcgcaaaggaagcttcggcagcatagaccacctgcagaagctggatgaacagaagaagtggcttgacgaagaagtggagaaagtgctgaaccaaaggcaagaactggaagagctcgaggcggacttgaagaaaagggaagctatcgtgtccaaaaaggaggccctactccaggagaagagccacctggaaaataagaagctacggtcaagccaagctttgaacactgactcattaaagatcagcaccagactgaatcttctcgaacaagagctgagcgaaaaaaatgtgcagctgcaaacctcaactgctgaggaaaaaaccaagatatctgagcaggtagaagtgctgcagaaagaaaaagaccagctgcagaaacgacgacacaacgtcgatgaaaagcttaaaaacggacgcgtgcttagcccagaagaagagcacgttttattccagttggaggaggggatcgaagccctggaggctgcaatcgagtatcgaaatgagtccatccagaataggcagaaaagtctcagagcaagctttcacaatctctccagaggagaagccaatgtgctggagaagctggcttgtctaagccccgtggagatcagaactatccttttcaggtacttcaacaaggtagttaacctgcgggaggctgagcgaaagcaacaactgtacaatgaggagatgaaaatgaaggtcctggagcgagataatatggtccgcgaattagagagcgctctggatcacctgaaactccagtgcgatcgccgcctcactttgcaacagaaggaacatgaacagaagatgcagttgctgctacaccactttaaagaacaagacggggaaggtataatggaaaccttcaagacctatgaggataaaatccagcagctagagaaagatttgtatttttacaagaagacatcccgggatcacaaaaagaaactcaaggagttggtcggtgaggctatcaggaggcagctggcaccaagtgagtatcaggaggccggcgacggggtgctcaagcccgagggaggcggaatgctttccgaagagctgaagtgggccagccgccctgagtccatgaagctgtctgggagggaacgagaaatggactcatccgcgagcagcctgcgtacacaacctaatccgcagaagctatgggaggatatccctgagctcccgccaatccactcctcactggctccaccctccggacatatgcttggaaatgagaacaagactgagacagacgacaaccagtttaccaagtcacactccagactgtctagtcagattcaagttgttgggaatgtaggtagactgcatggcgtcactccagtcaaactctgtcggaaggagctgaggcaaatctctgctcttgagcttagtcttcgcagatcctcactgggcgtcgggatcggatcgatggctgccgactccattgaggtgagccgaaagcctcgtgacctgaagacctag

SEQ ID NO: 16301 - DNA, 2745 bp, synthetic construct
  source 1..2745: mol_type = other DNA; note = Synthetic coding sequence
atggaagaacgtattaccactctggagaaacggtacctggcagcacagcgcgaggcaacaagcatccacgatttgaacgacaaactggaaaacgagttagctaataaggagtcactccacaggcagtgcgaggagaaggcaagacacctgcaggaattgctcgaggtggccgaacagaagctgcagcagactatgcgtaaagccgaaacgctacccgaggttgaagcagaattagctcagaggatcgccgcattaacaaaggcggaagagcggcacggcaacattgaggagcacctgagacagctggaaggccaactggaggagaagaaccaggagctcgcacgtgtgaggcagcgggagaaaatgaacgaagaccataacaaacggctgtctgacacagttgacagacttctgtccgagagcaacgagagactgcaactccacctgaaggagaggatggccgccctggaggaaaaaaacaccctgatccaagagttggagtcgtctcagcggcagattgaggaacaacatcatcacaaagggcgtttatcagaggagattgagaaattaagacaagaggtggaccagctgaaggggcgcggaggaccgtttgtggacggagtacacagtcggagtcacatgggcagtgcggcagacgtcagattcagcctgggcaccaccacacatgcgccacccggtgtccaccgccggtattcagccttgagagaggagtcagcaaaggattgggagacttcccctctgccggggatgctggctccagctgctggcccagcttttgactctgatccggaaatcagcgacgtggacgaagacgagcccggtggactggtcggctccgcagacgtcgtcagcccctctggccatagtgacgctcaaacactggccatgatgcttcaggagcagttagatgcgatcaatgaggagatccgcatgatacaggaagaaaaagagtcaactgagctccgcgccgaagaaattgagacccgggttacctcagggtctatggaagccctgaacctcaaacagttgaggaaaaggggctctattccaaccagcctcacagcgttgagtctggcctcagcctcgccgcctctgagcggcaggagtacccccaagctcactagcaggtctgcagcccaagatcttgatcgaatgggcgtcatgaccctgcccagtgacctacgcaagcataggcgtaagctgttgtccccagtgagccgggaagaaaatcgcgaagataaggcaaccataaagtgtgagacctctcccccttcgtcacctaggacgctacgacttgagaagctgggccaccccgctttaagccaggaggagggcaagtccgccctagaggatcagggttctaatcctagctccagcaattcctctcaggattcccttcacaagggcgccaaaaggaagggcattaaatcttcaatcgggagactattcggcaagaaagagaagggacggctaatccaactttctcgagacggagccactgggcacgttctgttgaccgactcagagttctccatgcaggaaccgatggtccctgccaagttgggaacacaggccgagaaagatagaaggctcaagaagaagcaccaattgttggaagatgcacgtagaaagggtatgcctttcgcacaatgggacgggcccaccgtggtgagttggcttgaactatgggttggtatgcccgcctggtatgtggccgcttgtagggcaaacgttaaaagcggcgccattatgtcagctctttccgacactgaaattcagagggaaattggaatctctaacgcgttgcataggctcaagctaaggttggccatccaggagatggtttccctgacttcacccagtgcccccccgacgtcacgaacaagttcagggaacgtctgggtaacccacgaagagatggagaccttggaaacttcaacaaaaaccgattctgaagagggatcttgggcacagacattagcatatggcgacatgaaccatgaatggatagggaacgaatggctcccttcactgggccttccacagtacagaagttacttcatggagtgcctcgtggacgctcgcatgctcgaccacttgaccaagaaggacttacgagtgcatttgaaaatggttgacagcttccaccgaaccagcttgcaatatggcatcatgtgcctcaagcggctgaactatgaccggaaggaactcgaaaagcggcgcgaggagagccaacatgaaatcaaggacgtgctggtgtggactaacgaccaggtggtgcactgggtgcagagcattgggcttagagactacgctggaaatctacatgagtctggtgtccacggggcactgctggccttggatgagaattttgaccataacacactggccttgatactgcagatccctacccaaaatacacaggccaggcaagtcatggagcgagaatttaacaatctgcttgcgctcggtacagaccggaagcttgacgatggcgacgacaaggtcttccggcgggctccctcatggcggaagcgattccgccctcgcgagcatcacggcaggggcggcatgctaagcgcctcggccgagacccttcctgccgggttccgggtgtccaccctggggacattgcagccaccacctgccccgcccaaaaaaattatgccagaagcgcattcccattacctgtacggccacatgctctccgctttccgggattag

SEQ ID NO: 16302 - DNA, 1494 bp, synthetic construct
  source 1..1494: mol_type = other DNA; note = Synthetic coding sequence
gatgtgggcggcgacagaccttgggactcaggcaatacgcaacttccgcccagaaatcctgtgaaagccaatgcaatgttcggtgctggtgacgaagatgatactgatttcctttctccctctgggggcgcgcgattagcctcgctattcggacttgaccaggccgccgcaggccatgggaatgaattttttcagtacaccgcgcctaagcaacccaagaaggggcaggggacagctgctaccggtaaccaggccacccccaaaactgcaccagcaaccatgtctacacctacgatactggtggcgactgctgttcatgcgtatcgatacacgaatggccagtacgtgaagcagggcaagttcggcgcagccgtcttgggcaatcacacagcacgtgaatacagaattctcctgtacatatcccaacagcagccggtgacagtcgctcgcattcacgtgaactttgagctgatggtgcggcctaacaactattccactttctacgacgatcagcgtcagaactggtcgattatgtttgaaagcgagaaggcagcagtcgagttcaataagcaagtttgcatcgctaagtgtaacagcacaagctccctggacgcagtgctcagtcaagatctgattgtggccgacggccctgccgtagaggtcggagattccctcgaggtggcctacaccggctggttattccagaaccacgttctcggtcaggtttttgacagcacagccaacaaagacaaactactgagactgaagctgggctcaggaaaagttatcaaggggtgggaggacgggatgctgggaatgaagaaaggaggcaagcgacttctgatagtgcccccagcatgtgctgtgggctccgagggagtaattgggtggacgcaggctacagatagcatacttgtgttcgaagtcgaggtgcgtagagtgaaattcgcccgcgactctggcagcgatggtcacagcgtaagtagtcgcgatagcgctgccccttcccccattccgggggccgataacctgtccgccgatccagtcgtaagcccacccacctcaattccatttaagtctggagagcccgcattgcggacaaagtctaacagcctcagcgagcaactggcgattaatacctctccagatgctgtcaaagctaagctcatttctaggatggctaagatgggacagcccatgctaccaatcctccccccccaactggacagtaacgatagtgaaattgaggatgtgaacaccctgcagggcgggggccagcctgtagtcacccccagcgttcaacctagccttcatcctgcccacccagcactgccccagatgactagtcaggccccccagccctcagttactgggctgcaggccccgtctgcagcactgatgcaggtatcatccctagattcccactccgccgtttccggaaacgcccaatcgttccaggttaccttttacaacagaattaattacattctctag

SEQ ID NO: 16303 - DNA, 462 bp, synthetic construct
  source 1..462: mol_type = other DNA; note = Synthetic coding sequence
atgaatctcgccgaaatttgtgacaacgcaaaaaagggacgcgagtacgctctgctgggcaactacgatagcagcatggtttactaccagggggttatgcagcagattcagcgccactgccagagcgtgcgggaccccgcaataaagggaaagtggcaacaggttagacaagagcttcttgaggaatatgaacaagtgaaaagtatagttagtaccctggagagcttcaagatagataagccccctgattttccagtcagttgtcaggatgaacctttccgagacccggctgtgtggccaccacccgtgccagccgaacatagagctccaccgcagatccgcaggcctaatcgcgaagttcgcccccttaggaaagaaatggccggagtgggcgcccgcggccctgtgggaagggctcatcccatcagtaaatccgagaagccatccacatcacgagactag

SEQ ID NO: 16304 - DNA, 627 bp, synthetic construct
  source 1..627: mol_type = other DNA; note = Synthetic coding sequence
atgttccaggttccagactctgagggaggaagagccggatcccgggctatgaaaccacccggcggagagagcagtaatctcttcgggtcacccgaggaggcaacaccaagcagccggccaaacagaatggctagcaacattttcggtcccacggaggagcctcaaaatatcccaaaaagaactaacccaccaggtggcaaaggcagtggcatcttcgatgagtcaacgcctgtgcagaccagacagcacctgaaccctcccggagggaagacttcagacatcttcggttctcctgtaaccgctacctctaggctggcccatccaaataagcccacgcgaaactcccgagatcgggtagcgatgttttcgttcccgtttgcccagatgagcggagtcggaagaggtctggtgctctgcgagcccggttgctccgcgtcaccaggtcgtcatgatagctgtctggaaacaagggcgtttcagatggccggcagatgcctttgcggggacgagatgggacacccatggcccagcctgatgtgcagtcccggccttcgaggcacagggcgtggagttagagtgggtcggtggggacgcgcatggagtctggatcaacaacccgcaagttag

SEQ ID NO: 16305 - DNA, 591 bp, synthetic construct
  source 1..591: mol_type = other DNA; note = Synthetic coding sequence
atgcccttttctaaagagaagtacatcctggacagtagcccagagaagttgcacaaagagttggaggaggagctgaagctgtctagcacagatctacggtcacacgcatggtaccacgggcgaatcccccgagaagtgtctgagacgctggtccaaagaaatggcgacttcttgataagggactcactgactagcctcggggactatgttctcacttgtcgatggagaaaccaggcactgcattttaagataaacaaggtggtggtgaaggcgggagaatcatacacacatattcagtacctgtttgagcaggagtctttcgatcatgtgcccgctctcgtgaggtaccacgtcggctcaaggaaggcagtgagtgaacagtcaggagccatcatatactgccctgtcaaccggacattccctctccggtatttggaagcctcctatggattaggccagggctctagcaaaccagccagtcctgtatccccaagtggccccaagggtagtcatatgaagagacgaagcgttacaatgacggacggcctgacagccgacaaagtcacaaggagcgacggttgtcctacttag

SEQ ID NO: 16306 - DNA, 1986 bp, synthetic construct
  source 1..1986: mol_type = other DNA; note = Synthetic coding sequence
atgcaggctaatggtgccgggggggggggagggggagggggaggcggagggggaggcggaggaggaggaggcggacagggccaaaccccagaactcgcgtgcctatctgcccagaatggagaatcttcaccctcatcttccagcagcgccggagatctggcacacgcaaacgggctgttgccctctgctccctccgcagcctctaataactcaaatagcctgaatgtaaacaacggggtgcctgggggcgcggccgccgcttccagtgcaaccgttgctgccgccagcgcaaccaccgctgcatcttcttcactcgcgacgcccgaactggggtcctcactcaagaagaagaaacgcctctctcagagtgacgaggacgtcataagattgataggacagcacctgaacggactcggcctgaatcagacagtcgacctattaatgcaggaatccgggtgtcgcctggagcatcccagcgcgaccaaattcaggaatcatgtgatggaaggcgactgggataaggcggaaaacgatctgaatgagctgaagcctctcgtgcactcaccacacgccatagtcgttaggggagctctcgagatcagccaaaccctgctgggcatcattgttaggatgaaatttttgctcttgcagcagaagtatctggagtacctggaagacgggaaagtgctcgaggctctgcaggttctgcggtgtgaactgacacccctgaagtacaatacggagcgaatccatgtcctctcagggtacctgatgtgctctcacgccgaggatctgagggcaaaagccgaatgggaaggtaagggcaccgcgtccagaagtaaactgctggataaactccaaacttatcttcctccatccgtaatgctccccccgcggagactgcaaaccctgctccgacaagccgtcgaacttcagcgcgaccgctgtttataccataacactaaattggacaataatctcgactcggttagcctactgatagaccacgtctgttcacgcaggcagttcccgtgctacacccagcagatccttacagagcattgcaatgaggtatggttttgcaaattttccaatgacggaactaagttagccacgggctctaaagacactaccgtgataatctggcaggtggaccccgatactcatttgttgaagctcctcaagactctggaagggcacgcctatggcgtatcatatattgcctggagtcctgacgacaattacctggtggcatgcgggcccgatgattgttctgaactgtggctctggaacgttcagacaggagaactgagaacaaaaatgagccagtcccacgaggacagcttgactagcgtcgcctggaatcctgacggcaaacgatttgtgacaggtggacaaagaggccagttctaccagtgcgatctcgatggcaacttgcttgattcttgggagggagtgagagtccaatgtttgtggtgcctgagcgatggaaagactgtgttagccagcgatacgcaccaacggattaggggctacaattttgaagatttgacagatcggaacatcgtccaggaagaccatccaattatgtcgttcacgattagcaaaaacggccgcctcgcgcttctcaatgtggccacacaaggagtccacttatgggatctccaggatcgtgttctggtacgtaagtaccagggggtcacccagggcttttacaccattcatagctgtttcggcggtcataatgaagattttatcgctagtggatccgaggatcacaaggtctacatatggcataaacgatcagaactcccaattgcagaactgactgggcatactagaactgtgaactgtgtctcatggaacccgcagattccgtccatgatggcaagcgctagcgatgacggcacagtgagaatctggggccctgcaccatttatcgaccatcagaacattgaggaagagtgcagctctatggatagttag

SEQ ID NO: 16307 - DNA, 1113 bp, synthetic construct
  source 1..1113: mol_type = other DNA; note = Synthetic coding sequence
atggagaagaagaaaatggtgactcagggtaaccaggagcccactaccacacctgacgccatggttcagcccttcacgactattcccttccctcctccccctcaaaacggtattcccactgaatacggggtgccacacacccaggactacgccggccagacaggcgagcacaacctgaccctttacggcagcacccaggcgcacggcgaacagtcctccaacagtccatccacgcagaacgggagtctcaccaccgaggggggcgctcagaccgatgggcagcagagtcagacgcaatcttccgagaactcagaatctaagtccactcccaaaagactgcatgtctcaaatatcccttttcgctttcgggatcctgatctgagacagatgtttggacagtttgggaagatcctggatgtcgaaattatctttaacgagagagggagcaaaggattcggttttgttactttcgagaattccgctgacgcagacagggctagagagaagcttcatgggaccgtggtggagggtcgaaagatagaagtaaacaatgcgacagccagagtcatgaccaacaaaaagatggtgaccccctatgccaacgggtggaagctgtccccagtggtgggcgcagtgtacggacccgaactctacgccgccagttcttttcaggcagacgtgagtttaggcaacgatgcagcggtacctttgtccggacgagggggaattaacacatatatccccctgatttcgcttcctcttgtgccggggttcccttaccctaccgccgccaccacagctgccgcgttccgaggagcacatctgcggggtcggggccgcactgtgtacggggccgtgcgggccgtgccacccaccgcaatcccagcttatccaggggtggacatgcagcccacagacatgcactccctccttctccagcctcaacctccgctccttcagccactgcagcctcttactgtcactgtgatggcaggctgcacccagccaacccctaccatgcctcttcccctgccgctggcgatggagctggctttgtggagggtgtatacagaagtcgctaccgcggatctgccgcccacagaagtcacctag

SEQ ID NO: 16308 - DNA, 348 bp, synthetic construct
  source 1..348: mol_type = other DNA; note = Synthetic coding sequence
atgccgcacctccctctcgcctctttccgaccccccttctggggactgcgtcattctcggggactgcccaggtttcacagtgtgtcgacccaatctgagcctcatgggtctccaatctccaggcgcaatagggaagctaagcagaagcgtctgcgggagaagcaagcaactctcgaggcggagattgccggagagagcaagagcccagccgagagtattaaagcatggcgcccaaaggagcttgtgttgtacgagattcccacaaaacctggcgagaagaaagatgtgagtggccctcttcccccagcctattctcctcgctatgtggaagccgcctggtatccctag

SEQ ID NO: 16309 - DNA, 3039 bp, synthetic construct
  source 1..3039: mol_type = other DNA; note = Synthetic coding sequence
atgttgctaaagtccatcttcattgtgtatatctttttttactcaatcagcgagctctcactggactctacacttcatgccgtcaacctgcattgtaacaacatcagcaaaatcgaggcgatcgaccacatctggaatctccagcacctagacctgagttccaaccaaatcagccggatcgagggactcaatacattgaccaagctttgcacccttaacctcagttgcaacctcatcactaaagtggaaggcctggaggagctcatcaatcttacgagactgaacgtgtcctacaaccacatcgacgacctatccggcctgatacctctccatggaatcaagcacaaacttcgctacattgacctccattctaatcgcatcgacagcatccaccacctactacaatgcatggtaggacttcattttctgaccaacctgatcctcgaaaaggacggggatgataaccctgtgtgtcgcctgccaggctatcgagccgtgattttacagactttgccgcagcttcgtattttagactgtaaaaacatctttggggagcccgtgaatcttacggagatcaactcctcccagctgcagtgtttagaggggctgcttgacaacttagtatcttctgattccccattaaatattagcgaagacgaaatcattgacaggatgccggtaatcacagctcctatcgatgagctcgttcctctggaacagttcgcttccactccatcagacgccgtgttaacgtcatttatgtccgtctgccagtccagcgaacctgagaagaacaaccatgaaaacgatctgcagaacgaaatcaaattgcagaaactcgatgaccagatcctgcagctcctgaacgagacatctaatagcatagataatgtactggagaaagaccccagacccaaacgagacacagatatcaccagtgaatctgattacggtaaccggaaggaatgcaatcgtaaggtgccacgccggtcaaaaattccttacgatgccaagaccatccagacaattaagcaccacaataagaactacaatagctttgtgagctgtaatcggaagatgaaacccccttatctgaaagagctgtatgtcagtagtagtttagcaaattgtcctatgttacaagaatctgaaaagcctaagaccgaaattattaaagtggaccagagccactccgaggacaatacctatcagtcgctcgtggaacagttggaccaagagagggaaaagagatggagggcagaacaggccgaaaataagctcatggactatatcgacgaattgcacaagcacgcgaatgaaaaagaagatatacatagcctcgccctgctgactaccgataggctcaaggagatcatctttagagagaggaacagtaaggggcagctggaggtcatggtccacaagctgcaaaatgaaattaaaaagctgacagtcgaactgatgaaagcgaaagaccagcaggaggatcacctgaagcacctgcgaacgctggagaagaccctggaaaaaatggaacgccaaaaacgacaacagcaagctgcacagattcgcctgatccaggaggtggagctgaaggcctcagctgcggaccgcgaaatctatctgcttaggacttcactgcaccgagagcgggaacaggcccagcagctccaccagctgctggctttaaaggagcaggagcaccgcaaggagctggaaacaagggaatttttcaccgatgctgacttccaggacgccctcgcgaaagagatcgcgaaggaagagaagaagcacgagcaaatgattaaggagtatcaggaaaagatagacgtgctctcgcagcagtacatggacctggagaacgagtttaggattgctctaaccgtggaggcccgacgcttccaagacgttaaggacggattcgaaaatgttgcaacggagctcgcgaagagcaagcacgctctaatctgggctcaaagaaaggaaaatgaatcatcatcgcttatcaaggatctgacatgtatggtgaaggaacaaaaaactaagctggcagaggtgtccaaattaaagcaagagactgctgctaatcttcaaaaccagattaacaccctggagatacttattgaagatgataaacaaaagtccattcagatcgaactgttgaagcatgagaaggtgcagctgatttccgaactcgccgccaaggagagcctgattttcgggctccgcaccgaacggaaggtttggggacacgaactcgcccagcagggatctagtctggcacagaaccggggaaagctcgaagcccagattgaatctcttagccgcgagaacgagtgcctgcggaaaacaaacgagagcgattctgacgcccttaggatcaagtgcaaaattatcgacgaccagacagagacaatcagaaaactaaaggattgtctccaggaaaaggacgagcacattaaaagactgcaagagaaaatcaccgagatcgagaaatgtacgcaggagcagctggatgagaagtcctcacagctcgatgaggtgctagagaaactcgagagacacaatgaaaggaaagagaagctaaagcaacagctgaaaggcaaagaggttgagctggaggagataaggaaggcatactcaaccctcaaccggaaatggcacgacaaaggtgaacttctttgtcacctcgagacgcaggtcaaggaggtcaaggagaagtttgagaacaaagaaaagaaattaaaggctgaacgcgacaagagcattgaattgcagaagaatgcgatggagaaactgcactccatggacgacgcctttaagcgccaggtggacgcaattgtggaggctcatcaagcagagatcgcgcaactggccaatgaaaaacaaaagtgtatagactctgcaaatctgaaagtgcaccaaatagagaaggagatgcgagagttgctagaggaaacgtgcaagaataaaaagaccatggaggcaaagatcaagcagctggctttcgccctgaacgaaatccagcaggatatgtag

SEQ ID NO: 16310 - DNA, 4665 bp, synthetic construct
  source 1..4665: mol_type = other DNA; note = Synthetic coding sequence
atgtctgcgacgtcttggtttctggtctcttcctcgggagcacggcaccgcctgcctcgggagctcatattcgtgggccgagaggaatgcgaactgatgctgcaatctaggagcgtcgacaagcaacacgcagtaatcaactacgaccaggacagagatgaacactgggttaaggacctcgggtcgctcaatgggacgtttgttaacgacatgaggatacccgaccagaagtatgtgaccttaaagctgaacgacgtcatccgttttgggtacgactccaatatgtatgtgctcgagagagtacagcatagggtccccgaagaggctctcaagcacgaaaaatacacctcccagctccaggtgtctgtcaaggggctggcaccaaagcggtccgaggccttacctgagcacactccttactgtgaggcctcaaacccacgccctgaaaagggcgaccgccggcccggcacagaggctgcctcataccgtacacctttgtacggtcaaccctcatggtggggagaagatgatgggtctaccctgccagacgcccagaggcaaggggaaccttatccagagcggcccaaggggccggttcagcaagatggcgagcttcatggttttagagcacctgcagaaccgcaaggctgcagtttcaggagagaaccttcctatttcgaaatcccaactaaagaaacgccacagccatcccagccccccgaggtgcccgcgcatgagatgccaaccaaagatgcggaggccggagggggtggggccgcgcctgtggtccaatctcacgcatcttttactatagagtttgacgactgttctcccggaaagatgaaaatcaaagaccacattaccaagttcagccttcggcagcgccggcctcctggtaaagaggccacaccaggagagatggtcagcgctgagacaaaggtggccgactggctagtgcaaaacgatccatccctgctccatagagtggggcccggcgatgacagacatagtactaagagtgacctgcccgtgcatacgcgaactctgaagggacacaagcacgaagatggaacgcaaagcgactcagaagaccctttagcaaaggccgcctcagccgccggcgttccgctagaggcctctggcgagcaagtccgcctgcaaagacagataaaacgggatccgcaggagctgctacataatcagcaggcatttgttatcgagtttttcgacgaagacacccctcggaagaagcgctctcagagtttcacccattcccccagcggggacccgaaagctgataagaggcgaggtcccacccctgcagatcgcgaccgaccatctgtacctgcaccagttcaggcgggcggtcggagttctggtccacaacgagcgggctctttgaagagagaaaagaccgaagaacggttaggaagcccgtccccagcatcaaggactcctgcccgtccatttgggtcagtgggccgcagaagccgactggcccaagattttatggcgcaatgcctacgggagagctctccagccgcgcgcccgagtcctgaaaaggtccctccagtgctgcccgctccgttgacacctcacggtacaagtcccgtgggccctcccacgcctccaccagccccgaccgaccctcagctgaccaaggccagaaagcaagaagaggatgacagcctctccgacgctggcacatacaccattgaaactgaggcccaggacaccgaggtggaagaagcgagaaaaatgatcgatcaggtgttcggagtgctcgaatcccccgagcttagcagagccagttcagctaccttccggcccgtcatcagaggcgatcgggatgagagcgatgacggcggcgtggcgcaaagaatggcactgctgcaggaatttgcttcccggccactgggtgccgccccacaagccgagcaccagggactcccggtgcctgggagccccggcgggcagaagtgggtgtcccggtgggcatcgctggccgatagctacagcgatcccggcttgactgaggacggattgggacgaagggggggggagcctgagggatcgttacctgttcgtatgaggagacggctgccgcagctccctagtgagagggcagattcacccgcgggacctgagtcgtccaggcgatccgggcctggtccccccgaattggattccgaacaaccctcccggctgttcggccaggaagagctggatcctgattctctcagtgacgctagcggttccgatggcgggcgcggccctgaaccaggagtggagccccaggactcaaggcgtcggagtcctcaggagggccccacatggagccgcggcaggcgaagccccagagcccccggtgaaccgaccccagcgtcattcttcatcggagatcagaacggggatgctgtactgagtcgcaaacccctagccgcacctggggatggtgagggactaggccagacagcccagccatcacctcctgcaagggatggagtgtacgttagtgcaaacggaagaatggtgatccagctgagaccaggccgatcgccagagccggatggccctgcccctgcattcctacgacaggaatccttcacaaaagaacccgccagcgggccccctgccccgggaaagcctcctcacataagcagtcacccactgctgcaagacttggctgccacacgcgccgcaaggatggattttcatagccaggatacgcaccttatccttaaggagactgagaccgcactcgcagccttggaggcgcgtctgctgtctaactccgtagacgcagagtgcgagggaggtagtacgcctcggcctcccgaggacgcccttagtggcgactcagacgtggacacagcgagcaccgtttccttaagaagcggaaaatccggcccgtcccctaccaccccccaaccgctgcgcgcccaaaaagagatgtctccctcacctcccgctgcccaggatcccggcgggactgctctggtttctgcacgtgaacagagcagtgagcgacagcaccaccctcttggcccgaccgacatggggagaggagaaccagtgcggcggtctgcaatcaggaggggacatcggccacggggatccctggattggccctccgaagaaaggggccccgtgctggcccacctgcctagcagcgacgtgatggcgtcaaatcatgagacaccagaggctaccggcgccgggcgcctcgggtctcgtagaaagcctgccgctcctcctccctctccagcagcaagagaggagcagtccagatcgtctgcctcaagccaaaaaggacctcaggcacttacacgctccaattctctgagcactccacgccccacccgggctagccggctgcgaagagcacgtttgggcgacgcaagcgacacagaggccgccgacggcgagcggggcagcctgggcaaccctgagcctgtagggcgccctgctgccgagcaggccaagaagctgtctagactagatatcttagctatgcctagaaagagggcaggaagcttcacaggaacgtctgatcctgaagccgctcctgcacgtacctccttctctggcaggtccgtggaattgtgctgcgctagcagaaagccaacaatggcagaggcgcgggccgtttccaggaaagccgcaaacaccgctaccacgaccgggcccaggcagcctttcagtagggcccgcagcggtagcgccagatacacctcaacaacacagacgcctcgggcaggtagcagcagccgagcccgctcccgcgcgcctggacccagggacactgacgatgacgaagaagaacctgacccttacggattcattgtccagaccgccgagattgctgaaattgcccgactttcccagacactcgtgaaggacgtggctatcctggcgcaggagattcatgatgtcgccggagatggtgacaccttaggctcttcagaacccgctcacagcgctagccttagcaacatgccgagtacacccgcttccactatttctgcccgtgaggagttggtgcagcggatccctgaggccagcttgaacttccagaaggtgcccccgggcagtcttaactcccgcgacttcgatcaaaacatgaatgactcatgcgaggatgccctcgccaacaaaactcggccaagaaatcgcgaagaggtgattttcgataacttaatgcttaatccggttagccagctttcgcaagccattcgtgaaaacactgaacaccttgcggagaagatgaaaattctctttcaaaatactggcagggcgtgggaagatttagaggcccggattaatgcagagaacgaggtcccaatcctgaaaaccagcaacaaggaaatcagttccatccttaaagagctgagaagagtccagaaacagctggaggtcatcaacgcaatcgtggatccctcaggctcgctggacttgctaaccgggaacagaagtcttgcctccagtgcgcaacccgggctgggcaaagggcgagtcgcagcccagagtccaccgtcccccgcctctgccgaggctctcttgcctgcacttcctttaaggaactttcctcagagggccagctgtggcccccctagcttgccagacccgacattcctgcctgacgccgaacggttcctgatctag

SEQ ID NO: 16311 - DNA, 696 bp, synthetic construct
  source 1..696: mol_type = other DNA; note = Synthetic coding sequence
ataatcctcctcctagtaccctccgaggaaactgatgagaacgaccttattctcgaagtgacagcaggggtcgggggagggttgcggcatgctagcgcctctatcggcggaagtgaagcttacagacacatgaagttcgaggggggagtgcacagagtccaacgggtgcccaaaacagaaaagcaagggcgggttcataccagcaccatgacggtggcaattctgccacagccaaccgagattaatctggtgatcaacccaaaagacctgaggattgacacgaaacgcgcatcgggagccggcggccaacatgtaaacacgaccgactcggcggttaggatagttcatttacccacaggggtggtgtctgaatgccagcaggaacgctcccaactgaagaacaaggaattggccatgaccaagctgcgtgctaagttgtactcgatgcatctggaagaggagatcaataagcgccagaatgccagaaagatccaaattggcagtaaggggaggtccgagaagattaggacgtacaatttcccccagaatagggtgaccgatcatcgcatcaacaaaaccctgcatgatctcgaaacatttatgcagggcgactacctgcttgatgagttggttcagtccctgaaagagtacgcggactacgagagcttggtggagataataagccagaaagtctag

SEQ ID NO: 16312 - DNA, 483 bp, synthetic construct
  source 1..483: mol_type = other DNA; note = Synthetic coding sequence
atggaggcagagcggccccaggaggaggaagatggcgagcaaggcccacctcaggatgaagagggctggccgccgcccaattccacgacacgcccctggagaagcgcgccgccctcacctcccccgccgggaacgaggcacaccgcacttgggcccaggtcagccagcctcctcagtcttcaaactgagctgctactcgacctcgtagccgaggcacagtcccggcggctagaggaacaacgggccaccttttacacacctcaaaatccttctagtcttgctcccgcgcccttgagacctctggaggacagagagcagctttatagcactattctgtcccatcagtgccagcggatggaggcccagcgatcagaaccacccttaccccctggtggtcaagaacttttggagctgcttctgcgggtgcaaggtgggggaaggatggaggaacagcgtagtcgcccccccactcacacatgctag

SEQ ID NO: 16313 - DNA, 423 bp, synthetic construct
  source 1..423: mol_type = other DNA; note = Synthetic coding sequence
atgcagtttggtgagttgcttgcagctgtgcgcaaagcacaagccaatgtcatgttattccttgaagagaaggaacaagccgcgctctcacaggctaacggcatcaaggcacacttagaatacagatctgccgaaatggaaaagagcaaacaggaactggagactatggctgcaatctctaatactgtgcagtttttggagatgtgcatgaccagtcggtcaacacggacccagcataccagcatctccggttgtcgacggagaactgctcggagtccaactcctcgacccggctctatccccacaagaacctcccctgccggctcatgtaccggaggtagatgctgcccctcacgcgtgtgtacttgtaccggaactatcctgcgatggcgcagttcaggtcaggctccaatgctagcttag

SEQ ID NO: 16314 - DNA, 819 bp, synthetic construct
  source 1..819: mol_type = other DNA; note = Synthetic coding sequence
atggccagctccaatacagtgctaatgcggctcgtagcctctgcctacagcatcgcccaaaaggccggcatgatcgttcggcgagtaatagccgagggagacctgggcattgtcgagaaaacttgtgctactgacctgcaaactaaagcagatcgtctcgctcagatgtccatctgtagttcactggcacgcaagtttccaaagttgaccatcattggcgaagaactggtcgtgtgggtggaccctctagatggaacgaaagaatacaccgaagggcttcttgataatgtcacggtccttatcgggatagcatatgaagggaaagctatcgctggagtgatcaaccaaccttattacaattatgaggcagggcccgacgccgtgctcgggcgtactatctggggtgtgttaggcctgggcgctttcggattccagcttaaggaagttcccgcgggaaagcatatcatcacaacgacacgcagccattctaataagctggtgaccgactgcgttgctgccatgaatcccgacgctgtcctcagggtcggaggagctggaaacaagattatccagctgattgaggggaaagccagtgcgtacgttttcgcctccccaggctgcaagaagtgggatacatgtgctcccgaggtaattctgcacgctgtcggcgggaagctgactgacatccacgggaatgttcttcagtatcacaaggatgtgaaacacatgaactctgccggcgtcctggcaacactgcgcaactatgactattatgcctcgcgagtgcctgaaagcatcaagaacgccctggtcccttag

SEQ ID NO: 16315 - DNA, 606 bp, synthetic construct
  source 1..606: mol_type = other DNA; note = Synthetic coding sequence
atggaaagtaaccacaagagtggggacggtctgagcggtacccaaaaggaggccgctctgcgagccctcgtgcagcggaccggttattctttggtccaggagaatggccagcgtaaatatgggggacctccacccgggtgggatgccgcaccccctgaacgcggatgtgagatctttataggtaagttgcctagagaccttttcgaggacgagttaatcccattgtgcgaaaaaatagggaagatatacgagatgaggatgatgatggactttaatggaaacaatagaggctatgccttcgttacattctctaacaaagttgaagccaagaatgccataaaacagctaaacaactacgagatccgcaatggccgacttctgggggtttgtgctagtgttgacaactgcagactgttcgttggaggcatacctaaaacaaagaaacgggaagagatcctgtctgaaatgaagaaagtcaccgagggcgttgtggacgttattgtgtatccgtccgcagccgacaagaccaagaaccggggctttgccttcgttgaatatgagtctcacagagccgcggctatggccagacggaaacttctgccatag

SEQ ID NO: 16316 - DNA, 1905 bp, synthetic construct
  source 1..1905: mol_type = other DNA; note = Synthetic coding sequence
atggctctgtccaagcgcgaactggatgaactaaagccatggatcgagaagaccgtgaagcgcgtgttgggcttctcagagccaactgtcgttacggctgcactgaattgcgtggggaagggcatggataaaaagaaagctgcagatcacctaaaacctttcttggacgattcgacactgcggtttgtagataagcttttcgaggccgtggaggagggacgatcctcacgacactccaagtctagcagtgacaggtctcgaaagcgggagttgaaaataaagcagatgatggaagccgcaacgcgccaaattgaagagagaaagaagcagctctcctttatctcaccccccaccccccagcctaaaacgccttcctctagccaaccagagagattaccaatcggcaataccatccaaccatcccaggcggctacattcatgaacgatgccattgagaaggctcgtaaagcggctgagctgcaggctcgaatacaggcacagctggcactcaagccaggtctgataggcaacgcgaatatggtcgggttggccaatcttcatgctatggggattgcaccgcctaaagtcgagctgaaggaccaaacaaaacctactcccctgattcttgatgagcaggggcgcacagtggacgcaaccggcaaggaaatcgagttgacccaccgaatgcccaccctcaaggccaacattcgggctgtgaaaagggaacagttcaagcaacagctaaaggaaaaacccagtgaggatatggaatcgaacactttcttcgatcccagggtcagcatcgcgcctagccagcgacagcgcaggacattcaaatttcatgataagggcaaatttgaaaaaattgcacagcggctcagaaccaaagcccagttggaaaagctccaggccgaaatttcccaggcagctcgcaagactggtattcatacgtccacgcgactggcgctcatcgcaccaaagaaggaactcaaggagggcgatattccggagatcgaatggtgggacagctatataattcctaacggatttgacctgactgaggaaaatcccaagagagaggactacttcggcatcaccaacctcgtggaacaccctgcacaactgaatcctcctgtcgataacgatacgcccgttactctcggagtgtatctcacgaagaaagagcagaaaaagctgcgtcgtcagactcgccgcgaggctcagaaggagctgcaggaaaaggtgcgcctcggtctaatgcctcctcctgagcccaaggtgagaattagcaacctgatgagagtattaggcacagaggctgtccaagatcccaccaaagtagaggctcacgtgcgcgcccagatggcaaagcgtcagaaagcgcacgaagaggccaacgcagcccggaaactgaccgctgaacagcgaaaagttaaaaaaatcaagaaactaaaggaagacatctcacagggcgttcacataagtgtgtacagagtaaggaacttatccaaccccgccaagaaattcaagatagaagccaatgcaggccagctgtatcttacgggcgtcgtggtgctgcacaaggacgtcaacgtagtagtagtcgaaggcggcccgaaggctcagaagaaatttaaaagattaatgctccatcgaattaaatgggacgagcagacaagtaatactaagggggatgatgatgaggagtccgatgaggaagcggtgaaaaaaaccaataaatgtgttctggtctgggaaggcaccgcgaaagatcggagctttggagaaatgaaattcaaacagtgccctactgaaaatatggctagagaacactttaaaaaacacggagcagaacattattgggacctcgctttgtccgagtcagtcctcgagagtactgactag

SEQ ID NO: 16317 - DNA, 3192 bp, synthetic construct
  source 1..3192: mol_type = other DNA; note = Synthetic coding sequence
atgccacatctgcctctagcatctttccgccccccattctggggcctgcgccacagtcgcgggctgccccggttccacagcgtgagcacccagagtgagccacacggctctcccatctcccggcgcaacagggaagccaagcagaaaagactccgcgaaaaacaggccactcttgaagctgagatcgccggtgagtctaaatcaccagccgaaagcatcaaagcttggaggccgaaagagctggttctctacgagattccaaccaaaccaggtgagaaaaaggacgttagcgggcctctacctccagcctattctccacgatacgtggaggcggcctggtatccctggtgggtgagagaggggtttttcaaacctgaatatcaggcccggctcccccaagcaactggggagacctttagtatgtgtatcccacctcctaacgtcaccggttccctccacattgggcacgcgctgacagtcgcgatccaggatgccttagtgcgatggcataggatgcggggcgatcaggttctatgggtgcctggtagcgaccacgcaggaattgccacacaagctgtcgtggaaaagcagctttggaaagagaggggagtgagacggcacgaactgtccagagaggccttcctgagagaggtgtggcagtggaaagaggctaagggaggggagatctgtgagcagctgagggccctaggggcttctcttgactgggacagagaatgttttactatggacgtgggcagttcagtcgccgtaactgaagcatttgttcgcctctacaaagcgggtcttctttatcgaaatcaccagctggtaaattggagctgcgctctgcgtagtgccatctccgatatcgaggtggagaataggcccctgcctggacacacccagctacgactgcccgggtgccccacacctgtctcttttggattactgttttcagtggcgtttcccgtcgatggggagcctgatgctgaggtcgtcgtgggtacaactcgccccgagaccctgcctggtgacgtggcagtggctgtccatccagatgattctagatacactcatctacacggccgacagcttcggcatcctcttatgggacaacccctacccctgattactgactacgcagtccagccccatgtgggtaccggcgcagtcaaagtgactcctgcccactccccagccgatgctgagatgggggctagacacgggctaagtcctcttaacgtgatcgccgaggacgggactatgactagtctctgtggcgactggcttcagggcctgcacagattcgtggccagggagaagattatgtctgtgctctctgagtggggactgttcagagggttacaaaatcatcccatggtactgcccatctgctccaggtcaggcgacgtgatcgaatatctactgaagaaccagtggtttgttcggtgtcaggagatgggtgcccgggccgctaaggctgtggagagcggagctttggaactgagtccctcattccaccagaagaactggcagcattggttcagtcatatcggagactggtgcgtatccaggcaactgtggtgggggcaccaaatcccagcatatctggtggtggaggaccatgctcaaggcgaggaagactgttgggtcgtgggacgttctgaagccgaggctagggaagtcgcggcggagctaaccggacgcccaggtgccgagctgacactggagcgggaccccgacgtgctggacacttggttctcatcggcactttttccattttccgcgttgggatggccccaggaaacaccagacctggcgaggttttacccgttgtccctcctcgagaccggatccgacctcctgctgttctgggtcggacgaatggtgatgttaggaacccagctgactggtcagcttccattctctaaagtgctgttacaccccatggtgcgcgaccggcaaggcagaaagatgagcaaatctttgggaaacgttctggacccccgcgatatcatctctggcgtggaaatgcaggtgctccaggaaaaattacgctccggcaatctggaccctgctgaactggccatcgtagccgcagcccaaaagaaggacttcccacacggcatccccgaatgcggcaccgacgcgttacgttttaccctctgttcccacggtgtgcaggcaggagatctgcacctttctgtgtctgaggttcagagctgccgccatttttgtaataagatctggaatgcccttcgattcatcctgaatgctcttggtgaaaagttcgtgccgcagcccgcagaagagttgtccccctcttcccctatggacgcttggattctctcgagactggcgttggccgcacaggagtgcgaacgcggtttcttaaccagggaattaagccttgtgacccatgccttgcaccacttctggctccataatctgtgcgatgtctatctggaagccgtcaaacccgtgctctggcattcccctcgccctctgggaccgccccaggtgttattctcgtgcgctgacctgggcctgaggctcctcgctccccttatgccatttctcgctgaggaattatggcaacgcctgccccctcgccctggctgtcctcccgccccctctatcagtgtcgcgccttaccctagtgcatgtagtctggaacactggcggcagccagagttggagcggaggttttcccgcgtgcaggaagtagttcaggtgcttcgggctttgagggccacgtatcaactgactaaggcccggccacgtgtcctgctgcagagcagcgaacctggtgaccagggtctttttgaagccttccttgagcctctaggaactctgggctattgcggagcagttggtctgctaccgccaggcgcagctgccccatccgggtgggcacaggcccccttgtctgacacggcccaggtttatatggagttgcagggtctggtagatccacaaatccagcttccactgctagcggctcgaaggtacaagttacagaaacaactggattccttgacggcccgtaccccctccgagggtgaagctggtactcagcgtcagcagaagttgtcctctctacagctggagctcagcaagctagacaaagctgcgagccaccttcgccagctcatggatgagccaccagccccaggatctccagaactctag

SEQ ID NO: 16318 - DNA, 2118 bp, synthetic construct
  source 1..2118: mol_type = other DNA; note = Synthetic coding sequence
atgatcgacagcgtgaagttgcgacgcgatagtgcagctgacttttttagtcactatgaatatctgtgtgccctacagaatagtgtgcccctgccagccgtgagagcctgtcttcgtgaaggcgtcctcgactttaatgcagatcggctgcggggggttgattgggccccattactgtctaccctaaagataaataaggatctcccactggtgtcaatcaaatccttctttcagccctggctgggcgacacgggatctgacatgaacaagttttgcagatctcgcgttcctgccatacggtacaaggatgttactttccagttgtgtaaagccctcaagggttgcctgtcaatcagcagcgttttaaaaaacctggagctgaacgggctcatactcagggaacgggacctaactatcctggctaaaggcctgaataaaagtgcatctctggttcacctctcactcgcaaattgcccaatcggcgacggaggcctggaaatcatatgccagggcataaagagcagcatcacccttaaaacagtgaacttcaccggatgtaacctgacctggcagggtgcagatcatatggccaaaatactgaagtaccaaacgatgagacgtcatgaagaaacctgggcagagagtctgcgttaccggagaccagaccttgattgtatggctggactgcgaagaatcacactgaactgcaacaccctcatcggggaccttggggcatgcgcattcgccgactcactatcagaggacctgtggctccgtgccctcgacctgcaacagtgcggcctgacaaatgagggtgctaaagcactactggaagctcttgagacgaataccaccctggttgtcctggacattagaaaaaacccactgattgaccactctatgatgaaggccgttataaagaaggttcttcagaacggccggtccgctaaatcagaataccaatggatcacatctccctctgttaaggagcctagtaagactgcgaagcagaagagaaggaccatcattttgggatccggacacaagggcaaggccacaatccgcatcgggctggcgacaaaaaagcctgtttcaagcggtcgtaagcacagtttggggaaggaatattatgcaccagctcctctgccgccaggagttagtggttttctgccatggagaacagctgagagagccaaacgtcacaggggattccccttgatcaaaacgagggacatttgtaaccagctgcaacaaccggggttccccgtgaccgtgaccgtagaatcaccctcatcaagtgaggtcgaagaggtcgacgactcctctgaaagcgtgcacgaggttcccgagaaaacgagtattgagcaggaagcattacaggagaagctcgaagagtgtctgaaacagttaaaagaggagcgggtaattcgcctgaaagtggataagcgcgtcagtgaactggagcatgagaatgcccaactcagaaacatcaacttttcactgtcagaggcgctacatgcccagagcttaactaacatgatcctggacgatgagggggtgctgggctctatcgaaaattcttttcaaaaattccacgcgtttctcgaccttttgaaggacgccggccttggccagctggccactatggcggggatagatcagagcgatttccagctcctgggacaccctcaaatgacctccaccgtctctaaccctccgaaggaagagaagaaagccctggaggacgaaaagcctgagcctaagcaaaatgctctggggcaaatgcaaaatatccaggtttctatatgcatgcagagcgcctacaatgagggaacactgatgaagttccagaagatcaccggagacgcccgaatcccgcttcctttagacagctttcctgtaccggttagcaccccagaaggactgggaacctccagtaataatttgggtgtccctgctactgaacagcgacaagagtccttcgaaggcttcatcgccagaatgtgctcaccttccccagacgccactagcggaacagggagtcaacggaaggaagaagagttgtcacggaactccaggagcagtagtgagaagaagacaaaaacgggaagtcattag

SEQ ID NO: 16319 - DNA, 1287 bp, synthetic construct
  source 1..1287: mol_type = other DNA; note = Synthetic coding sequence
atggcctggcagtcccggaagggtggccattttcgagaagtggctatgcaatggaaggtgacgctcactagcaggtgggggttattgagacattgtcaggtgctggctggcctgctgcatctgggcaacatccaattcgcagcctcagaggatgaggcccagccatgtcagcccatggatgacgcaaagtactctgtgaggactgccgcgagccttttgggcttaccagaggacgtgctgttagagatggtccagatacgcacaatccgggctggccgtcagcagcaggtctttcgcaagccatgcgcccgagcagagtgcgatacccgacgcgactgcctagccaagctgatctatgccagactgttcgactggctggtctccgtcattaatagcagcatttgtgccgacacagatagctggactacatttattgggctgctggacgtctacggttttgagtcattccccgacaatagtttagaacagctttgcatcaattatgcaaatgaaaagttacagcaacacttcgtggctcactatttgagggctcagcaggaggagtacgcagttgaaggcctggagtggtcattcataaattaccaagacaaccagccatgcctggatctaatcgagggctcgccgatcagtatttgttccttgattaatgaagaatgccgtctgaatcgaccgagttctgccgcgcagcttcaaacacgcattgagacagcgcttgcaggctctccttgcttggggcacaataaacttagtagagagccgtcatttattgtcgttcactacgcgggacccgtccggtatcacacagcagggctggtggagaaaaataaggaccctattccaccggaactagacggtgtggaggagaagcatttcagccaagcaccctgtagtctgagcacctcccctctgcaaactagattgctcgaagctattatacgtctttggcccctcggcctagtcttggctaatactgctatgggggtcggctcttttcagaggaaactggtagtctgggcttgccttcaactgcctagaggcagtccaagcagctacactgtccagactgcccaggatcaggcaggtgtgacatccattcgtgcgctgccacagggatccataaagtttcactgtagaaagtccccactgagatacgcagatatctgcccagaaccctctccatacagtattaccggcttcaatcagatcctgctcgaacgccacaggctgatacatgtgacgtcgagcgcattcaccggacttggttag

SEQ ID NO: 16320 - DNA, 927 bp, synthetic construct
  source 1..927: mol_type = other DNA; note = Synthetic coding sequence
atgaatccaatcgtagttgtacatggcggaggggcgggtcccatctcaaaggatcggaaggagagagttcatcaaggcatggtcagggcagcgacagttggatatggaattctgagagagggggggagcgcggtcgacgctgtggaaggcgcagtggttgcactcgaggacgaccccgaatttaacgctggatgcggttctgtgttaaacactaacggggaagtagaaatggacgctagcataatggatggcaaggatctctctgcaggagcggtgtctgccgtgcagtgtattgctaacccaattaagttggccaggctcgtgatggagaagacccctcactgctttttgacggaccagggggctgcgcagttcgccgcagccatgggtgttcccgagatacctggagaaaagctggtgacagagcggaacaagaagcggcttgagaaagaaaaacatgagaaaggcgcgcaaaaaaccgactgccagaagaatctggggacagtaggcgcagtagccctagactgcaaggggaatgtggcatatgcaacatcaaccggtgggatcgtcaacaaaatggtggggcgggtcggcgactcgccttgcctgggtgctggcggatacgcagataatgatatcggcgctgtgtccacaacgggtcacggcgagagtatacttaaggtgaatctcgctagactgacccttttccacatagagcaaggcaagacagtggaggaagccgccgacctgtcccttgggtatatgaagtctagagtgaaagggctaggaggactgattgtggtgtccaagaccggggactgggtggcgaagtggacatcaacctcaatgccatgggctgccgccaaggatggcaagctgcattttgggatcgatccagacgacacaaccattaccgatctgccttag

SEQ ID NO: 16321 - DNA, 429 bp, synthetic construct
  source 1..429: mol_type = other DNA; note = Synthetic coding sequence
atgagcctgcatgggaaacggaaggaaatttacaagtacgaggccccttggacagtttacgctatgaattggagtgttaggccggacaaacgctttcggttagctttaggctcctttgtggaggagtataataataaagtcgtcatactggatgtgcgagtgccttgtacacctgttgcccgcctcaacaaccaccgagcctgcgttaatgggattgcctgggccccacacagctcctgtcatatttgcaccgctgccgatgaccatcaagccctgatatgggacatccaacagatgccccgagctatcgaagatcccattttggcctacactgccgagggcgagattaataacgtgcagtgggcctctacacagcctgactggattgccatctgctacaataactgcctggaaattctgcgagtgtag

SEQ ID NO: 16322 - DNA, 1233 bp, synthetic construct
  source 1..1233: mol_type = other DNA; note = Synthetic coding sequence
atggccgcacccagcccttcaggaggtggaggcagcggcggaggatccgggagcggaacacctggccccgtgggctccccagctcccgggcaccctgccgtctcctctatgcagggattccagataaacttctgcgaaaaggcccagtcaaagcgaaaagccctcaagctaaactttgctaatcccccattcaagagcaccgccagatttactctgaaccctaatcctaccggtgtccagaatccacacatcgagagactccggactcacagcatagaaagtagtggaaagttaaagatttcacccgagcaacactgggattttaccgcagaagacctcaaggaccttggtgaaattggacggggcgcatacggcagtgtgaacaagatggtccataagccttctgggcaaattatggccgtgaagcgaatacgctcaactgtggatgagaaggagcaaaaacaactgttgatggatttagacgtggtgatgcgcagtagcgattgtccttacattgtgcagttctacggggcgctcttcagagagggcgactgttggatctgcatggagctaatgtctacttcctttgataaattttataaatacgtctacagcgtgctagatgacgtcatccccgaggagattctggggaagattacactggctacagttaaggccctcaaccacttgaaagaaaacctaaaaattatccacagggacattaagccttccaacattctactggatcgaagtggaaacattaaactttgcgatttcggcatatctggacagttggttgactctattgcaaaaactagggatgctggatgccggccatatatggcccccgagagaattgatccatctgcatcccgccagggctacgacgtgaggtcagacgtctggtccctcgggatcacactgtatgaactggctaccggtcgcttcccctaccccaagtggaacagcgtttttgatcaattgacccaggttgtcaagggagatccaccccagctgagcaacagcgaagaacgtgagttctctcccagttttatcaacttcgttaacctttgcttgacaaaggacgagtcaaagcgtcctaagtataaggagctgttgaagcacccatttatcctgatgtatgaggagagggcagtagaagtggcgtgctacgtatgtaagattctggatcagatgcctgccacaccatcaagcccgatgtacgtggattag

SEQ ID NO: 16323 - DNA, 687 bp, synthetic construct
  source 1..687: mol_type = other DNA; note = Synthetic coding sequence
atgcagctagctgtagtctctgaagaacaggaccagaacttgaatcgtttaatctgctggatccttatgcagttcatctatatctcttccgactacgtattcgacggcactaatccaccgtatcgggaagaggacattcctgcacccttgaacctttatggcaaaactaaattggatggagaaaaggccgtgctcgagaacaaccttggagcagctgtcctccgcattccaatcctgtacggggaggtggaaaagctggaggaatccgccgtgaccgtcatgttcgacaaggttcagttcagtaacaagtccgcaaatatggaccactggcagcaaagattccctacacacgtaaaagacgtggcaacagtttgccgacagctcgctgaaaaaaggatgctcgatccatccataaagggtacctttcactggtctgggaacgaacagatgactaagtatgaaatggcttgcgctattgctgatgccttcaatctgcctagctcgcatctgcgtcctatcacggacagtccagtgttaggcgctcagcggccacgtaatgcccagctcgactgctctaagctggagactctcggaattgggcagagaacccctttcaggattggtattaaagagtccctgtggccttttttaattgacaaacgatggcggcagacagtgtttcattag

SEQ ID NO: 16324 - DNA, 1101 bp, synthetic construct
  source 1..1101: mol_type = other DNA; note = Synthetic coding sequence
atgagcgccgccaatccggagacacctaatagcacgatctcacgagaagcgtctacccaatctagcagtgcagctgcctcccagggatgggtcctgcccgagggaaagattgtccctaatacagtgttcgtaggcggcattgatgcacgaatggacgaaaccgaaattggatcatgctttggcaggtacggatccgtaaaagaagtaaagatcattacaaatcgaaccggcgtctccaagggatacgggttcgtaagcttcgtgaacgatgtcgatgtccagaagatagttggatcccagatccactttcatggcaagaaattaaagttggggcctgcgatccgcaaacagaagctctgtgcacggcacgtccagccccgccccctggttgtaaatccgcccccgcccccacagtttcagaacgtgtggcgaaaccctaacacagaaacatacctgcagcctcagatcacgcccaatccagtcacccagcatgtccaggcttatagtgcttacccccacagtccggggcaggtcatcactggctgtcaactactggtgtataactaccaggagtaccccacttaccctgatagcgcatttcaggttaccaccggttatcagttgcccgtctataattatcagcctttccctgcttacccgagttctccctttcaggtcacagccgggtatcagttacccgtgtataactatcaggcttttcctgcctatccttcaagcccatttcaagtaacaaccggataccagctgccagtatataactatcaggcctttccagcttatcctagttcacccttccaggtcactaccggatatcagcttcctgtgtataactatcaagccttccccgcctacccatcatcaccattccaggtcactaccggttaccagctgcctgtatataactatcaggcttttccggcataccccaacagtgcggtgcaggtgacgaccggctaccaattccatgtgtacaattatcaaatgcctcctcaatgccccgtgggagagcagcgcaggaacctctggactgaggcttacaagtggtggtacttagtgtgcctgatccagaggagggactag

SEQ ID NO: 16325 - DNA, 306 bp, synthetic construct
  source 1..306: mol_type = other DNA; note = Synthetic coding sequence
atggctagcgcaggcacgcaacattactccatcggattgagacagaaaaactccttcaaacaaagcgggcctagcggaacggtaccagccacacctcctgaaaagccaagcgagggacgggtttggcctcaagcccatcaacaggtaaagcccatctggaagcttgagaagaagcaggtcgagacgctcagcgcaggcctcggacctggactgctgggtgtccctccgcagcctgcatactttttttgcccttcaactctctgtagcagcggaacgacagccgtaatcgcaggtcactcgagctag

SEQ ID NO: 16326 - DNA, 2121 bp, synthetic construct
  source 1..2121: mol_type = other DNA; note = Synthetic coding sequence
atgatagattcagtgaaactccgccgggattctgccgctgacttctttagccactacgagtacctgtgtgctctgcagaattctgtccctttgccagctgttcgggcttgcctccgggagggggttctggactttaatgccgaccgacttcggggcgtggattgggctccgttgcttagcaccctaaaaattaacaaggatctgccactggtctccatcaagtcattctttcagccctggttgggggatacagggtcagatatgaataagttctgtcgctctcgagtgccagccatccgttacaaggacgttaccttccagctctgtaaggccctgaagggctgcttatcaataagctcagtgcttaaaaatctggaactcaacgggctcatcctcagggagagggatctgaccatcctggccaagggacttaataaaagcgcttctctggtgcacctttctctggcgaactgtccaatcggagacgggggcctagagattatttgccaggggatcaaaagttcaatcacccttaagacagttaacttcaccggctgcaacctaacttggcagggggccgatcacatggccaagattctcaagtatcagactatgcgcaggcacgaggagacttgggcggagagtttacgatatcgaaggcccgacctggactgtatggcaggcctccgccggataacgttgaactgtaatactctgattggggatctgggagcctgtgccttcgctgacagtctgagcgaggacttgtggctgagggcattggacctgcagcagtgcggacttacaaacgagggagccaaagccctcctggaagctcttgagacaaataccacactggtagtgcttgatatccgcaaaaatccattgatcgaccatagcatgatgaaggccgtgattaagaaggtcctgcaaaatgggcgatccgccaaatccgaatatcagtggattacatcgcccagcgtcaaagaaccttccaagacagccaaacagaagcgaagaacaattattctcggctccgggcacaaggggaaggctacaattaggatcgtaggtttggccaccaaaaagccggtgagtagtggtaggaaacacagtctcggaaaggagtactatgctcccgcaccactccccccaggagtgagtgggtttctgccgtggcgtactgccgaacgggccaaacggcaccggggttttcccctaattaaaactcgggacatttgtaaccagctgcagcaaccaggctttccggtaacggtgacagtggaaagcccttcgtcttctgaggtggaagaggtcgacgacagtagcgagagtgtgcacgaagtccctgagaagacatctatagagcaagaggctctccaggagaagctggaagaatgtttaaaacagcttaaagaagagcgcgtgatacgactgaaggtcgacaaaagagtgagtgagcttgaacatgagaacgcgcagcttcggaacatcaattttagtctgtcagaggcgcttcatgcccaatcgctaacgaatatgatcctggacgatgagggtgtattaggaagcatcgagaatagtttccagaagtttcacgcttttttagacctcctcaaagatgcaggactcggccaattggccacgatggccggtattgaccagtcagactttcaacttcttggccacccccagatgacttcaaccgtgagcaatccccccaaagaggaaaagaaagctctggaggatgagaagccagagcctaaacagaatgctctcggccagatgcagaacatccaattccaaaagatcactggagatgccaggattcctctcccactcgactcctttccggtgccagtgagcaccccagaaggtctcggaaccagctctaataacttaggcgtccctgcgacagaacagcgacaggagagtttcgaaggatttattgcgaggatgtgtagcccaagtcctgatgccacttctggtaccggcagccagcggaaggaagaggaactgtcaaggaactcaaggtccagttccgagaaaaaaacaaaaacgggagagtacaccaagaaacatagcgacaaacagcaccccgggaaggatctgcacagttag

SEQ ID NO: 16327 - DNA, 1932 bp, synthetic construct
  source 1..1932: mol_type = other DNA; note = Synthetic coding sequence
atggcttgtcaacagtcccgatatcactcattttcaagcgcctccaggctgcaaccaaggccaagtggtgtgaccatagacgaaagtttcttaacggaagacaagtctacacagaacaggaagctgctacagaaacgacgtactttagaactgcctgccgcacccttgtctcactgtcaggcccccgtgctgggaggtaccgggaaattacctacacagggcgccccaccggccggaccaggccataggttccatcctggcacaaaagcagccgctcatcagcgcgagaagataagagccctcgaaccccttaaggcaaagctcgtgactgttaacgaggattgtaatgagcggattctcgccatgagagctgaggaaaagtatgagatcagccttcttaaaaaggagaaaatgaacctgctgaaacttatcgacaagaaaaacgaagaaaagattagtctgcaatctgaagttaccaagctgcggaagaacctcgccgaggaataccttcactacctgtctgagagagatgcctgcaagatactgatcgcagatttgaatgaactgcgttatcagcgcgaagacatgtccttggcccagagccccggtatctggggagaggacccagtgaaattgacccttgcactgaagatgaccagacaagacctcacccgaacccagatggagctgaataacatgaaagcgaactttggtgacgtggtcccccgccgggatttcgagatgcaggaaaagaccaataaggatttacaggagcagcttgacacactcagggcgtcttacgaggaggtgagaaaagagcatgagattctgatgcagctgcacatgagcaccttgaaagaacgggatcagtttttcagcgaattgcaggaaatccagcgtacaagtacgccccggccagattggacaaaatgtaaagatgtagtggctggaggccctgaaaggtggcagatgctggcagagggtaagaacagtgaccagttggtcgacgttctgttagaggagattggatccggattgttacgggagaaggactttttcccaggccttgggtacggagaggccatccccgcattcctgaggtttgatggacttgtcgagaacaagaagccatccaagaaagacgtggtgaacctacttaaggacgcctggaaagaacgtcttgcagaagaacagaaagagacattccctgactttttctttaattttctggagcaccggttcggcccctccgacgctatggcctgggcctacaccattttcgaaaatattaaaatctttcattccaacgaggtgatgtctcagttctatgcagtgctcatggggaagaggtccgagaatgtctatgtgactcagaaggagacggttgcgcaactgcttaaagagatgactaacgccgacagtcagaatgagggcctgcttaccatggaacagttcaatacagtgctcaagagcaccttcccattgaaaaccgaggagcagatacaggagctcatggaggccgggggttggcatccctctagttccaacgccgacctgctgaactaccgttcactctttatggaagatgaggaaggacagagcgagccattcgtccagaaactctgggaacagtacatggacgaaaaggatgagtacttgcagcagcttaagcaggaactgggtatcgaattgcacgaagaggttactctgcctaagctccgaggaggcttgatgacaatcgacccaagcctggacaagcagaccgtgaatacttacatgtcacaggcttttcagctgcctgagtccgaaatgccggaggaaggcgacgagaaagaagaagccgttgtggaaatactgcagacagctttggagcggctacaggtgattgatatccggcgtgtggggccacgcgagcctgagccagcctcatag

SEQ ID NO: 16328 - DNA, 474 bp, synthetic construct
  source 1..474: mol_type = other DNA; note = Synthetic coding sequence
atggccaccagcgccccactccggtcactggaagaggaggtcacctgtagtatttgtttagattacctgagggatcctgtgacaattgattgcggtcatgtgttttgccgatcctgtactacagatgtcaggccgatctctggctccagacctgtctgtccgctgtgcaagaaaccattcaagaaggaaaacattagaccggtctggcagcttgccagcctggtggaaaacattgagcgattaaaagttgataagggccgacagcctggggaggtcacacgagagcagcaggacgctaaactttgtgaacggcacagggagaaactacattactattgtgaagatgacggcaagcttttatgcgtcatgtgccgcgagtctcgcgaacacagacctcacacggccgtgcttatggagaaggctgctcagccccacagagaaaagatcctcaatcatctgtcaaccttacgctag

SEQ ID NO: 16329 - DNA, 939 bp, synthetic construct
  source 1..939: mol_type = other DNA; note = Synthetic coding sequence
atggcccagccctaccctcctgctcagtatccccctccaccacagaacggcatcccagctgagtacgctcctccccctcctcaccccacacaggattattcaggccagacccctgttcctaccgagcacggtatgacgctctacactcctgcccaaacacacccagagcagcctggctctgaggctagcactcaacctatagcaggtactcagaccgtaccccagacagacgaagctgctcaaacggattcccagccactacacccatctgacccaacagagaagcagcagcctaagcggttgcacgtgagtaacattccattcagattccgagacccagacctgcgtcagatgttcgggcaatttggaaagatacttgatgtggagattattttcaatgaacgaggctcgaaagggttcgggtttgtgacgtttgagacctccagtgatgctgatcgcgcaagggaaaagctgaatggcacaatcgtggaaggccgcaaaatagaagtgaataacgccacagccagagtgatgacgaacaaaaagactggcaatccttacactaacggttggaagctgaatcccgtggtcggcgccgtatacggtccagaattttacgccgtcacgggctttccttacccaacaacagggactgcagtcgcttatagaggtgctcatcttcggggccgcggaagagcagtatataatacgtttagggccgctccccccccgcccccgattcccacttatggcgccgttgtgtaccaggacggattctatggcgcggagatatacggcggctatgccgcgtacagatacgcccaacctgcggccgccgcagcagcttacagcgattcatatggccgggtctatgcggcggccgacccctaccatcatacaataggcccagctgccacttattctattggaacaatgtag

SEQ ID NO: 16330 - DNA, 300 bp, synthetic construct
  source 1..300: mol_type = other DNA; note = Synthetic coding sequence
atggcttctcttctacaagaccagctcactaccgaccaggatctgctcctgatgcaggagggaatgcccatgcggaaggtcaggtccaaatcctggaagaagttgcgctatttccggttacagaacgatgggatgaccgtctggcacgcgagacaagccaggggatcggcgaaaccctctttttccatcagtgatgtggagacaattcggaacggccacgattccgagctgcttcgcagcctagctgaggagttgcccctcgagcaggggttcaccatcgttttccacggtaggcggtag

SEQ ID NO: 16331 - DNA, 1620 bp, synthetic construct
  source 1..1620: mol_type = other DNA; note = Synthetic coding sequence
atggccacctcagctccccttcgctctctagaggaggaagtgacttgttctatttgtctagattatctcagagatcctgtaactattgattgtggtcatgtgttctgcaggtcatgcacgaccgatgtcagacctattagcgggagccgccccgtgtgcccactctgcaaaaagccttttaaaaaggagaatatcagacctgtgtggcaactagctagccttgtcgaaaacatcgagcggctcaaggtcgacaaaggccgccaacccggcgaagtgacaagagaacaacaagacgccaagttgtgcgagcggcatcgggagaaactgcactattactgtgaggatgatggcaaactgctttgtgtgatgtgtagagagtctcgggagcaccgccctcacaccgcagtgctgatggagaaagcagcacagcctcatcgagagaagattttaaatcatctctctaccttgcgtagagatcgagacaaaattcagggcttccaagcaaagggggaagcagacatcttagccgccttgaaaaaactgcaagaccagcgacagtacatagtagccgaatttgaacagggacatcagttcctgagagagcgtgaagaacacctacttgaacaactggcgaagctcgagcaggaactgaccgaaggcagggagaagttcaagagccgaggcgttggagaacttgccaggttggccctggtaattagcgagctcgagggcaaggcacagcagccggcggctgaacttatgcaggacacgcgagatttcttgaataggtatcctaggaaaaaattttgggtgggaaaacctatcgcaagggtagtgaaaaagaaaaccggcgagttttctgataagctcttgagcctccagagaggcctgagggaattccaggggaagctgctaagggatctcgaatacaaaacagtcagcgtgaccctggatccgcagagtgcgagtggctacctacagctatctgaggattggaagtgtgtcacctacaccagcttgtataaaagcgcctaccttcatcctcagcagttcgattgtgagcccggcgtcttagggtccaagggatttacctggggcaaagtctattgggaggtcgaggtggaacgggaggggtggtcagaggacgaagaagagggggatgaagaggaagagggcgaagaggaggaagaggaagaggaggcagggtacggcgatgggtatgatgattgggaaacagacgaagacgaggagtctttaggcgatgaggaggaagaggaggaggaggaagaagaagaggtgctcgagagctgcatggtgggtgtggccagagacagtgtgaagagaaaaggcgatctttcccttcgccctgaagatggcgtatgggccctccgcctaagctccagcggcatctgggcaaatacatcaccagaggcagaactttttcctgccttgaggccccgacgagtgggcatcgccctggactacgaaggtggcactgtgacattcaccaatgctgagtcacaggagctgatttacacctttaccgcgacattcacgagacgactggtgcccttcctatggctgaagtggccaggcaccagactcttgctgcggccatag

SEQ ID NO: 16332 - DNA, 480 bp, synthetic construct
  source 1..480: mol_type = other DNA; note = Synthetic coding sequence
atggctactagcgccccactgagatcactggaggaggaggttacgtgctcaatctgtctggactaccttagagatcccgtaaccatagactgcgggcacgttttttgcaggtcgtgcacgaccgacgtcaggcccatctctgggtctagacctgtgtgtccactgtgcaaaaagccattcaagaaggagaacatacgccccgtgtggcagcttgagaagattctcaaccatcttagtacgctaaggcgggacagagataagattcaggggtttcaagctaaaggggaggctgacattctggctgccctcaaaaagctgcaggatcagcggcagtacatagtcgccgagtttgaacagggtcaccagtttcttcgcgaacgcgaggaacatttacttgaacaactggccaagcttgaacaggagctgacagagggtcgggagaagtttaagtcaagaggtgtgggcgaattagccagatag

SEQ ID NO: 16333 - DNA, 579 bp, synthetic construct
  source 1..579: mol_type = other DNA; note = Synthetic coding sequence
atgggaaaaggctgcaaagtggtagtctgtggactgctgtcagttggaaaaaccgcaattcttgaacagctgctgtacgggaaccatactatcggaatggaggactgtgaaaccatggaggatgtgtacatggccagtgtcgagaccgaccgtggggttaaggaacagctgcacctctatgatacccgaggcctgcaggaaggagtagagcttcctaagcactacttttccttcgcagatggcttcgtgcttgtgtacagcgtgaacaatctggaatccttccagagggtggagttactgaaaaaagagattgataaattcaaagataagaaggaggtggccatcgtcgttttaggaaacaagatcgacttgtcagagcagcggcaggtggatgccgaggtagcacagcagtgggctaaatcggaaaaggtgagactgtgggaggtgacagtgacagacaggaagacgctaatcgagccattcacattactcgcatcaaaactaagtcaaccccaaagcaagagctcattcccccttcctggacgcaagaataagggtaacagtaatagcgagaattag

SEQ ID NO: 16334 - DNA, 309 bp, synthetic construct
  source 1..309: mol_type = other DNA; note = Synthetic coding sequence
atgcataatcgaagtcagggatttttttttagctcctgtcatccacagaaccatgttagttacggctgtcagagtcccagcttcattttttgtcgatgtcagtcgctgaatttcgtgagtcgaacctgttacccactgtcctactttagctacgggaatcagacaattggctctattagcaatagctttcggagcctgaactacgtgtcacacagttttcagcctatctcttttatgcatagctcttttcagccagcttgtagtgactttgtcggatggcagtcaccctttctcaggagaacctgctag

SEQ ID NO: 16335 - DNA, 723 bp, synthetic construct
  source 1..723: mol_type = other DNA; note = Synthetic coding sequence
atggatttagtgaggctggggctggagcgtggtgaaactgctaaggaagccctcgatgtgatcgtgtccctcctggaagagcatggccagggaggtaattatttcgaagatgctaactcttgccactcttttcagtctgcctacctgattgtggaccgcgacgaggcttgggtgcttgagactatcggaaagtattgggccgccgagaaagtgaccgagtcaatcactgtgcagactatgatgaatacactgcgggacaaggcttctggggtttgtatcgacagcgagttttttttaactacggcttccggtgtttctgtgctaccacagaaccgatcttccccttgcatacactattttactggcacacccgacccgtcccgttctatctttaagccctttattttcgtggatgatgttaaacttgtgcccaaaacgcagagcccttgctttggggatgatgatcccgccaagaaggagccaagatttcaggaaaagcccgatagacggcacgaattgtataaagctcacgagtgggcccgtgctattatagaatccgatcaggagcagggcaggaagcttcgatctacaatgcttgaactagaaaagcaggggttagaggcaatggaagaaattctgacttcgtctgaacccctagatccagccgaggtgggggatttattttatgactgcgtagataccgagatcaaattcttcaagtag

SEQ ID NO: 16336 - DNA, 900 bp, synthetic construct
  source 1..900: mol_type = other DNA; note = Synthetic coding sequence
tgaagagaagaggacatttatcaatttgcttactgttatccatacacatacacgcgctttcagcactatctggactccctgcaaaagcggaatatggactactttttccgcgagcagctggggcagtccgtccaacagagaaagctcgatcttctgaccatcacttcaccagacaacctgagggagggggccgagcagaaagtggtgttcatcacgggcagggtgcaccccggcgagacccccagcagcttcgtgtgtcagggcattattgactttctagtgtcccaacatccaatcgcatgcgtgttgcgtgagtaccttgtcttcaagatagctcccatgttaaatccagatggagtgtatctcgggaactatagatgcagcctgatgggtttcgaccttaataggcactggctcgaccctagcccctgggtccacccaacccttcacggagtaaagcagttgatcgttcaaatgtataacgatcccaagacatcactcgagttctacatcgatattcatgcccactccacaatgatgaacggtttcatgtatggaaatattttcgaagacgaagagcgcttccaacgccaagctattttcccaaagctactttgccagaacgccgaggacttctcctactcaagtacttcttttaatcgggatgcagtaaaggccggaaccggcaggcgcttcctgggcggcctcctggaccacactagttactgctacacacttgaagtgtctttctactcttatattatcagcggaaccaccgctgccgtcccgtatacagaagaggcttgcatcctgagccctcacccagccctagggcagccttcctcctcacgcgagtacccgtcactgactggacaggaattgggaccccagctgcgctag

SEQ ID NO: 16337 - DNA, 1041 bp, synthetic construct
  source 1..1041: mol_type = other DNA; note = Synthetic coding sequence
atggccgccgctgagcccgcttcctccggtcagcaagcccccgcggggcagggccaggggcaacggccaccaccccaacctccccaggcccaggcgccgcagccacccccacccccacagctggggggggctgggggtgggtctagcagacatgagaagagcctgggcctccttaccactaaattcgtgagtctgcttcaggaggccaaggatggagtgctagatttgaaagctgcggccgatactttagcagttcggcagaagcggcgtatctatgacattacaaatgtactcgagggaatcgacttaatcgaaaagaaatccaaaaattccattcaatggaaaggggtcggtgccggctgtaacaccaaggaggtcattgaccgtctgcgatacctcaaggccgagattgaagacctggagctgaaggagagggaactggaccagcagaaactatggctgcagcagtccataaaaaacgtgatggatgattcaatcaataacaggttctcctacgttacacacgaagatatttgcaattgctttaacggcgacacccttttggccattcaggcccccagcgggactcagctggaagttcctattcctgagatggggcaaaatggccagaagaagtaccagattaatctcaagtcgcattctggcccaatccatgtcttactgatcaacaaggaatctagctcaagtaagcctgttgtctttccagtgcccccgccggacgatctgactcagcctagctctcaaagcttaacacctgttactccccaaaagtcgtccatggcaacacagaacttaccagagcaacacgtctccgaaaggagccaggccctccagcagacatccgcaaccgacataagcagcgccggctcgatcagcggagatataatcgatgagcttatgtctagcgacgtgtttcccctgctgcgtctgagcccaactcccgccgatgactacaattttaatctggatgacaacgagggtgtgtgcgatctcttcgatgtgcagatccttaattattag

SEQ ID NO: 16338 - DNA, 396 bp, synthetic construct
  source 1..396: mol_type = other DNA; note = Synthetic coding sequence
atgagcaaacgttacttacagaaggcaactaagggaaagttgctgatcataatctttattgtcaccttatggggtaaagtggtatctagcgcgaaccatcacaaggcacaccacgttaagaccggtacgtgtgaagtcgttgctctccatagatgctgcaacaagaataagatagaggagcggtcacagactgtgaagtgttcctgttttccagggcaggttgctgggacgaccagggccgccccctcttgcgtggatgcttccattgtcgagcaaaagtggtggtgccatatgcagccgtgtctggagggagaggagtgcaaagtcctccctgacagaaagggctggtcctgttcttccggtaataaagtgaaaactacccgagtgacccactag

SEQ ID NO: 16339 - DNA, 306 bp, synthetic construct
  source 1..306: mol_type = other DNA; note = Synthetic coding sequence
atgccattcttcgggaataccttctcccctaagaaaacccctccccggaagtcggctagtttatctaatctccactctctggataggagcactagagaggtcgagctgggactggaatacggatctccaactatgaaccttgccggtcagtcccttaagttcgaaaatggccaatggatcgccgagaccggggtatcaggaggtgtggatcgtcgggaagtacagagacttaggagaagaaaccagcagctcgaggaagagaacaatctgctccgtctaaaggtcgacatacttctagatatgtag

SEQ ID NO: 16340 - DNA, 393 bp, synthetic construct
  source 1..393: mol_type = other DNA; note = Synthetic coding sequence
atggacattagcaagggccttccaggcatgcagggcggtcttcacatttggatttctgaaaataggaaaatggtacccgtgccggagggagcttatggaaacttctttgaagagcactgttatgtcatccttcacgttccacaaagccctaaggccacccagggcgcttcctcagacttgcactattgggtgggcaaacaggccggtgccgaagcccagggcgcggcagaggcttttcagcagagacttcaggacgaactcggtggacagactgtactccatagagaagctcagggccacgagtccgattgtttttgcagctactttcggcccgggattatttatcgtaaagggggactggcttctgacctgaagcacgtcgagaccaactag

SEQ ID NO: 16341 - DNA, 51 bp, synthetic construct
  source 1..51: mol_type = other DNA; note = Synthetic coding sequence
atgtgtacttctgaaaccttccaggccctggacacctttgaggcgagatag

SEQ ID NO: 16342 - DNA, 5553 bp, synthetic construct
  source 1..5553: mol_type = other DNA; note = Synthetic coding sequence
atggagtctaatttcaaccaggagggggtcccccgtccctcatacgtctttagtgcagacccaatcgccagaccctctgagatcaacttcgacgggattaagctcgacttgtcgcacgagttttctttggttgctcctaatactgaggcgaactccttcgagagcaaagattatctccaggtatgccttaggataaggccatttacacagagtgagaaggagctcgaatctgaagggtgtgtccacattctggacagccagactgtggttctcaaggagccccaatgcattttagggcggctctcggagaagagttcaggccaaatggcccagaaattctccttctctaaagttttcgggccagcaacaacccagaaggaattcttccagggatgtattatgcagcctgtgaaagaccttctgaaaggccaatcccggcttatatttacatacggactgaccaatagtggcaagacgtacactttccagggtacagaagaaaatatcgggatcctgccccgtaccctgaatgtgctattcgactcactccaggaaaggctatacaccaaaatgaatttaaagccacaccgatctcgcgaatatctgaggttatcatcagagcaagagaaggaggagatcgcatctaaaagcgccctgctgcgccagatcaaagaggtcactgttcataacgactcagatgacactctgtatggctctctgaccaactcactgaacatcagcgagtttgaagagtccatcaaggattacgagcaggccaatctgaacatggcaaattccattaaattcagtgtgtgggtgagcttttttgaaatctacaatgaatacatatatgatttgtttgtccccgtgtcctctaaatttcaaaagcgtaaaatgctgagactcagccaggatgtcaaagggtacagcttcatcaaagatctccagtggatccaggtttccgattccaaggaggcctacagactcttgaaattagggattaagcaccaatctgtggctttcaccaaattaaacaacgcgtcttctcgcagtcacagcatattcaccgttaagatcttgcagattgaagattctgaaatgtccagagtcatccgtgtcagcgagctgagcctgtgtgaccttgccggctctgaaagaaccatgaagactcagaacgaaggggaaagacttcgagaaaccgggaatattaacacctctctgctaaccctaggaaagtgtattaacgtgctaaagaactcggaaaaatctaagtttcagcagcacgtgcctttcagagaaagtaagcttacccactactttcagtccttctttaatgggaagggcaagatctgtatgatcgtcaacattagccaatgctatctggcctacgatgaaacactcaatgtgcttaagttttctgctattgcccagaaagtgtgcgtgcctgatacactgaattcatcccaagaaaaactctttgggcccgtcaaaagctcccaggacgtttctctggactcgaatagcaactccaaaatcctgaatgtgaagagagcaaccatctcttgggagaacagtctcgaggatctcatggaggatgaagacctggtggaagagttagagaatgccgaagagacgcaaaacgtcgaaacaaagctcctcgatgaggacctggataagacactggaagaaaataaagccttcatttctcatgaggagaagcggaagctgcttgatctcatcgaggacttaaaaaaaaagttaattaatgagaagaaggaaaagctgaccctcgaatttaaaataagagaggaagttacccaggagttcacgcagtactgggcccagcgcgaagccgattttaaagaaactctcttacaggagcgtgagattctggaagagaatgccgagcggagactggcaatcttcaaggatctggtgggaaagtgtgatacccgagaagaagccgccaaagacatttgtgcaaccaaggtggaaaccgaagagacgcacaattatgtcggatttgaggatattatcgactcccttcaggacaacgtagccgacattaagaagcaggccgagatcgcccacctgtacatagcatcccttcccgacccccaggaagccaccgcctgtttagagctgaagttcaaccaaatcaaagctgagctagcaaaaaccaaaggggaactgattaaaacaaaggaagagctgaaaaagcgcgaaaatgagagcgactccctgatccaagaattagagacctctaataaaaaaataataactcaaaaccagcgcattaaggaacttataaacatcatcgatcaaaaggaggacacaatcaacgaattccagaatttgaagtctcatatggaaaacacctttaaatgcaatgacaaagcagacacctctagcctcatcatcaacaacaagctgatttgtaacgagacagtggaggtgcctaaagattctaagtctaaaatttgttccgagaggaagcgagttaatgaaaatgagctccagcaagacgaacctccagccaagaagggaaccaccagcgccgcgagttcaagacgcctgcggaagcttatttccaaacccgtcaataggacccgccagacagagggacactcactggtctcgatccatgtgtcttcagccattaccgaagaccaaaaaaagagtgaggaggttcgaccaaacattgcagagatagaggatattcgggtattgcaggaaaacaatgaggggctccgcgcattcctgctaactatcgaaaacgaactcaaaaacgaaaaagaagagaaggcggagctcaacaaacagattgtacattttcaacaagagctgtctctttctgagaaaaagaaccttaccttgtctaaagaagtgcagcagattcagtcaaattacgatatcgctatcgccgagctgcacgtccagaagtccaaaaaccaggaacaggaagaaaaaatcatgaaactctccaatgagattgagactgcaacacggtccataaccaataacgtgtctcagatcaagctgatgcatacaaaaatcgatgaactgaggactcttgatagcgtgagtcagatcagcaatatcgatttactgaacctaagagacctgtctaacgggagtgaagaagacaatctaccaaacactcagcttgacctccttggcaatgattatctggtcagtaagcaagtaaaggagtatcgcattcaggaacccaatagagagaactcttttcactctagtatcgaggccatttgggaggaatgtaaagagatcgtcaaggcgagctccaagaagagccatcagatcgaagagctagagcagcagatcgagaagctccaggccgaggtcaagggatacaaagatgagaacaatagactgaaggagaaagagcataagaatcaggatgacctgcttaaagaaaaggagacactgatccagcagctcaaagaagagctgcaagagaaaaatgtgactctggacgtacagattcaacacgtcgtggagggcaaaagggctctgtcagagctcacccagggggtgacctgctataaggcaaagatcaaagagctcgagactattttggagacacagaaggttgagtgcagccattccgccaaactagaacaagacattttggagaaggagtccatcatcctgaagcttgaacgcaatttaaaagagtttcaggagcacctacaagatagtgtgaaaaacaccaaggacctgaatgtcaaagaactgaagttgaaggaagagattacgcaactgacaaacaacctccaggacatgaagcacttgctacagttgaaagaagaggaggaggagacgaatcgccaagagacggaaaaattgaaagaggagctgtctgctagctccgcacgaacccagaacttgaaggctgatctgcagcggaaggaggaggattacgctgacctcaaagagaaactgactgatgctaaaaagcagatcaagcaggtgcagaaagaggtaagtgtaatgagagacgaggataagcttctgagaatcaaaattaacgaactggagaaaaaaaagaaccaatgttcccaagaactggacatgaaacagcgcaccattcagcaactgaaagagcagttgaacaaccaaaaggtcgaggaggccattcaacagtatgagcgcgcgtgtaaggacctgaacgtcaaggagaaaatcatagaggacatgcgaatgacgctggaagaacaggaacagacacaggtagagcaagaccaggtgttggaggccaaactggaggaggtcgaaagactggctactgaactagagaagtggaaagagaagtgtaacgatctggagacaaaaaataaccagcggtctaacaaggagcatgaaaataataccgatgttttagggaagctgacaaacctccaggatgagctgcaggagagcgagcaaaagtataacgccgacagaaaaaagtggctggaagaaaaaatgatgttaatcactcaagcgaaagaggcagaaaatatccgcaacaaggaaatgaagaagtacgccgaggaccgggagaggtttttcaaacagcagaatgagatggagattctgaccgcccagctcaccgaaaaggatagcgacctgcagaagtggcgggaagagcgagatcagttggtagcagccttggagatccagctgaaagccctgatctcttctaatgtgcagaaagataacgagatagagcaactgaaacgcataatctcagaaacgtccaagatcgagacacagataatggatataaagcctaagagaatcagttcggccgatcctgacaagctgcagactgagccactctctacatctttcgaaatttcccgcaacaagattgaggatggttcagtggtactggacagctgtgaagtttcaacagagaatgaccagagcacaaggtttcctaagcctgagcttgagatacagttcacaccattacagccgaacaaaatggccgttaagcatcctggatgtaccacacccgtcaccgtcaagatccctaaggctcggaaacgcaaatcgaatgagatggaggaggatcttgtcaagtgtgagaataaaaagaatgccaccccacggaccaacctcaagtttccaatatccgacgataggaactcatctgtgaagaaggaacagaaggtggctatcaggccctcgagtaaaaaaacatactctcttcggagtcaagcttcgatcatcggtgttaacctggctacaaagaaaaaggaggggactctgcagaagttcggagattttctacaacatagtccaagtatcctccagtctaaggcgaagaagatcattgagaccatgtcttctagcaaactgagtaacgttgaagcctccaaagaaaacgtctcacagccgaaaagagctaagaggaagttatacacctctgaaatttccagccctatagacatctctggccaagttattctgatggatcaaaagatgaaggaaagtgaccaccagattatcaaacgccggttgcgaacaaagaccgccaagtag

SEQ ID NO: 16343 - DNA, 1527 bp, synthetic construct
  source 1..1527: mol_type = other DNA; note = Synthetic coding sequence
atgaggtgccctaaatcggcggtcacaatgagaaacgaggaactgcttttgtctaatgggactgccaacaagatgaacggcgccctggatcactcagatcagccagatccggacgctatcaagatgttcgtgggtcaaatcccacgcagctggtccgagaaggagctgaaggaattgtttgaaccctatggcgcggtctatcagatcaacgtgctgcgcgaccgctctcagaacccgcctcagagtaaagggtgttgttttgtgactttctacactcgaaaggctgccctggaggctcagaacgcgctccataacataaaaaccctgcccggcatgcaccaccctattcagatgaagcccgcagattctgaaaagtccaatgccgtcgaggataggaaactttttattggcatggtgagtaagaagtgcaacgagaacgatattagggtaatgttctctccgttcgggcaaatagaggagtgcaggatcctgagggggcctgatgggctgtctcggggatgcgctttcgttaccttcagtactagagctatggcccagaacgcaatcaaggctatgcaccagtctcaaaccatggaggggtgctccagtcccatcgtggtgaaatttgctgacactcaaaaggacaaggaacaaagaagactccagcagcagctagcccagcagatgcagcagctgaatacagctacctggggtaacctaactggcctcggagggctgaccccccagtatctagccctgctgcaacaggcgactagttctagcaatctgggtgcattcagcgggattcagcagatggcaggcatgaatgccctccagctgcaaaatctggccactcttgctgctgccgcggctgcagcccagacttctgccaccagcaccaacgctaatccgctgagtaccacgtcgtccgcgctgggagccttgacctcccccgtagctgcatcaactcctaattctaccgcaggcgccgcaatgaattccctgacctctcttggcactctgcagggcttagcaggagcaaccgtggggctgaataacatcaacgcgctggcaggcatggcagcacttaacggcgggctgggcgcgaccgggttgacaaatggaaccgccggaaccatggatgctcttacccaggcatatagcgggattcagcagtacgcagccgcggctctgcctacattatattcacagtcgctcttgcagcagcagtctgcggcgggcagtcaaaaggagggcccagaaggtgccaacctgttcatttatcacttgcctcaggagttcggggatcaagatattctccaaatgtttatgccctttgggaatgtcatttcagctaaagtattcatcgataagcagacaaacctatccaagtgcttcggctttgtatcctacgacaatcctgtctcagcgcaggctgcaattcaagcaatgaatggattccagatcgggatgaaacggcttaaggtacaactcaagaggtccaagaatgattctaaaccatactag

SEQ ID NO: 16344 - DNA, 975 bp, synthetic construct
  source 1..975: mol_type = other DNA; note = Synthetic coding sequence
atgtttattgggggactctcatggcagactagccctgactccctgagagattacttttccaagttcggggagatccgggagtgcatggtaatgagagatcccacaactaagcgttctaggggattcggattcgtgaccttcgcagatccagcgtccgtcgacaaggtattagggcaaccccaccatgaactggacagcaaaaccatcgatcctaaggtggcctttcctcggcgggcccagccaaagatggtgaccaggaccaagaagatcttcgttggggggctgtccgccaacaccgtggtcgaggatgtgaaacagtacttcgaacaattcgggaaggttgaagatgccatgttgatgtttgataagacgaccaatagacaccgcggcttcggattcgtgacctttgaaaatgaggatgtggtggagaaagtgtgcgaaatacacttccatgagattaacaacaaaatggtggagtgcaagaaggctcagcccaaagaagtgatgtttccgccaggtactaggggacgcgcccgcgggttaccatatactatggatgcctttatgctagggatgggaatgttgggatacccaaactttgttgctacatatggccgcgggtaccctggattcgccccatcatatggatatcagttccctgggttccccgccgcagcgtatggacccgtggccgcagctgccgtagcggccgcccgcggtagcgttctgaattcatactccgctcagccaaattttggcgccccagcgtcacccgccggaagtaacccagcgagaccgggtggattccccggggccaattcccccggtccagtggccgacctgtatgggcccgcttcacaagacagcggcgtgggaaactatatctcagccgcctccccgcagcccgggagtggtttcggtcatggaatagcaggccccctgattgccacggcattcaccaatgggtaccattag

SEQ ID NO: 16345 - DNA, 333 bp, synthetic construct
  source 1..333: mol_type = other DNA; note = Synthetic coding sequence
taacacaagccatgctacggcgcactgttcgggccgaggggagtaaacatcggtggggtgggtagctacctatataatcccccaacaccctcccccggctgtactacccccctaagtccatcctcttttagcccacctcgaccacgtactgggctccctcaagggaagaagacggaaaaagtcatgagcctgggaaggaactggcaccggccatgtctgcggtgccaacgttgtcacaaaacacttactgccggcagccatgctgaacatgatggagttccgtactgccacgtgccgtgctacgggtatctgtttgggcccaaagccttatag

SEQ ID NO: 16346 - DNA, 411 bp, synthetic construct
  source 1..411: mol_type = other DNA; note = Synthetic coding sequence
atgaccgaggattcccagcgcaattttagatccgtgtattatgagaaggtagggtttagaggagtggaggaaaagaaatccctggaaattcttcttaaggacgacaggctggacaccgaaaaactgtgcaccttctctcaacggtttcccctcccctctatgtatagggcgttggtgtggaaagtcctgctgggaatcctgccacctcatcacgaaagccacgctaaagtgatgatgtacagaaaggaacagtatttagacgtactccacgctttgaaggtggtgcgcttcgtctccgatgctactccccaggcagaggtttacctacgtatgtaccaactagagtctgggaagttgccccgctccccttccttcccactcgaaccagatgatgaggtcttcctcgcctag

SEQ ID NO: 16347 - DNA, 1686 bp, synthetic construct
  source 1..1686: mol_type = other DNA; note = Synthetic coding sequence
atggcctctcagttctgtctgccagaatcaccgtgtctctctcctccacccctcagcccacttgccctggcccctagttctgcgattcgggatcaaaggacagccacaaaatgggtggcaatgatccctcagaaaaatcagactgcctccggggacagcttggacgtacgggtgccatccaagccttgcctgatgaaacagaagaaaagcccttgtttatgggaaatccagaagctccaggaacagcgagagaagcgccgacggcttcaacaagagatccgcgctaggagagcactcgatgtgaatacaagaaaccctaattatgaaatcatgcatatgattgaggaatatcgtaggcatttggactctagcaaaatttcggtactcgagccacctcaggagcacaggatttgtgtttgtgtgcgcaaacggccgctcaaccagagggagaccaccctgaaagatcatgcgttcgacgataaggcctcaaacgagctagtgtaccagtttactgcccagcccttagtggagagcatattcagaaaaggcatggccacatgcttcgcttacggtcagacaggatccggaaaaacctacacaatgggaggcgacttctccggcacagctcaggactgtagcaaggggatttatgcgttagtagctcaggatgtttttctcctgctgcgtaattcgacatatgaaaaactggatctaaaagtgtatggcacattctttgagatttatggaggaaaggtgtatgacctgcttaactggaagaagaagctgcaagtcttagaagatggtaaccagcagatccaggtagtcgggctccaggagaaggaggtgtgttgcgtcgaagaggtgctgaatctcgtggaaatcgggaattcatgtagaacaagccgacaaactcccgtgaacgcccactcatcacgctcccatgccgtatttcagataatcctgaagagtggaagaatcatgcatggtaagtttagcttggttgacctggcgggcaacgaacggggtgccgacactacaaaggcatcccggaaaaggcagttagagggggccgagatcaacaaatctctgctcgcgctcaaagagtgcatactcgcacttggtcagaataagccgcatacaccttttcgggcatctaaactgaccctggtcctgcgggatagctttatcgggcagaattcctcaacctgtatgattgccacaatctcgcccggaatgacctcttgcgaaaatacactgaatacattgcgttacgccaatcgggtcaagaaacttaacgtagacgttcgtccctatcatcggggacattatccaattggtcatgaggcacctaggatgttaaagagccatattggcaactcagagatgtctcttcagcgtgatgagtttatcaagatcccatatgtgcagtcggaagagcaaaaagagattgaagaggtagagacccttccgacgttattggggaaggatacaaccatctccggcaaaggcagcagccagtggcttgaaaatattcaggagagggccgggggcgtgcaccatgatatcgatttttgcattgcacgctctctctcgatactggagcagaagattgacgcactgacagaaatccaaaaaaagctcaaactgctgctggctgacctccacgttaagtctaaagtggagtag

SEQ ID NO: 16348 - DNA, 375 bp, synthetic construct
  source 1..375: mol_type = other DNA; note = Synthetic coding sequence
tgatcagcctgcatcggtaactgtagcaccgctctggaagaattgaccgatgacatgaccgaggactttctacctgtgttgcgcgaatatatcctctactccgactccatgaaaagcgttctgaaaaagcgtgaccaggttcaggctgagtacgaggccaagctggaggctgtggccttgcggaaggaggatcggcctaaagtgcccgcggacgttgagaagtgccaggaccgaatggaatgctttaacgccgacctgaaggccgacatggaacgctggcagaataacaagcggcaggactttcggcaactgttgatgggcatggccgataagaacatacagtattacgagaagagcattgcggacttgaagtag

SEQ ID NO: 16349 - DNA, 747 bp, synthetic construct
  source 1..747: mol_type = other DNA; note = Synthetic coding sequence
atggctacttccgctcccctgcggagcctggaagaggaggtaacttgcagtatttgccttgactacctgagagatcctgtgacgatcgactgcggtcacgtattttgtagaagctgtactacggacgttcgtccaatctctgggtctcgcccggtatgcccactgtgcaaaaaacctttcaagaaggagaatatcaggccggtatggcagttagcttcactggtcgagaacatagagcggctgaaagtggataagggtcgacagccaggcgaagttacccgggagcagcaggatgcaaaactgtgcgagaggcaccgtgagaaactgcactactactgcgaggacgatggtaagttgctgtgtgtcatgtgcagggagagccgcgaacaccgcccgcacaccgccgttctcatggagaaggctgcccagcctcaccgagagaagatcctgaatcacctgtcaacattgcgccgcgacagggacaagattcagggattccaggcgaagggagaggccgacattcttgccgccctcaaaaagctacaggaccaacgtcaatacatcgtggccgagttcgagcaagggcatcagttcctgcgggagagagaagagcatctgcttgagcaactcgcaaaactcgagcaagaactgactgaggggagggaaaaattcaagagccggggcgtcggcgaactcgcacggctggcacttgttatatctgaactcgaagggaaggcacagcagtag

SEQ ID NO: 16350 - DNA, 1125 bp, synthetic construct
  source 1..1125: mol_type = other DNA; note = Synthetic coding sequence
atggacttcaatatgaagaaattggcctctgatgccggaatcttttttactagagcggtccagtttactgaggagaagtttggtcaggcggagaagaccgagctagatgcacactttgagaacttgctggctagagccgattcaacaaagaattggacggaaaagattcttcgccagacggaagtcttgctgcagccaaacccttctgcaagggtggaagagttcttgtacgagaaattagacagaaaagtgccgtctagagtaactaatggcgagcttttggctcagtacatggccgacgcggcaagcgagctggggcccactactccgtatggtaaaacgctcatcaaggtggccgaagccgaaaagcagctcggagccgccgaaagggacttcatccacaccgccagcatatcctttctcacccctttgaggaattttttggagggagattggaaaacaatctccaaagagcgtaggttgctgcagaacaggcggctggacctagatgcctgcaaggccagactgaagaaagctaaggcagctgaggcgaaggcgactctgtggaatgacgaggtggacaaagctgaacaagagctgcgcgtggcccagactgagtttgatcggcaggcagaagtcacccgcttgttactcgagggcatctcctctacgcatgtgaatcacctgcgttgcttacacgaatttgtcaagtcccagactacttactatgcacagtgctatcgacacatgcttgacctgcaaaagcagctgggtcgcttccctgggacattcgtgggcactacagaaccagcttcccctccactctcctctacctctccaaccaccgctgctgccacaatgccagtagtaccatctgttgcgtccttggctcctccaggagaggcctccctgtgcctggaggaagtcgcgcctccggccagtggtaccaggaaggcaagggtcttatacgattatgaggccgccgacagctccgagctagcccttttggctgatgaactaattacagtatatagtttgcccgggatggacccagattggctgattggagaacgcggcaacaaaaagggaaaagtgcccgtcacatacctggaacttctgagctag

SEQ ID NO: 16351 - DNA, 1188 bp, synthetic construct
  source 1..1188: mol_type = other DNA; note = Synthetic coding sequence
atggctagcgctgcctctgttacctctttggccgacgaggtgaattgtccaatatgtcaaggcacactgcgcgagccggtcaccattgattgcggacataatttttgccgcgcctgtctgactcgatactgtgagataccaggtccagacctggaggaaagccccacttgcccactctgcaaagagccgttcaggcccggatcattcagaccaaactggcagttagccaatgtagtagaaaacatcgaaagactccagctagtgtcaaccctggggttgggggaggaagacgtgtgccaagaacacggcgaaaagatttattttttctgcgaagacgatgagatgcagttgtgcgttgtctgccgcgaggcaggagagcacgcaacccacactatgcgattcctggaggatgcagcggcgccctaccgtgagcaaatccataaatgcctcaaatgtctgcgcaaggaacgggaggaaattcaggaaatccagtctcgtgagaacaaaaggatgcaggttctgctgactcaggttagcaccaaacggcaacaagtcatctccgagtttgcccacctccgcaagttcctggaagaacagcagtcaattctgctggcgcagctcgagagccaggatggcgatattttgcgccagagagatgaattcgatctcctggtggcaggggagatttgcaggttcagcgctctaatcgaggagctcgaagagaaaaatgaaaggccagcaagagagctgttgactgatatcaggtcgaccctgatacgatgtgagacacgaaagtgtaggaagcctgtcgccgtgagtccggagctggggcaacggatccgcgattttcctcagcaagccttgcctctgcaaagggaaatgaagatgtttcttgagaaattatgttttgagctggactatgaaccagcccacataagcctggacccgcaaacctcacacccaaaactgcttcttagtgaggatcatcaacgagctcagttctcctacaaatggcagaatagtcctgacaaccctcagcgattcgaccgggcaacatgcgtgttggcacatacgggtattacgggtggccgacatacttgggtatggatggctcgggtgcccggtgattcaggctgttgtcaattctgctcgccacctagtgtgctgggaacggaggtggctgcgtag

SEQ ID NO: 16352 - DNA, 1131 bp, synthetic construct
  source 1..1131: mol_type = other DNA; note = Synthetic coding sequence
atggaaaagaaaaagatggtgactcaaggcaatcaggagcccaccacaacaccagatgccatggtccagccttttactaccattcccttccctcctccaccccagaacggtatcccgacggagtatggcgtgccccacacccaagactacgccgggcagacaggggagcacaatctgacactctacggctctactcaagcacatggtgagcaatccagcaactcccccagcactcaaaacggttcactaaccaccgagggaggtgcacagactgatggtcagcagtcacagacacagagttcagaaaattccgaatcaaagtccactcccaagcggctgcacgtgagtaacataccatttcgttttagagatccagatctcagacagatgttcggccagttcggcaaaatcctggatgtagagattatcttcaatgagagaggaagtaaaggctttggatttgtaacattcgagaattctgcggatgccgatagagctagagagaaactgcacggtactgtcgttgaaggtcggaagatagaggtaaataatgctaccgcccgggtgatgacgaataaaaagatggttacaccctacgccaatggctggaagctgagtcccgtggtgggtgcagtgtatggacccgagctctacgctgcctcaagttttcaggccgacgtgagcttaggcaatgatgcggccgtgcctctgtctgggcgcggcgggatcaacacttatatacctttgatcattcccgggttcccttaccccaccgctgccacgaccgctgccgctttccgcggggcccatttgagagggcgcggaaggactgtatatggagctgtgcgtgccgtgccacctactgcaattccagcgtaccccggtgtggtttatcaggatggattttacggagcagatttgtatgggggctatgccgcttatagatacgcccaacccgctaccgctaccgcagctactgccgctgctgctgctgccgctgcatatagtgacgggtatggacgggtctacacagcagacccctatcatgctctagcccctgcagcttcatatggcgtgggcgccgttgcctccttatacagagggggctactctaggttcgctccctactag

SEQ ID NO: 16353 - DNA, 1638 bp, synthetic construct
  source 1..1638: mol_type = other DNA; note = Synthetic coding sequence
atggggactccctggcggcctccctcccggcgcccttggcggtggcctacaggctgtacaaggaagacatgtggccccccaacctggtccctcgagcgaaccaggagctggctgtctggcagggagcactcagtattcaccggagtggctattgtccactgtagctcaaaggaccatcagctagacacaagggtgtccgagttctacgaagagacaaaggtcaaattctctgaactctcagaggaactgctgtgggagtacgtgcactctggagagcctatggataaggcagggggatatggtatccaagctttgggcggtatgttggtggaaagtgtgcacggtgactttctcaatgtcgtcgggttccccttgaatcacttctgcaagcagctcgtgaaactctattatcccccgcgccccgaagatctgagaagatcagtaaaacatgattcaattccagcggcagacaccttcgaagacctgagtgatgtcgaaggcggtggctctgaaccaacgcaaagagacgctgggtctagagatgagaaggcagaagccggagaggcagggcaggcaaccgctgaggctgagtgccatcgtaccagggaaaccctgcctcctttcccaacaagattgttggagcttatcgaaggattcatgctctccaaaggcctcttaacagcctgcaagctgaaagtattcgatctccttaaagacgaggccccccaaaaggcggctgacatcgcgagtaaagtggatgcatccgcctgcggaatggagagacttttagatatctgcgctgctatggggctcctggagaagacagagcaagggtatagtaacactgaaacagccaatgtttatctcgcttctgacggggaatatagccttcacggcttcatcatgcataacaatgatttaacgtggaacctgtttacttacctggagttcgcgatccgcgagggtacgaatcagcaccatcgcgctctgggaaagaaagccgaggatctgtttcaagatgcctactaccaaagcccggaaactcggctccggtttatgcgggcaatgcacgggatgaccaagctgactgcctgtcaggtggccactgcgtttaacctttctcgctttagctcagcatgcgatgtaggcgggtgtacaggtgctctcgcacgggagcttgcccgtgaatatccaagaatgcaggtcactgttttcgatctgcccgatattatcgagctggcggcgcatttccagccgcctggaccccaggctgtgcaaatccactttgcagccggcgattttttccgcgacccattaccaagtgctgaactctatgtcctctgtaggattcttcacgattggcccgatgacaaagtgcataagctgcttagtcgggtggcagagagctgcaaacccggggccggattgctcctcgtggagacactgctggatgaagagaaaagggtagcacagcgagcactgatgcagtcactcaatatgctcgtgcagacagaaggaaaggagcgctccctgggcgagtatcaatgcttgctggagttacacggttttcatcaggtgcaggtggtgcacctcggaggggtcctcgacgccatcctggccacaaaagtggctccctag

SEQ ID NO: 16354 - DNA, 621 bp, synthetic construct
  source 1..621: mol_type = other DNA; note = Synthetic coding sequence
atgagccaaactagccttaagcagaagaagaatgagccggggatgcgctccagtaaggaatcactggaagccgaaaagcggaaagagtctgataagacaggggtgaggttatccaatcagatgcggagggctgtgaatccaaatcacagtcttcgatgctgcccttttcaagggcatagctcatgtagacgatgcctgtgtgccgccgaagggacagccctggggccatgccatactatcagaatctatatccatatgtgtttactgtgggaacaggggcagcagattacgatgatgagggtgtcgagagaccacacaaccgatagtggtggggaaccccagaccacatggggctctcaggagagctccctgcggaagacagacagcagaggataccttgttagaagccagtggagtaggatctccaggtcacctagcactaaagccccatctatcgacgaaccccgatcccgaaacacctctgccaagttaccttcgtccagtacaagttcaagaacccccagcacaagcccttccttgcatgattccagccctcccccactgtcagggcaaccaagtttgcagccgcccgcctcccctcaactgcctagaagcctgtag

SEQ ID NO: 16355 - DNA, 414 bp, synthetic construct
  source 1..414: mol_type = other DNA; note = Synthetic coding sequence
atggcaccaggaacccccaagagcctgttactttccgcatcgattaagcgggaaggcgagagccccacggccagtccgcactcaagtgctacagacgacctgcatcattcagaccgctatcagactttcctccgagtcagggccaataggcagaccagactgaatgcccgcattggcaagatgaaaagaaggaaacaggacgaaggtcaggtctgtccactctgcaataggcccctggccggttctgaacaagagatgtcccggcacgttgagcactgtctgtctaagcgagagggatcttgtatggcagaggacgacgccgtcgatattgaacatgaaaacaacaacaggttcgaggaatatgagtggtgcggtcaaaaacgcattagggctaccaccctcttggagggttag

SEQ ID NO: 16356 - DNA, 570 bp, synthetic construct
  source 1..570: mol_type = other DNA; note = Synthetic coding sequence
atgatcccaatttgccctgttgtgtccttcacctatgttccatcccgcctcggcgaggacgcaaaaatggctaccggcaattacttcggcttcacccactcaggagctgctgccgccgccgcagccgcgcagtactcgcagcagcctgcttcaggcgtcgcctattcccatccgaccacggtggcttcctacacagtgcaccaggcccccgtcgccgcacacactgtcacagcggcttacgcaccagcggccgcaacagtggcggtagcgaggcccgcgcccgttgcagtggctgctgctgccacagccgcagcttatggggggtaccctaccgcacacacagctacagactacgggtacacacaacggcagcaggaagccccaccccctccaccacccgccacaacccagaattaccaggatagctactcttacgtccgatcaacagcccccgcagtggcgtatgatagcaagcagtactatcagcagccagcagccactgaagctggaagctcttccagctgttgctgttgctgtaattcatgcctggatagggatcatctgtattag

SEQ ID NO: 16357 - DNA, 387 bp, synthetic construct
  source 1..387: mol_type = other DNA; note = Synthetic coding sequence
atggacgccgatagcgacgtggcactcgatattttgattacaaatgtagtgtgtgtcttccggaccagatgtcaccttaaccttcgaaagattgccttagaaggtgcaaatgtgatctacaagcgggatgtggggaaagtgctcatgaagctcagaaaaccacggataacggccacaatctggagctcaggcaaaatcatctgcacgggcgccaccagcgaagaggaagctaagttcggagccagacgactagctcggagtctccagaagctggggtttcaggtgatatttacagattttaaagtggtaaacgtgttggccgtctgcaacatgcctttcgaaatccgcctgcctgagtttactaagaacaacagaccccacgcttag

SEQ ID NO: 16358 - DNA, 381 bp, synthetic construct
  source 1..381: mol_type = other DNA; note = Synthetic coding sequence
atgtggacagcccggggaccattcaggagggaccgatggtctagcgaggacgaggaggccgccgggccttcacaggccttgtcccctctgcttagtgacactcgtaagattgtctctgagggtgaactcgatcagcttgcccaaatacgccccttaatattcaacttccatgaacagactgccatcaaagattgcctgaagatcttggaagaaaagactgccgcttacgacatcatgcaagagttcatggctttggagttgaaaaacctacctggagagttcaactcaggcaatcagccaagtaatcgcgaaaagaacaggtaccgtgatatactgcccttccagcaccacggctattccggccctaacgaacgaacctag

SEQ ID NO: 16359 - DNA, 912 bp, synthetic construct
  source 1..912: mol_type = other DNA; note = Synthetic coding sequence
gaggatgagtacatccagtcccacaacttcgactcggccatgaaggttacttctcagggtcaaccttcccccgtcgagcctcgaggcccattctatttctgcagacttctgctcgacgatcttgggatgaactcctgggacagaaggaagaatttccatctcctcaaaaagaatagcaaactcctgcgtgagctgaagaacctcgacagcaggcagtgccgcgagactcataagatagccgtgttctatatcgcagagggacaggaggataagtgctcaatcctgtcaaatgagcgaggatctcaggcgtacgaagatttcgtcgcaggcctcggatgggaggtggacctcagcacccactgcggtttcatggggggtcttcagcgaaatgggagcaccggacagacagctccttattacgccaccagcaccgtggaggttatcttccatgtcagcactcggatgcccagcgatagtgatgattcactcactaaaaaactccgccaccttggaaacgatgaagtgcatattgtctggagtgagcattcccgtgactatcggcgaggaattatcccgacggcgtttggcgatgtctctatcattatctaccccatgaaaaaccatatgttcttcatcgccattacaaagaagcctgaagtaccttttttcggacccctttttgatggtgccattgtaagcgggaagctgttgcccagtcttgtttgtgccacctgtatcaatgcctccagagccgtcaaatgtcttatccccttataccaatcgttttatgaggagagggctctgtatctagaggccatcattcaaaaccaccgggaggtgatgacctttgaagactttgcagctcaggtatttagtccatccccttcctactcactgagcggcactgattag

SEQ ID NO: 16360 - DNA, 2883 bp, synthetic construct
  source 1..2883: mol_type = other DNA; note = Synthetic coding sequence
atggaggtacaggtgagtcaggccagccttggctttgagctcacctcagtcgaaaagtctctccgagaatggtcacggctgtctagggaagtcattgcatggctatgtcctagcagtcctaatttcatcttgaacttccccccccctccatctgcaagcagcgtttcgatggtgcagctgttttctagtcccttcggttaccagtcacccagcgggcattcagaggaggagagagaaggcaacatgaagtccgccaagccacaggtaaaccattcacagcatggcgaaagccagcgggctttaagcccactgcaaagcactctgagcagtgctgcaagcccatcccaggcttacgagacatatattgaaaatggcctgatatgtctgaagcataagattcggaacattgagaaaaagaaactgaagctggaggattacaaggaccggttgaaaagcggggagcatctgaacccggatcaactagaagctgtggaaaaatacgaagaagtacttcacaacttagagtttgcgaaagaactgcaaaagaccttcagcggcctgtcattagatctccttaaggcccaaaagaaagcccagcggagagaacacatgttgaaactcgaagcagagaagaagaaactgaggactatcctacaagtgcagtatgttttacagaacctgacccaggagcacgtacagaaggacttcaagggcgggctgaacggggcggtgtacctgccttctaaggagctggactacctgataaaattttctaagcttacgtgtcccgagaggaatgaatctctctctgtggaggatcagatggagcagtcctccctttatttctgggatctcctggaaggaagtgaaaaggctgtggttgggacgacatacaagcacctcaaagacttacttagtaagctactgaattccggttacttcgagtctatccctgtccccaaaaacgccaaagagaaagaggtcccgctcgaggaagagatgctcatacaatctgagaaaaagactcagttaagcaagaccgagagcgtgaaagagtccgaaagccttatggagttcgcacaaccagaaattcaaccacaagagttcctgaaccggcgatacatgaccgaagttgactatagtaacaagcagggggaggagcaaccgtgggaagccgattatgccaggaagcctaacctgcctaaaaggtgggacatgctcaccgaacctgatgggcaggagaagaagcaggaatcttttaagagctgggaggcatcaggaaaacatcaggaggtcagcaagcctgcggtttcgctagaacagagaaagcaggacacgtccaaactgcgttctaccctgcccgaggagcagaagaaacaggaaattagcaaatcaaaaccttcaccgagtcaatggaaacaagacacccccaaatctaaagcaggctacgtccaagaagagcagaagaagcaggagacccctaaactctggcctgtgcagttacaaaaggaacaggatcccaagaagcagacacctaagagctggactcctagtatgcagtctgaacagaacactacgaagtcctggacaacccctatgtgcgaagagcaggacagtaaacagcctgaaacacccaagtcatgggagaacaatgtcgaatctcagaaacactcgctgaccagccagtctcagatcagtcccaaaagttggggtgttgctaccgctagcctgatccctaatgatcaactactgccacgcaaactgaacacagaacctaaagacgtacccaagcctgttcatcagccagtggggtcatcgtccacactgcctaaggatccagtactccggaaagagaagttgcaggatctcatgacccagatccagggaacttgtaactttatgcaagagtccgtgctggactttgacaaacctagttccgccatccctactagtcaacccccaagcgcgactcccggaagtcccgtggcgagtaaggagcaaaacttgagcagccaatctgattttctgcaggaaccactgcaggcgacctcgagtccagtgacatgttcttccaacgcttgcctggtgacaacagatcaggcttccagcggctctgaaaccgaatttatgacaagtgagacccccgaggccgcaattccccctgggaaacagcctagttcccttgccagccccaaccccccaatggccaaggggtccgagcagggctttcaaagtccacccgcatcttcctccagcgtcacaatcaacactgcccccttccaagcaatgcagaccgtgttcaacgtgaatgccccgctgcccccccggaaggagcaggagattaaggagagcccctatagcccgggttataaccagtcctttaccacagcctcgactcaaacaccaccccagtgccagctcccgtctattcatgtggagcagacagtgcactcccaagagactgccaattaccaccccgatggcacaatccaggtttccaacggatccctggctttttacccagcacaaactaatgtgttcccaaggcctactcagccctttgttaactctcggggctcagtccggggatgtacaagaggagggagactcatcacaaactcctaccgcagcccaggagggtacaaaggctttgacacttaccggggactgccttctatctccaacgggaactactctcagcttcagttccaagcccgtgagtattctggcgccccgtactcccagcgtgacaacttccagcagtgctacaaaagaggtggtacatctgggggcccgagagcaaattccagggctaactgttttattatgcgcaatagcctgctgctcattaagcagcaggggggagtcattttgttgaggtag

SEQ ID NO: 16361 - DNA, 1746 bp, synthetic construct
  source 1..1746: mol_type = other DNA; note = Synthetic coding sequence
aataataacggaacttacgatggcattgcctatttcgagtgcaaagagaagcacggcatttttgcccccccccagaagattagccatattcccgagaattttgatgactatgtagacattaacgaggatgaagattgctactccgacgagagataccagtgttacaatcaggagcagaacgacactgaggggcctaaggaccgtgagaaagatgtttctgaatacttttacgagaagtctctgccctccgtgaacgacattgaggcctctgtgaaccgatcccgttctctgaagatcgagacagataacgtgcaggatatctcaggagtcctggaggcccatgtgcaccagcagagttccgtggactcccagatttcctcaaaggagaacaaggacttgatcagcgacgccacagagaaggtcagcatcgctgccgaggacgacaccctggataacacgttttccgaagaactcgaaaagcagcagcagttcacagaagaggaagacaacctgtatgccgaagcctccgaaaagttatgtacccccctcttggatctgttgacccgcgaaaaaaatcagctagaggctcagctgaagagcagtctcaatgaggaaaaaaagagcaagcagcagttagaaaaaatatccttgttgactgactcgctgcttaaggtgttcgtcaaggataccgtgaaccagctccagcagatcaagaaaactcgggacgaaaagatacagctgagtaaccaggagctcctgggggatgaccagaagaaagtgacccctcaggatttgtcccagaatgtggaggaacaaagtccgtctatatctggttgtttcttgtcatctgagctggaagatgaaaaggaagagataagttcccctgacatgtgcccccgcccagagtctccggtgtttggagcctccggtcaagaggaacttgccaaacgactcgccgagctagagctttcccgcgagtttctctcggccctaggtgacgatcaggattggtttgatgaagatttcggtttgtcctctagccataaaatacagaaaaataaagctgaggagaccatcgtgcctctaatggctgagcctaaaagagtcacacagcagccatgcgaaaccctcctggctgtgccccataccgccgaggaagtggaaattcttgtgcacaacgctgcagaagagctctggaaatggaaagagcttggtcatgatttgcactccatttcaatccccactaagctgctggggtgcgccagtaaggggcttgatatcgagagtacaagcaagcgagtttacaaacaggccgtgtttgacctaaccaaagaaattttcgaagagatctttgcagaagatcctaatctcaatcaaccagtgtggatgaaaccctgcaggataaattcctcctacttcaggcgagtgaaaaaccccaataacctggatgagattaagagttttatcgccagtgaagtgttaaaattgttctccctcaagaaggaaccgaaccataaaacagattggcagaaaatgatgaaatttgggagaaaaaaacgggatcgggtggatcacatcctagtacaggagctgcatgaagaggaggcacagtgggtcaactacgacgaagacgagctctgcgttaagatgcagctcgctgatggcatttttgagaccctgatcaaagacactattgacgtgctgaatcagatctctgaaaagcagggacggatgctactcgtgtag

SEQ ID NO: 16362 - DNA, 345 bp, synthetic construct
  source 1..345: mol_type = other DNA; note = Synthetic coding sequence
atgtggagccttaccgcatctgaaggcgaaagcacgactgcccatttttttttgggagcaggtgatgagggattaggcactcgcgggatcggcatgcggcctgaggaatcagacagcgaattgctagaagatgaggaggatgaggttcccccagaaccacagatcatcgtggggatctgcgcaatgactaaaaagtccaagtctaagcctatgactcagattttagaacgactctgccggttcgattacctcactgtcgtgattttgggggaagatgtgatccttaatgaaccagtagagaattggcccagctgccattgtttgatttcttttcactctaagtag

SEQ ID NO: 16363 - DNA, 918 bp, synthetic construct
  source 1..918: mol_type = other DNA; note = Synthetic coding sequence
atggaggctgaaagctttccctgtctgctgcgtcccttctttaaggaaagatcatgcgcactgagaccggcattccatactgccaagtgtgaaaagctgcagaaagagaaggaggagctcgagcgcagatttgaggcggaaatggcaagactgcaagaagagcacggcgatcaactgctctccattcgctgtcagcatcaagaacaggtggaggatctcactgcctctcacgatgctgctctattggaaatggagaacaaccatacggtggctataaccatcttgcaagacgatcacgatcataaagtccaggaacttatgagcacacatgagctggaaaaaaaagagttagaagaaaattttgaaaaactcaggctgtcactgcaggatcaagttgacaccctcacgttccagtcccaatcgctccgcgatagggcacggcggtttgaggaagcactgcgtaagaatactgaagagcaactcgagattgccctggcaccctatcagcacctggaagaggacatgaagtccttaaagcaggtgcttgaaatgaaaaaccagcagatccacgagcaggaaaaaaaaatcctggagttggagaaattagccgagaaaaacatcatcctggaggagaagatccaggtcttgcagcaacagaacgaggatcttaaggcccgcatcgaccagaatactgtggtaaccagacagctaagtgaggagaatgccaatctgcaggagtacgtggaaaaagaaacacaggagaaaaaaagattaagccgaaccaacgaagaactgttgtggaagcttcagaccggggatccaacatcgccaatcaagttatctcctacctcaccagtgtatcgaggatccagcagtggcccaagctcaccggccagagtgtctaccacgccccggtag

SEQ ID NO: 16364 - DNA, 2319 bp, synthetic construct
  source 1..2319: mol_type = other DNA; note = Synthetic coding sequence
atgcaggagctcgaggaactaaggaagcagctgggcagtgttgccacaggttccacactgcagcagagtctggagttaaagagaaagatgctgcgggataaacagaacaaaaaaaactccgggcagcacttgcccatctttccggcctgggtctatgagcgccctgctcttatcggggacttccttattggagccggaatatccactgacactgccctaccaataggcaccctgccactggctagtcaagagagcgccgtggtagaggatttgctgtatgtacttgtgggcgttgacggcagatacgtgtctgcccagccactcgccggccggcaatctcggacttttctggtagatcccaatctggatctttccatccgcgagttggtacaccgcatactacctgtggctgcatcctatagcgcagtgactagatttattgaagaaaagagttcctttgaatacgggcaggtgaatcacgcactggccgcagccatgcgaaccctcgtcaaggaacacctcattctggtcagtcagctggagcagctgcatcgccagggcctcctctctctgcaaaaactatggttttatatacagcctgctatgcggaccatggacattctggcaagcctggcgaccagcgtggacaaaggagagtgtttgggcggatcaacacttagcctcctgcacgaccggagcttcagctacacaggtgactctcaggcccaagaactgtgcctttaccttacaaaagcagcctccgccccatattttgaagtgctggaaaagtggatatatcgtggcattatccacgatccatattcagaatttatggtcgaggaacatgagttgcgtaaagagaggatccaggaggattacaacgacaagtactgggaccaacgatataccattgtccagcaacaaataccatccttcctgcagaaaatggcggacaaaattctgagcactggaaagtacctgaacgttgtaagagagtgcgggcatgacgtgacgtgccctgtagctaaagagatcatttacacactgaaggaaagggcttacgtcgagcaaatagagaaggcctttaattatgccagcaaggttctactggactttctaatggaagagaaggagctcgtggcccatctgcgctccatcaagcgctactttcttatggatcagggggatttttttgtgcacttcatggacctcgcggaagaggaactgcgcaagcctgttgaggacatcactcctcccaggttggaggcgctgctcgagctcgcgttgcgtatgtcaaccgctaacaccgacccctttaaagacgacctgaagattgatcttatgccacacgacctaattacccaacttctgcgtgtgctggcaatcgagactaagcaggagaaagcaatggctcatgctgatcctactgagctggccctgagcgggctggaggccttctctttcgactacatcgtgaagtggccccttagtcttatcatcaacaggaaggccctcacacgctaccagatgttgttccggcatatgttttattgcaagcatgttgaaaggcaactatgttcagtgtggatatcaaataaaactgctaaacagcacagccttcactccgcacagtggttcgcgggcgccttcactcttcggcaacgcatgctcaatttcgtgcagaacatccaatactatatgatgtttgaggttatggagcccacatggcacatcttggagaaaaacttgaagtctgcctccaacattgacgacgtgctgggccatcacaccggatttctagatacttgcctgaaagactgcatgctgacgaatcccgagctgctgaaggtgttttctaagttgatgtctgtatgtgtaatgtttaccaactgtatgcagaagttcacccaatctatgaagctggacggagagctcggcggtcagacgttggagcacagtactgtcttgggactccccgctggagccgaggagcgtgcgcggaaagaattggctaggaagcacctagcagagcacgcggacaccgttcagctggtatctggcttcgaagctaccatcaacaaattcgataagaacttttctgcccacctgctggatttgctggccaggctgtcgatatattctacaagcgactgtgagcacggcatggctagcgtgatttcccgattggacttcaacggcttctataccgagcgcttagaacgcctttccgcggaaagatcccaaaaggccaccccacaggtccctgtgctgcgtggaccgccagctccagcgcccagagtcgccgtgactgcccagtag

SEQ ID NO: 16365 - DNA, 1203 bp, synthetic construct
  source 1..1203: mol_type = other DNA; note = Synthetic coding sequence
atggatttcaatatgaaaaagcttgcttcagacgccggtatctttttcacccgggcagtgcagtttactgaagagaaattcggtcaagctgagaagactgaactggatgcccatttcgaaaatctgctggccagagcagacagcacaaagaattggacagagaaaattctgcgtcagaccgaagtgctcctccaacccaatccttctgcgcgagtggaagagtttttatatgagaagcttgaccggaaagtgcctagtcgcgtgacgaacggcgagctcctggcccagtatatggccgacgcagcgagcgagctcggcccaacgaccccctacggtaaaaccctgatcaaggtggccgaagcagagaagcagctaggcgctgcagaaagagacttcatccacactgcttcaattagttttctcactccgctccgtaatttcctggagggcgattggaagactataagcaaggagaggagactgttgcagaacagacgcctggatctagatgcatgcaaggctcggctgaagaaggctaaggccgccgaggcaaaagccaccactgtaccagatttccaggagacccgacctaggaattacatactctccgcctccgcctctgccctatggaatgacgaggttgacaaggcagagcaggagctcagagtcgcccagaccgagttcgacaggcaggcggaggtgacaaggctcttgctggagggcataagttcaactcacgtgaaccacctgcggtgtcttcacgagtttgtgaaatcccagaccacttattacgctcagtgttataggcacatgctggatctacaaaagcagctgggcagctcacaaggagcaattttccccggtactttcgtgggaacaaccgaaccagcttcccctcctctgagcagtacaagtccaacgaccgccgccgctacgatgccagtggtccctagtgtggcttccctggcccccccaggcgaggcatcgctctgccttgaggaggtagctccaccagcatccggtactagaaaagcccgtgtgctctacgactacgaagccgctgatagttccgagcttgctctgctggctgatgagttaatcaccgtgtatagcttgcctggcatggatccggattggttaatcggcgaaaggggcaacaagaaaggcaaggtgcctgtcacatatttggagttgctctcctag

SEQ ID NO: 16366 - DNA, 1827 bp, synthetic construct
  source 1..1827: mol_type = other DNA; note = Synthetic coding sequence
atgccattttggccgattcgatgtctcaagcgctctcggcggatgcctcgtgggggggccggagaacgggagaaggttcctgctaacccagaggctctcctgctcatggcgtccagccagcgggacatggaggactgggttcaggcaattaggagagtgatttgggcacctttgggaggaggcattttcggacagcgacttgaagagacagtgcaccacgaaagaaagtatggtcccagattagcacctctgcttgttgagcagtgtgtagactttatacgtgagagaggacttaccgaagagggactgttccggatgcccggccaggccaaccttgtgcgcgatctacaggattcattcgactgtggggagaagccgctcttcgacagcaccacggatgtgcacaccgtcgctagcctcttgaagctctacctacgggagttgccagagccagttgttcccttcgctagatacgaggattttctgagctgtgctcagttgctaacaaaggacgagggagagggaaccctggaactggcaaagcaagtcagcaacctcccgcaagctaactataatctcttgcgctatatttgtaaattcttggatgaggtgcaggcatacagtaatgtgaacaagatgtcagtccagaatcttgctaccgtttttggaccaaacatattacgtcctcaggtagaggacccagtcacaatcatggaaggtacaagtctggtgcagcacctcatgacagttttaatcaggaagcacagccagctttttacggccccggttccagaggggccaacatcgccacgaggcggtctccagtgtgcagtgggctggggttctgaagaagtgactcgagatagtcagggcgagcctggtggccccgggctaccagcgcaccgaacatcaagcctggatggggcagcagtggccgtgctgtccagaactgctcccacgggtcctggctctcggtgctcacccgggaaaaaggtccaaacactgccctcctggaaaagtagctttaggcagccgaggagcctttctggatctcccaagggcggggggagtagcttagaggtcccaattatctcttccggaggcaattggcttatgaacggtcttagcagtttacgtggccaccgcagagcctccagcggggatcgtctcaaagactccggctccgttcaaagactgagtacctatgacaatgtccctgccccgggcttggtgcccggcattccatcagtcgctagtatggcctggtccggcgcttctagcagcgaatcgtcagtcggcggatctctttcgagttgtacggcctgcagagcctctgactcatccgctaggagctctctccacacggactgggctttggaaccatctcccctgccctcttctagcgaagaccctaagagcttggatttggatcactcgatggacgaggctggcgccggggccagcaactcagagcctagcgagccagatagcccgacgcgggaacatgctaggcgctccgaggcattgcagggactggtcacagaactgcgtgcggaactgtgcagacagagaaccgaatacgaaagatctgtgaagaggattgaggaggggtccgctgacctgaggaaacgaatgagccggttagaagaggagcttgatcaggagaagaaaaagtacattatgctggagataaagttgagaaactccgaacgggccagggaggacgctgaacggagaaatcagctgctgcagcgggaaatggaagagttcttttccaccctgggctccctgaccgtcggcgccaaaggcgccagggcacctaaatag

SEQ ID NO: 16367 - DNA, 708 bp, synthetic construct
  source 1..708: mol_type = other DNA; note = Synthetic coding sequence
atgttctcggaagagtgtattatggacgttattggctgtctcgagtacgacccggcactgtcccagcctcgaaaacacagggaattcctgacaaaaacagctaaatttaaggaggtaatccctattagtgaccccgaacttaaacagaagattcaccagacttaccgggtgcagtacatccaagatatggtgctccctaccccaagcgtgttcgaagaaaacatgttatcaaccctgcattcattcatcttttttaataaagtcgagatcgtgggcatgctgcaggaagatgaaaagttcctgactgacctgtttgctcagctgacggatgaggcaaccgatgaagagaaacgccaggagctggtaaacttcttaaaggaattttgcgcgttcagccagacacttcagccgcagaatcgagacgcctttttcaaaaccctgagcaatatgggcattctgcctgccttagaagttattctgggcatggacgacacccaggtgcggtccgccgcaacagatatattttcttatttagtggagtacaacccttcaatggttagagaattcgtgatgcaggaagctcagcagaatgatgacgtcagcaaaaagctcacagagcagaaaataacatctaaagtgaatattatttgcacgaactccaagtacctatacataggatcctacaattgcttctactattctttctag

SEQ ID NO: 16368 - DNA, 3513 bp, synthetic construct
  source 1..3513: mol_type = other DNA; note = Synthetic coding sequence
gtatacaagggacgacatgtgaaaacgggccagctggccgctatcaaggttatggacgtgactgaagacgaggaagaagagatcaaactcgagattaacatgctcaaaaagtactctcaccatcgcaatatcgctacgtattatggcgcattcatcaagaaatcccccccggggcacgacgatcagctctggctggtcatggagttttgcggggcaggaagcatcacagacctagtgaaaaatactaagggaaacacactgaaagaggactggatcgcgtatatcagcagggagattctgagggggctggctcacctgcacatccaccacgtcattcaccgtgacattaagggtcaaaatgttctgctgacggagaatgcagaagtgaagctggtggattttggggtcagtgcacaattagataggaccgtgggcaggcgtaatacctttatcggaaccccctattggatggcccccgaggtcatcgcatgcgatgagaatcctgatgccacctatgactatcgcagcgacctgtggtcctgcggaattactgccatcgagatggcagaaggggcccctcccttgtgtgatatgcatccaatgcgtgctctgttcctgatccccagaaacccaccccctcgtctcaagagcaagaagtggtccaaaaagttcttcagtttcattgagggttgtctggtgaagaattatatgcagcgcccatccactgagcagctgcttaaacatcctttcatccgagaccagccaaacgaaagacaggttcgtattcaactgaaggatcatatcgataggaccagaaaaaagcggggagagaaggacgagactgagtacgagtacagtggctccgaagaggaagaagaggaagtgcctgaacaggagggggaaccttccagcatcgtgaacgtgcccggagaatccactcttaggcgcgatttcctgagacttcagcaggaaaacaaggaaagaagcgaggcgctcaggagacagcagctgcttcaagaacaacagctgcgggagcaggaagagtataagcgacagttactggccgagcggcagaagcgcattgaacagcaaaaggagcagagacggcggcttgaagaacagcaaaggcgtgagcgagaggcccgcagacagcaggagcgtgagcagaggaggcgagagcaagaggagaagcggcggctggaagagcttgaacgtaggcgaaaagaagaagaagagcggaggcgcgccgaagaggagaaacggagggtggaaagggagcaggagtacattcgccggcaactcgaggaggagcagcgacacctcgaagttctccaacagcagctcctgcaagaacaggccatgcttctgcatgaccacaggcgcccccacccccagcactctcagcaaccgcctccaccacaacaagaaaggagtaaaccatcctttcatgcacctgagccaaaagcccactatgagccagcagatcgagcgagggaagtagaagaccgctttaggaaaaccaatcactcttctcctgaggcgcagtctaaacagaccgggagagtgctggagcctcctgtcccatcccggtccgagtccttctcaaacgggaacagtgagagtgtgcatcctgctctgcagcggcctgctgaaccacaagtgcccgtgaggacaacatccaggtcacccgtgctttctcggcgggattctccccttcagggaagcggccagcaaaactcacaggccgggcaacgcaatagcacatccatagagcctcgcctactatgggaacgagtggagaagcttgtgccccgccccgggtctggctcctctagcggtagtagtaacagcggctcacaaccaggctctcatccagggagtcagtctgggagcggcgaacggtttcgagtgcgctctagttcgaagtctgaggggtcaccaagccagcgcctcgaaaacgctgtaaaaaaaccggaggataaaaaagaggtgtttagaccgttaaaacctgccgacctgaccgcccttgccaaggagctgcgcgctgtggaggacgtgcggcctccgcacaaggtgacagactactccagctcgtcggaggagtctgggaccacggacgaggaggacgacgacgtggagcaggaaggtgcggacgaaagcacatccggccccgaagacaccagagctgccagttctctcaatctgagcaatggagagaccgagagtgttaagacaatgattgttcatgatgatgtggagtcggagcctgctatgacaccctccaaggaggggactctaattgttaggcagactcagtctgcatcctccaccctccagaaacataagagcagttcaagcttcactccattcatcgacccgcggctcctccaaattagccctagcagcgggaccactgttaccagtgtcgtgggcttctcttgtgatgggatgaggccagaggccattcgccaggaccccacccgcaaagggagtgtcgtcaacgtgaatcccacaaataccagaccacagtcagacacaccagaaattagaaaatacaaaaagagattcaatagcgaaatcctctgtgcagctttgtggggagttaacctcctggttggtacagagtcgggcctcatgcttctggatcgctcgggtcagggaaaggtgtaccctctgattaacagaaggaggttccaacagatggatgttttggaaggcctgaacgtcctcgtaacaatctctggtaagaaagataaattaagagtgtactacttatcttggctgaggaacaagatattgcataacgatcccgaggtcgagaagaaacagggatggactactgtaggtgatctagaaggctgcgtgcactataaagttgtgaagtatgagaggatcaaatttttggttattgcactgaaaagttcagtggaagtgtatgcctgggcccccaagccgtaccacaaattcatggcttttaagtcattcggagaactcgtgcataagccactcctcgtggacttaaccgtggaagaaggtcagcgtcttaaggtaatttacggtagctgcgccggcttccacgctgtggatgttgacagtggatctgtgtacgacatatacctgccgactcatattcaatgttcaatcaaaccacatgcgatcatcatcttgcccaacacagacggcatggagttgctggtgtgctatgaggacgaaggagtttacgtcaatacctatggcagaatcactaaagatgtcgtcctccagtggggagaaatgcctacctctgttgcttatatacggagcaaccaaactatgggttggggcgaaaaagccatagagatccggagcgtcgaaaccggacacctcgacggtgtcttcatgcacaagcgtgcgcaacggcttaagtttctctgcgagcgcaacgacaaggtgttttttgcctcggtgcgtagtggcggatcgagtcaggtgtattttatgacgcttggaaggacgagtcttctctcttggtag

SEQ ID NO: 16369 - DNA, 1476 bp, synthetic construct
  source 1..1476: mol_type = other DNA; note = Synthetic coding sequence
gtgataatacaccgggtgctagaaaagcaggaagtggaagttttctaccccgattttggcaatataggaattgtgcagaagagtagcctgcggttcctgaaatgctgttataccaagttgcctgctcaggctataccatgctcactcgcatgggtccgccccgtggaggagcattggacctcaaaggccattctgcaatttcaaaagttatgcggactgaagcctctagtgggcgtggtagatgagtacgttgatggtatattgaatatttttctgtgtgatactagttctaacgaggatgtctactttcatcacgtgcttcggacagaaggccatgccatcgtttgccgcgaaaatatcagttctaaaggatttagcgaactgaatccgctggccctctacacaacctcctcaggcggccccgaagacattgtactgacagaactcggctatccgtcccagcagcactacttcaatgaagacaggaaaattagcccgcaatccaaagaatccgagctcagaattctccaggatatcaatgacgagaaatctttatctcacctcaagtctgagagtaaggagcccctcaaagattccgaattcgagagcctcaaaacatgcaataaatcttttgaggaggatcctaaatggagcaatcctgagccaaacgacctaaaggaggagaacgaggatgagataccgaccggaatgccctgcctggaatccgttactataggggacgatatttgggatgaaaactggttacccctgcaggctaagatgggcaagggcggcgacgccgcaagccacttgtttactgctagtctcggcggaaaaaaccagtactccagttgtaaagagatgccgcagaaggattggtgcttctctactcccaaggacacatgggacgactcttggcaaccttctggactcgtgaacggtaccaaggtggaggtgcataagcctgaggtcctgggggcacaggagaaaaacactggaaccaaccggactcaaaaacagcttgacattaatggtagtagcgattcctctaccctcccgaaacttgaggagttctgtacatccctgacccagagcgaacagagcgctgacgggtcacagagcgaaccaaataacagccagacccagcccaaacagatccagctcagcacagcggcaccttgcagtactacagccgtagatgactcagcggagaaacccagcggtagtgtcgaaagcagcccggaaatcttaaagaatgaagatttctcctcaagccgggccattacgctgtataaagataaacgccaggagtccgttgatcagctgtcattaattctctcatatgaatgccagatttcccaaaagctgtacattccgaggagcactgctaccgccgctctgggggcggccgcccgcctggctacaagtcgtagtctgctgcattggtatcctagtgtcaaaaggatggaagcctag

SEQ ID NO: 16370 - DNA, 426 bp, synthetic construct
  source 1..426: mol_type = other DNA; note = Synthetic coding sequence
atgcctaccacctccaggccggcgctggacgtgaaaggcggaacctctcctgccaaggaggatgcaaatcaggagatgagttctgtggcctacagtaatcttgctgttaaagaccgaaaggccgtcgcaatactccattaccccggcgtagccagtaacgggaccaaggcctcaggggcccccacgtccagctccggctcccctatcggttctcccactacaacacccccgacaaagccaccatcctttaaccttcaccccgccccccacctgctcgcatcaatgcacctccagaaactgaattcacaatatcagggcatggcagccgctacccccggccagcctggggaagccggtcccctgcaaaattgggactttggggcccaagcagggggggcagagtctttatcaccctccgcaggttag

SEQ ID NO: 16371 - DNA, 1188 bp, synthetic construct
  source 1..1188: mol_type = other DNA; note = Synthetic coding sequence
atggcgagcgctgcatccgtcaccagtctggctgatgaggtgaactgtcccatctgccagggaacactccgggagccagtgacaatagattgtggccataatttttgtcgggcttgccttactagatactgcgagatcccaggccccgatctcgaggaaagccctacttgcccattatgcaaggagcccttccgacccgggagctttagacccaactggcaactggctaatgtggtggagaacatcgagagactgcagctggttagtaccttgggtctcggagaagaggatgtctgccaggaacacggcgagaagatttatttcttctgcgaggacgatgaaatgcagctatgcgtcgtctgcagggaagccggtgaacacgccacacatactatgcgctttctagaagacgcggctgcgccttatagggagcagatccacaaatgcctcaagtgcctgagaaaggagcgcgaagagattcaggaaatacagagccgcgagaacaagcggatgcaagtgcttctgactcaggtctctactaagagacagcaagtcatatcggaattcgctcacctacgaaaatttctcgaggagcaacagtctatcttgctggcccagctcgaaagccaagatggtgacatcctgcgccagcgggacgagtttgacctgttggtagctggggagatctgccggttttcggcccttatcgaggagctggaggaaaagaatgaaaggcccgcacgtgaattactcactgatatccgcagcactttaatcaggtgcgaaacgcgcaagtgccgcaaaccagtggctgtgtctcctgagctgggacagcgaattcgtgacttccctcagcaagcgctgccacttcagagagagatgaaaatgttcctagagaagctttgttttgagcttgactacgaacccgcccacatctccctggatccgcagacatcacatccgaagcttttgctcagtgaagatcaccaacgtgcgcagttttcttacaagtggcaaaatagcccggacaacccacagcgatttgatagagccacctgcgtgctcgcccacaccgggatcactggaggccgccacacgtgggtgtggatggcccgcgtgcccggagactcaggatgttgtcagttttgcagccctccatccgtcctgggcacagaggtagcagcttag

SEQ ID NO: 16372 - DNA, 1344 bp, synthetic construct
  source 1..1344: mol_type = other DNA; note = Synthetic coding sequence
atggcaaccgactcctgggcactggcggtggacgagcaggaggccgccgtgaagagtatgaccaacttgcagatcaaggaggagaaggtaaaggccgacacaaatggaattatcaaaacaagcacgacagcagaaaaaacagacgaagaggagaaagaggacagagccgcccagagccttttgaacaagttaatcaggtcaaatctcgtagataatacgaaccaggtggaggtgctgcagcgcgacccaaactcacctctgtactcggtgaagtccttcgaagaactgcggctgccacaaaatctgatcgctcagtcacaatctggaactggtaagacagctgcattcgtgctggccatgctgtcgagagtcgaaccatccgaccggtacccacagtgtctttgcttgtcacccacctacgagctggccctccagaccggtaaggtgattgaacagatgggaaaattttatccagaactgaagcttgcttacgctgtgcgcggtaataagctggaacgagggcagaaaattagtgaacagattgtcatagggactcccggcactgttttggactggtgttcaaaactcaagtttatcgacccaaagaaaataaaggtcttcgtcctggatgaggccgatgtcatgatcgccacgcagggacatcaggaccagagcattaggatccagaggatgcttccacggaactgccagatgctcttgttctcggcgaccttcgaagatagcgtttggaagtttgcccagaaagtggttccagaccctaatgtgattaaactgaaaagggaggaagagacgctagatacaatcaaacagtactacgtcctatgtagctctcgggacgaaaagtttcaggcattgtgcaatctctacggggcaattaccatcgcgcaggccatgatcttctgccacacccgtaaaactgcatcatggttggccgctgaactgtccaaggaaggccaccaagtggcactgctgtcaggggagatgatggtggagcaaagggcagctgtaattgagcggtttagggaaggcaaggaaaaggttctcgttaccaccaacgtttgcgctcgcgggatcgatgtcgagcaggtcagtgtagtgatcaatttcgacctgcccgtggataaagatggcaaccctgacaatgaaacatatcttcatcgaatcggaagaacaggcaggtttggaaagcgcgggttggccgttaatatggtggatagcaagcatagcatgaatatcctgaatagaattcaagagcattttaacaaaaaaatcgaaaggctcgacactgacgacctcgatgagattgagaagatagccaactag

SEQ ID NO: 16373 - DNA, 630 bp, synthetic construct
  source 1..630: mol_type = other DNA; note = Synthetic coding sequence
atggcttcttctgatcttgagcagctgtgtagccacgtaaatgagaaaatcgggaatattaagaagacgctctctcttcgcaattgtggccaggagccaacactgaaaactgtcttaaataaaatcggagatgaaatcatcgttattaacgaactgctcaataagcttgagctggagatccaataccaggaacagactaacaactcacttaaagaactgtgcgagtcgctggaggaggattataaagatatagagcacctaaaagagaacgtcccaagccacctgcctcaggttactgtgacccaaagctggtacatgaaaagtcgccttacctacaaccagatcaacgatgttatcaaagagataaacaaggcagtgatcagcaaatataaaatcctgcatcaacccaagaaatccatgaactccgtgacgcgtaatctgtatcacagattcatagacgaagagacgaaagacacaaagggccgttatttcatcgtcgaagcagacatcaaggaatttaccacccttaaagctgataagaagttccatgtcctcctgaatatcttaagacattgccgccgtctcagtgaggtgcgaggaggcgggctaactcgctacgttattacttag

SEQ ID NO: 16374 - DNA, 1125 bp, synthetic construct
  source 1..1125: mol_type = other DNA; note = Synthetic coding sequence
atggacagcgtgcgatctggcccattcggacagctgtttaggccagataattttattttcggccagacaggtgccgggaacaactgggcaaagggtcactatactgagggtgcagaactggtggatgcagtgcttgacgttgtgcggaaagaatgcgagcattgtgattgccttcagggttttcagcttacgcactcactgggcggcggtacgggaagcggaatgggcacactgctgattagcaaaatcagggaagagttcccggataggataatgaacacgttttcagtgatgcctagccctaaggtgtctgacaccgtggtagagccctataatgctactctgtcggtacatcagcttgtggaaaacaccgacgagacctactgtattgacaatgaagctctgtacgacatttgcttcagaacactgaaactaactacgcccacatatggagaccttaaccaccttgttagcgccacaatgtcaggcgtgactacttccctccgttttcccggacagttgaatgcagacttgagaaagctcgctgtgaatatggttccattccctcggctccatttctttatgccgggcttcgcacctctcacctcacgtggtagccagcagtaccgggctctcactgttcccgagctcacccagcagatgtttgatgctcggaatatgatggccgcctgcgatccacgccacgggagatacctgacagtagctaccgtcttccgcggccctatgtccatgaaggaagttgacgagcaaatgctagctatccagtctaagaacagcagctactttgttgagtggatccctaataatgtgaaagtagcagtctgtgacataccgccgcgcggactcaaaatggcttccacgttcattggcaattcgactgccattcaggagctgttcaaaaggatctcagagcaattcagcgcgatgttccgtagaaaagcttttctgcactggttcaccggagaggggatggacgaaatggaatttacggaagctgaatcaaatatgaacgatctggtgtccgaataccagcagtatcaagatgctaccgcgaacgatggcgaggaagcctttgaggatgaagaggaggagatcgatgggtag

SEQ ID NO: 16375 - DNA, 2289 bp, synthetic construct
  source 1..2289: mol_type = other DNA; note = Synthetic coding sequence
atggccagcctgcttcaggatcagctgacgaccgaccaagatctactgctaatgcaggagggcatgccaatgcggaaggtacgctctaaaagctggaagaaactgcgatatttcaggctgcagaacgacgggatgacagtgtggcacgcccggcaagcccgtggcagtgcaaagccaagtttcagtatctctgacgtcgagacaattcgtaatgggcacgactctgagctcctgcgcagccttgctgaagagcttcctctcgagcagggatttaccatcgtgtttcacgggcgtcgctccaatttggatttgatggctaattccgttgaggaggctcaaatctggatgcgtggtttgcagctattggtggatctggtgacatctatggatcaccaggagagacttgaccaatggctctctgactggttccagagaggcgacaagaaccaagacggcaagatgagttttcaggaagtgcagagattgctgcatctgatgaacgtagagatggaccaggaatacgcgttttctctctttcaagccgccgacacgtcccaatccgggactcttgagggcgaagagtttgtccagttttataaggccttgacaaagcgcgcggaggttcaagaactgtttgagtcattctcagcagatggacagaagctgacattactggagttcttggatttccttcaagaagaacagaaagagagggattgcacatcagagctcgcgttggaattaatcgatcgctatgagccctctgattccggcaaactccgccacgtgctcagtatggacggttttttgtcttacctatgctcaaaagacggagacatcttcaatcctgcctgcctgcctatctaccaagacatgactcagcccctgaaccactacttcatctgcagttctcataatacctacctggtcggggaccagctttgtggtcagtcgagtgtagaggggtacatccgggctttgaagagagggtgcagatgtgtggaggtggacgtgtgggacggaccctctggggaaccggtggtctaccacggccataccctaacctcacgcattttgttcaaagatgtcgtggccaccgttgcgcaatacgccttccagacttctgactatcccgtaatcttatctcttgaaacgcattgctcttgggagcagcagcagacaatggcaagacatttgactgaaatactgggtgagcagctgcttagcaccacactggatggagtgcttccaacgcaactgccttcaccagaggaactaagaagaaagatactggtgaagggcaagaagctgacacttgaggaggatcttgaatacgaggaagaggaggccgagcccgaactcgaagaatccgagctcgctctagagagccagtttgaaactgagcccgagccacaagagcagaacctgcaaaataaggacaaaaaaaaaaaatcaaaaccgattctgtgtcccgccctatcctccctggtaatctatctgaagtctgtttctttcaggtcatttactcacagcaaagaacattatcacttttacgaaatcagtagcttctccgaaacgaaggccaaacggcttatcaaggaagccggcaatgagttcgtccaacacaacacctggcagctttcaagggtatacccatctggcctccgcactgactccagcaactacaatccccaggagctatggaatgcgggctgccagatggtcgccatgaacatgcaaacagctggcttggaaatggatatatgtgacggacacttccgccaaaatggcggatgtgggtacgtcctcaaacccgacttcctgcgggacatacagtcttcgttccaccctgagaaacccatttcaccattcaaggctcagaccctgctcattcaggttattagcggacagcaactgcctaaggttgacaagacaaaagaggggtcaatcgttgatcccctcgttaaagtgcagatttttggggtgagactggatacagccagacaagaaaccaattacgtggagaataatggcttcaatccctattgggggcagacactgtgctttcgggtgcttgtgcctgaactggccatgctcagatttgtggttatggactatgattggaagtctcggaacgatttcatcggccaatataccctgccctggacatgtatgcagcagggatatcgtcacattcatctgcttagtaaagatgggattagcctgcgccccgcatctatatttgtgtatatttgcatccaagaagggcttgagggggatgagtcctag

SEQ ID NO: 16376 - DNA, 1461 bp, synthetic construct
  source 1..1461: mol_type = other DNA; note = Synthetic coding sequence
atggcggaattacaaatgctcctggaggaggaaattccgggaggaagaagagcgttgttcgacagttacactaacctagaacgggtggccgactattgtgaaaacaattatatccaaagcgccgacaaacagagggcactggaggagaccaaagcgtacacgacgcaaagcctcgcctccgtggcatatctcattaatactctggccaacaatgtactgcaaatgctggacatccaggctagtcaactgcgaagaatggaatcatcgatcaatcatatttcccagactgtggatattcacaaggaaaaggtggctaggcgagagatcgggattttgactaccaacaaaaacaccagccggactcataaaatcatcgcccctgccaacctcgagagacctgtaaggtatattcggaaacccatcgactacacaattttggatgatatcggtcatggagtcaagtggcttctcaggttcaaagtgtcaacacagaatatgaaaatgggggggctcccacggacaaccccccctacacagaaacccccgtcaccgccaatgtcaggtaagggcactttgggcagacactccccataccgaaccctggagcctgtgagacctcccgtggtgcccaacgactatgtgccaagcccaacccgcaatatggcgccctcccagcagagccctgttcggaccgcttcagttaatcaaaggaaccgcacctattcctcctcagggagttctggaggatcgcatccaagttcgaggtcctcctctagggagaactcaggttcgggctctgtcggcgtgccaattgctgtgcctacaccttcaccaccaagcgtgttccccgcgcctgccgggtcagctgggacaccgccacttcctgctactagcgcatcagctcccgctccactggtccccgcaaccgttcctagttcgacggccccagatgctgctgcaggtggcgcccagacactcgcggatggctttacgtcgcccacaccacccgtggtgtccagcacgcctcccacagggcaccccgttcaattttactcgatgaacaggccggctagtcggcatacaccaccgactattgggggatcgctgccataccgaagaccccccagtataacttcacagacttccctgcaaaaccagatgaatggaggtcccttctactcccagaacccagtttcggatacccctcctccgcctccaccggttgaagagccagttttcgacgagagccctcctccacccccccctccagaagattacgaagaagaggaagcagcggtagtagaatactccgacccatatgccgaagaggacccgccctgggccccaagatcctacctggagaaggtggtggcgatttatgattacaccaaagataaggaagacgaactgagtttccaggagggggccatcatctatgtaattaagaagaatgacgattag

SEQ ID NO: 16377 - DNA, 2145 bp, synthetic construct
  source 1..2145: mol_type = other DNA; note = Synthetic coding sequence
atgttaagccccaagattagacaggcacgaagagcaaggtctaaatccttggtcatgggagagcaatctaggagcccaggacgcatgccttgtccgcaccgccttggacctgtgctcaaggcgggctggttaaaaaaacagcggagtataatgaagaattggcagcagcggtggttcgtcctgcggggcgaccagttattttattacaaagataaagacgaaatcaagccacagggcttcatcagtctgcaaggcacacaagtaaccgagttgccacccggccccgaggacccgggaaaacacctctttgaaattagtcccggcggggctggagagcgcgagaaggtcccagccaatcctgaggccttacttctgatggcctcaagccaacgagacatggaagactgggtgcaggccattcgccgcgtaatctgggctccgctgggcggaggaacagcgcgtaggagccatgcacatcctcttgaaccgttgccaccaggtatcttcggccaaaggctggaagaaaccgtacatcacgagcgcaaatacggccctcgcctcgctcccctgctggtagagcagtgcgtggactttattagagagaggggactgaccgaagagggactttttcggatgcccggacaggccaacctagtccgggaccttcaggactcttttgattgtggggagaaaccgctttttgactcaacaacagatgtacacacagttgctagtttgctgaagctctatctgagggagctgccagagccagtggtgccttttgcaaggtacgaggatttcctgagttgtgcccagctgctgaccaaagatgaaggggagggtaccctggaactggcaaagcaggtcagcaatttgccacaggcaaattacaatctactgcgctacatctgcaagttcctggatgaggttcaggcctacagcaacgtaaacaaaatgtcagttcagaatctcgcaacagtcttcggccctaatattctcagacctcaagtagaagaccccgtgactatcatggagggcacaagcctggtgcagcacttaatgaccgttcttatcaggaaacactctcagctcttcactgctccagtgccagaaggcccaactagtccgcgggggggccttcaatgcgccgtggggtgggggagtgaggaggtcacccgggactctcagggggagccagggggccccggcttacccgcacacaggacctccagcctagacggagcagccgttgccgtactatcccgcacggcgccgactggtcctggcagtcgatgtagtcctggtaaaaaggtgcagactctgcctagttggaagtccagcttccgtcagccccgatcgctgagcggatcacccaaggggggaggttcctctcttgaagtgccaattatctcatccggcgggaattggctgatgaatggcctgagttccttacgcggccaccgtagggcctcatcaggagaccgcttgaaggattccggctccgtgcagagattgtccacatatgataatgtacccgccccgggcctggtgccaggcattccgagcgttgccagtatggcgtggtccggggccagtagctccgaaagctcagttggagggagcttgtcctcgtgcactgcctgtcgcgcctcagactcctccgcccggagcagcctgcatactgactgggccctcgagccctctcctctcccatccagctcagaggatcctaaaagtctggacctggatcactcaatggatgaggcaggcgcgggcgcctccaattctgaaccaagtgagcctgatagtccaacgcgtgagcatgcgcggaggtctgaagcgcttcaggggctagtgaccgaactacgcgccgaattatgtaggcaacggactgagtatgaaagatcagtgaagcggattgaggagggttctgcggatctcaggaagaggatgtctcggctcgaagaagagcttgaccaggaaaagaaaaagtatataatgctggaaatcaaactccgcaactccgagagggcccgcgaggacgccgagcgtcgcaatcagctcctgcagcgcgagatggaagaattcttttccaccttgggatctctgacagtcggtgctaagggcgcaagagctcccaagtag

SEQ ID NO: 16378 - DNA, 381 bp, synthetic construct
  source 1..381: mol_type = other DNA; note = Synthetic coding sequence
atgtggactgcccgtggccctttccggagggatcggtggtcaagcgaagatgaagaggcagccggaccttctcaagcactgtccccattgctgtcagatacgaggaagatcgtgagtgagggcgagctcgaccagctggcacagattagaccccttattttcaatttccatgagcagacggccattaaggattgcctaaagatcctggaggagaagaccgcagcttatgatattatgcaggaatttatggctctagaactaaagaacctgccaggtgaatttaattctgggaaccagccttccaatcgtgagaagaacagataccgcgacatattaccattccagcaccatgggtacagcggcccaaatgaacgcacgtag

SEQ ID NO: 16379 - DNA, 2442 bp, synthetic construct
  source 1..2442: mol_type = other DNA; note = Synthetic coding sequence
atgtcagagcaaggcgacctgaatcaggctattgcggaggaaggtgggactgaacaggaaacggccacaccagaaaacgggatcgtgaagtctgagagtctggacgaggaagaaaaactggagctgcagaggcgtttagaagctcagaaccaggaacgccggaagtccaaatccggagctgggaaagggaagctgaccagatcccttgccgtgtgcgaggaatccagcgcccgtccaggcggagaaagcttgcaagaccaggaatctatacatctgcaattatcttccttttcttctttacaggaggaggataaatcgagaaaggatgattccgagagggaaaaggaaaaagataagaacaaggataaaacgtcagaaaaacccaaaattcgcatgctatccaaggattgctctcaggagtatactgattctacgggcattgatctccatgagtttcttatcaacacattgaagaacaacagtcgtgacagaatgatcctgctgaaaatggagcaggagatcatcgactttatcgccgacaataataatcactataagaagttcccacagatgtccagttaccagagaatgctggtacaccgggtagctgcatatttcggcctagaccacaacgttgaccagactgggaagagcgtgatcatcaacaagacctcttcaacccgaattccggagcagcgcttctgcgaacatttgaaagatgagaagggtgaggagtcgcaaaaacgcttcatcctgaaaagagataatagttcaatcgacaaggaagacaaccagagcgtgtgttcacaggagtctctgtttgtggaaaactctcgactgctggaggattcaaacatctgcaacgagacatataaaaaacggcaactctttagaggaaaccgggatgggtctgggcggacctcagggagtcgacagagctcttccgagaatgaacttaagtggtccgatcaccagagggcctggagcagtactgactccgacagttcaaaccgtaatttaaagcctgcgatgacaaagacggcctccttcggtggcatcacagtgctgacaagaggggacagtacctcgtccacacgtagtaccgggaaactgagtaaggccgggtcagagtcctctagttcggcaggatcctcaggctccctcagccggacgcacccccccctccagtctactcctttggtcagcggcgtcgcagcgggatctccagggtgtgttccttatcccgaaaacggcatcggaggccaggtggccccttcttctaccagctacatcctcctcccgctagaggccgccacaggtattcccccaggctctattctgctgaacccacataccggtcagccttttgtcaaccctgatggcacacctgcaatttacaaccctccgacttctcagcagccgttgcggtccgccatggtgggccagtctcaacagcagccacctcagcagcagccgtccccacagccacaacaacaggtgcaaccaccgcagccccagatggccggacctttggtgacacagagtgtacaggggctccaggcttcctctcagagtgtgcaatatcctgcggtgtctttccccccccagcacctgctacccgtctccccaacccagcactttccaatgagagacgacgtagcaacacaatttggtcagatgacattatcaaggcaaagttctggcgaaacgcctgagccccccagtggacctgtctacccctcatctctcatgccccagcccgctcagcagcctagttatgtgatcgccagtacaggccagcaactcccgacgggaggcttttccggcagtggcccccccatctcacagcaggtgctccagccaccaccaagcccacaggggttcgtgcagcagccccccccagctcagatgccagtctattactaccctagcggtcagtatccaacctccacaacacagcagtatagacccatggctcctgtgcaatataatgctcagagaagccagcaaatgcctcaggcagcccaacaagccggataccagcccgtactttcgggccagcaggggttccagggtctgattggcgtccagcaaccacctcagtcacaaaatgtgattaataatcagcagggtacccctgtccagtccgtaatggtgtcctatcctactatgtccagctaccaggtgccgatgacccagggcagtcaaggcctccctcaacagtcataccagcaacctataatgctgccaaatcaggctggtcaggggagcctgcccgcaactgggatgccggtgtactgtaacgtgacccccccaacaccccagaacaatttaagactgatcggaccacactgtccttctagtaccgtcccagtgatgtcggcatcttgtcgcaccaattgcgcaagcatgtcaaatgcaggttggcaagtaaagttttag

SEQ ID NO: 16380 - DNA, 1467 bp, synthetic construct
  source 1..1467: mol_type = other DNA; note = Synthetic coding sequence
atgaatggggcattagaccacagtgaccagccagaccctgatgctattaaaatgttcgtaggacagatcccaagaagctggtccgagaaagagctgaaagaactgtttgagccatacggggcggtataccaaatcaacgtattacgggacaggagtcagaatccgcctcagagcaaaggctgctgtttcgtgaccttttatacacgcaaggccgccctggaagcccagaacgccctgcacaacattaaaaccttgccaggtatgcatcatcctatccaaatgaagcctgccgactcagagaaatctaacgccgttgaggatcgcaaactgttcatcggaatggtttccaaaaagtgtaacgaaaacgatatccgcgtcatgttttcgccctttgggcagatcgaagagtgtaggatactgaggggtcccgatggcttaagccgagggtgtgcctttgtgactttctctacgagggccatggctcagaacgcaattaaggcaatgcatcagtcgcagacaatggaaggatgctcgtctcctatagtggtgaaattcgcagatacacagaaggacaaagaacaaagacgactacagcagcagctcgcccaacagatgcaacagctgaatactgctacgtggggaaacctgacaggtttaggcggcctgacgccgcagtatctagcactgctgcaacaggcaaccagtagcagcaatctcggggcattctcaggcatccagcaaatggctggtatgaacgctctgcagctacaaaatttggccactctggccgctgcagcagcagctgctcagacctcagcaacaagtactaacgctaatcccttatccaccacatcctcagccttaggagccttaacctctccagtggctgcctcaacgcccaatagtacggctggggctgcaatgaactcattaacctcactgggtaccttgcaaggattggccggcgcaaccgtggggctgaataacattaatgcactcgcagggaccattaactccatggcggctctgaacggagggctcggagccacgggcctaacgaacggtactgccggtaccatggacgctcttacacaggcgtattctggcatccagcagtatgcagctgccgctctgccaaccctgtactcgcaatctttactgcagcaacagagtgccgctggtagtcagaaggagggacccgaaggagccaaccttttcatttaccatctacctcaagaattcggggatcaggatattctgcagatgttcatgccttttgggaacgtgatcagtgccaaggtgtttatcgacaaacagacaaacctgagcaagtgcttcgggttcgtttcttatgacaatcccgtctctgcacaagctgcaatccaggccatgaatggctttcagattggaatgaaacggttgaaggtgcagctcaagagaagcaaaaacgatagtaaaccttactag

SEQ ID NO: 16381 - DNA, 474 bp, synthetic construct
  source 1..474: mol_type = other DNA; note = Synthetic coding sequence
atggcgacgtccgccccgctgagatctttagaagaagaggtgacttgctctatctgcctggactacttgagagacccggtcaccattgattgtggacacgtgttctgtagatcatgcacaaccgatgtcaggcccatctcagggtcacggccagtgtgtccactgtgcaaaaagccctttaaaaaagaaaacatcagacccgtgtggcagcttgcctcactggttgaaaatattgaacgcttgaaggtcgacaaaggcagacagcccggagaagttacacgtgagcaacaagatgccaaactgtgcgagaggcatcgcgagaagttgcactactactgtgaggacgatggcaagctgctttgcgtgatgtgtagagaatcccgcgagcaccggccccacaccgcagttctgatggaaaaggcagctcagccccaccgggaaaagatactcaatcatcttagcacgctccggtag

SEQ ID NO: 16382 - DNA, 303 bp, synthetic construct
  source 1..303: mol_type = other DNA; note = Synthetic coding sequence
atggcttccgaagacatcgcaaagctcgcagaaaccctggccaagactcaagtggctgggggacagctgtcattcaagggaaagtcactcaagctgaacactgcggaggatgctaaagacgtgatcaaggaaattgaagacttcgattcactggaagccttaagactggagggtaacaccgtaggggtggaggccgcaagagtgattgccaaggccttagaaaagaaaagcgaactgaaacgttgccactggagtgatatgttcacagggcgcctgcgtaccgagatcccaccagcgctttag

SEQ ID NO: 16383 - DNA, 459 bp, synthetic construct
  source 1..459: mol_type = other DNA; note = Synthetic coding sequence
atgtcagtgacctatgatgatagtgtgggcgtggaagtgtcttcggattcgttttgggaggtcggcaactataaacggaccgttaaaagaatcgatgacggacaccgcctgtgctccgacctgatgaattgtttgcacgagcgcgctagaatcgaaaaggcatatgctcaacaactaacagagtgggcgagacgatggagacaactcgtggaaaaagggccacagtatggaactgtggaaaaagcgtggatggcattcatgagcgaggcagaaagagtatctgagctgcatctggaggtaaaggcatcactgatgaacgatgatttcgagaaaatcaagaattggcagaaggaggccttccacaaacaaatgatgggcggctttaaagaaacaaaagaagctgaggatggatttcgcaaagctcagaaaccttgggctaaaaaactaaaagaggtgtag

SEQ ID NO: 16384 - DNA, 543 bp, synthetic construct
  source 1..543: mol_type = other DNA; note = Synthetic coding sequence
atgtttgcatcagatctcctcagagcactcgattgctgtccaggggccggatcatctggcttattgccccagttggggcccaggcagcttctggcttttaccgttaattgtctggggaatcaccggtatctcggattctttgaggatctggaacaacgtcataaagcccaggttctcgtggaggacatttctgacatcctggaggagcatgcagagaagcacttccacccctacattgcatactgttctaatgaggtgtatcaacagcgcaccctccagaagctgatctctagtaacgccgcattccgcgaagccttgcgtgagatcgaacgccgccctgcctgtggaggattacccatgttaagtttcctcatcctgccaatgcagagggtgacccgtctgcccctcctcatggacacgctctgcctgaagacccagggacactcagagcggtacaaggctgcatcccgtgccctaaaggccataagtaaactggtacggcagtgtaatgagggtgcccataggatggaacgcatggagtag

SEQ ID NO: 16385 - DNA, 2487 bp, synthetic construct
  source 1..2487: mol_type = other DNA; note = Synthetic coding sequence
atggacagtgaggctttccagtctgcccgggattttctggacatgaatttccaaagcctggctatgaaacacatggacctcaagcaaatggaactggacacagcggcggcaaaggtcgacgagctgacaaaacagctggagagtctttggagtgatagcccagcgcctcccgggccccaagctggaccccccagtcgcccacctcgctattcctcaagcagtatacctgagccctttgggtcaagggggtctcccaggaaagcagccacagatggtgccgatactccgtttgggagatccgagagtgccccaaccctgcacccttatagcccattgagtcctaaaggtaggccgtcatccccgaggacgcctctgtacctgcaacccgatgcctatggctctctcgacagggccacgtccccgcgccccagggccttcgatggtgccggatcaagtctgggccgcgccccatccccccgacccggacccgggccactgcgccagcagggcccaccaacgccatttgatttcctgggaagagccggttcgccacgaggatctccactggctgagggtcctcaggcctttttccctgaacggggcccttccccaaggccgcccgccacagcttatgacgctccagcttccgctttcggctcaagcttgctcggctccggggggtctgcctttgcgccaccactccgggctcaggatgacttgacccttcgacgcagacctcccaaggcttggaatgaatcagatcttgatgtggcctatgaaaaaaagccaagtcaaacagcttcgtatgagagactggacgtcttcgcccgtcccgcatctccctctttgcagctgctgccttggagagaatctagcctggatgggctcggtgggacaggcaaggacaatctgactagcgccactctgcccagaaactataaagtcagccctcttgcatctgaccgccgcagcgacgcgggttcctatcgccgcagtctagggtcagcaggcccctcagggactctgcccagatcctggcagcctgtctctcggatccccatgcctccctcttccccccagccacgaggggcccccagacagcgtcccatacccttgtctatgatattcaaactgcaaaatgccttctgggaacacggagcctctcgcgccatgctgcctggatcaccactcttcacccgtgcgcctccccccaagctgcagccacagcctcagcctcagcctcagcctcaatcccaacctcagcctcaactaccccctcagccccagacacaaccgcagactcctacccctgcacctcagcacccacaacaaacctggccgccagtgaacgagggtcctcccaaacccccaaccgagcttgaaccagagcctgagatcgaggggctgctgaccccagtgttggaggctggggacgtagatgagggcccagtggctagaccattgagccccacacggcttcagccggcactgcctcctgaggcccaatcagtccccgagctggaggaggttgctagagtgctggccgagatcccccgtccgctaaaaagacgcggctctatggagcaagcccccgccgttgccctaccccccacccataaaaaacaataccagcagattatttctcgtttattccatagacacggcggaccaggccctgggggccctgagccagaattgtctcccatcacagagggatcagaggcccgagccggaccaccggcgccagctcctcctgcacccattccaccccccgccccctctcagagtagcccacctgagcaaccccagtccatggagatgcggagcgtcctgcgcaaggccggatcccctaggaaggctcgaagggctcgactgaatccactggtactgttgctggatgccgccttaacgggcgagctggaggtagtccaacaggcggtgaaagaaatgaatgatcctagccagcctaacgaggaaggtattacggcccttcacaacgcgatctgcggggcaaactattcgatagtggatttcctgatcactgctggggccaacgtgaactctcccgatagtcatggctggactcctctgcactgtgctgccagctgcaatgacacggttatctgtatggccctggtgcagcacggggcagcaatatttgctactaccttgagtgatggtgctacggccttcgaaaagtgcgatccttacagggaaggctatgcagattgtgcgacgtatctcgccgatgtcgagcaatcaatggggctgatgaattctggtgcggtgtatgcgctgtgggattactccgcggagtttggagacgaacttagtttcagagaaggcgaatccgtgacagtcctacggcgggatggtcccgaggagactgattggtggtgggccgctctgcatggacaggaagggtacgttccccgcaattatttcgggctttttccccgcgtcaaaccgcagcgcagcaaggtgtag

SEQ ID NO: 16386 - DNA, 4455 bp, synthetic construct
  source 1..4455: mol_type = other DNA; note = Synthetic coding sequence
atgagaatacccgatcagaaatatgtgacgctcaagctgaatgatgtcatccggtttgggtacgattcgaatatgtatgtcctggagagggtccagcatcgtgtgcccgaagaagcccttaaacatgagaagtacacttcacagctgcaggtgtcggtgaaaggcctggcgcccaaacgctccgaggctctgccggagcacacaccctattgcgaagccagcaatccaagaccagagaagggggatagaaggccgggtacagaggctgccagctaccgaacgcccctttacggacagccctcatggtggggtgaggacgacgggagcacactcccagacgcgcagagacagggtgagccctaccctgaacgaccaaagggccctgtgcagcaggatggcgagctgcatggattcagagcccccgccgagcctcaaggatgcagctttcgccgcgaacctagctacttcgagatccctaccaaagagacgcctcagccctcccagcctcctgaggtgcccgcgcacgagatgcccacaaaggatgcagaagcgggtgggggtggtgccgcgcctgtggtgcagtcccatgcctcttttacaatcgaattcgatgactgttctcccggaaagatgaaaatcaaggaccacattactaagttttccctccgacagagacgcccaccaggtaaggaggccactcctggagaaatggtaagcgcagaaacgaaagtggcggattggctggtccagaacgatcctagcctgctgcaccgagttggccctggggacgatcggcacagtactaaatctgacctgccagtgcacacgaggaccctgaagggccataagcacgaagatggaacccagtcagactccgaggatccactggccaaggcggcgtcagcagccggcgtcccacttgaggcgtccggagaacaggttagacttcaaagacagatcaagcgcgacccacaggaactgctgcacaaccaacaagcctttgttattgagtttttcgatgaagacacacccagaaagaaacggagtcagagtttcacccactctccaagcggagatcctaaggccgacaaaaggcgggggcctactccagcagatcgagatcgacctagtgtgccagcccccgttcaagccggaggaagatcaagcgggccgcagcgagccggctcgttgaagcgggagaaaacggaggaacgactgggctccccctcacccgccagtcggactcccgcacggccctttggcagcgtggggcggcggagccgcctggcacaggacttcatggctcaatgcctccgcgagtctagcccagccgcacgtcccagtccagagaaggtgccgcccgtgctgcccgcccctttaacgccacacgggacatcgccagtggggcccccaacaccccccccagcccctaccgaccctcagctgactaaagccaggaagcaggaggaagacgattccctcagtgatgcgggcacatacacaatagaaaccgaggcacaagatactgaggtggaggaagcgcgaaagatgatagatcaagtgttcggagtcctcgaaagccctgagctgtcacgggctagctcagctacattccgcccggtgattcgaggagatagggatgagagtgacgatgggggggtagcccagcgcatggccctgttacaggagtttgcgagccgtcctctaggggccgctccacaggccgaacaccaggggctgcctgtccctggctctcctggcggccagaagtgggtctcaaggtgggcctccttggctgacagctactcagatccaggattgaccgaagacggccttgggagaaggggtggtgaacccgaagggagcctccccgtccgaatgaggagaagattaccacagttgccatctgagcgggcagacagcccagccggacctgagtccagtcgacgtagcggcccagggccacctgaactcgattccgaacagccctcgcgcttgttcggccaagaggaactagatcctgatagcctgagcgacgctagcggcagcgatggtggtagagggcctgagccaggagttgaacctcaggacagtcgccgccgcagtccccaggaggggcctacctggtcccgtggccggcggtcaccacgggcaccgggtgagcccactcccgccagcttcttcataggcgaccagaatggcgacgctgttctctcaagaaaaccactggccgccccgggagatggggaaggtctgggtcaaacggcgcagccgagcccacccgctcgcgacggggtgtatgtgagtgcaaacggccgtatggtgatacaactgagaccgggccgctcacctgaacccgacggccctgcccccgcctttctgcgacaggaaagcttcacaaaggagcccgcgtccggccccccagcacctggcaaacctccacacatttcatctcaccctctcctgcaagacctggccgccactcgagcagctagaatggactttcattcacaggatacacatctgattctgaaggagacagaaaccgcgttagctgccttggaagccaggctcctgtctaatagtgtggatgcagagtgtgagggaggcagcacccctcgaccccctgaggatgcgctgtctggcgacagcgatgtcgatactgccagtaccgtttccctgcggtcaggaaagagtggaccctcacctaccacacctcagcccctgcgagcacagaaagagatgtctccctcccctccagccgcacaggatcctggagggaccgctctggtcagcgcaagagagcagtcctcggagcggcagcaccaccccctagggcccaccgacatgggtcgaggagaaccagtgagacggtcggccattagacgcgggcaccgcccccgcggctccctggattggcccagcgaagagaggggacccgtcctcgcgcacctgccttcctccgatgtgatggccagcaaccacgaaacccctgaggctaccggcgctggaagattaggctccagaagaaagcccgccgccccaccgccctcacctgccgcaagagaagagcagtcccggagtagtgcctcaagccagaaaggcccacaggcactcactagatccaattcactcagcacaccacgccctacccgggcctcacggttgaggcgagcgaggttgggggacgcctccgacaccgaggctgccgatggcgagagaggctctttagggaatcctgagcccgtgggccgccccgcggccgagcaggccaagaagctgagcaggctggatattctggctatgcctcgcaaaagagcgggaagcttcacgggcacctcagatcccgaagcagcccccgctcgcacctcattctccggccgttccgtggagctctgttgtgcttccaggaaaccaaccatggctgaggccagagctgtgagtcgcaaggccgccaatacagcaaccacaaccggacctaggcagcccttttcgcgagcgaggagcgggagcgccaggtatacctccacaacccagactccccgcgccggcagcagctctagagcccgctctagagcacccgggcctcgagatactgatgacgacgaagaagagccggatccatacggattcattgtccaaaccgcagaaatagcagagatagcaaggctgtcacagaccctggtgaaggatgtggcaatcctcgcccaagaaatacatgatgtggcaggcgatggggacacactgggaagctccgagccagcacactcagcaagcttgtctaacatgcccagtactcctgctagtactatctccgccagagaggaactagttcagagaattcctgaggcctccctaaacttccagaaggtgccacctggatcactgaacagtcgcgatttcgatcaaaacatgaatgactcctgtgaggacgcactggccaacaaaacccggccccggaatagagaagaggtaatatttgacaacctgatgctgaatcccgtttcacagctctcacaggctatccgggagaacaccgagcatttagcggaaaaaatgaaaatcctctttcagaataccggcagagcctgggaggacctggaagctcggattaacgccgagaacgaagtccctatcttaaaaaccagtaataaagagatctcgtctattttgaaggagctgcggagggtgcagaaacagctggaggttatcaacgccatcgtggatcccagcggctcattggacctcctcaccggaaatcgttccttagcctcctcggcacaacccgggctgggtaagggaagggtggcagcacagtcaccccccagtcctgccagtgctgaagcattgctgcccgccttgccgttaagaaattttccacagagggcttcctgcgggcccccttcactcccggaccccactttcctccctgacgccgaacgcttcctgatttag

SEQ ID NO: 16387 - DNA, 150 bp, synthetic construct
  source 1..150: mol_type = other DNA; note = Synthetic coding sequence
atgtaccctaatccgctgatatactgtacctgctgggatccctggaacctgggacctcgcaagctgataaagaccccgcaactgcctaggaagaacagcactggtagctctaagctgacaccacttgtgcccgcccctaagaaccactag

SEQ ID NO: 16388 - DNA, 948 bp, synthetic construct
  source 1..948: mol_type = other DNA; note = Synthetic coding sequence
atggccttccctgaacccaaaccaagacccccggagctcccccagaaaagacttaagactttagattgcggtcaaggcgctgtgagggcggttcgttttaatgttgatgggaactattgtctgacatgcggttcggataagacgctgaagctgtggaaccccctacgtggtaccctgcttcggacgtatagcggtcatgggtacgaagtgctcgacgccgcagggagcttcgataattcatcactgtgttctggtggcggtgataaggcagttgtcctatgggatgtcgcaagcggccaggttgtgagaaagttcaggggccacgcagggaaggtgaatacagtgcagttcaatgaagaggctactgtcatcctgtccggatcgatcgacagcagtattagatgctgggattgtcgaagccggaggccagagcccgttcagacgcttgatgaggctagggatggagtgagctcagtcaaggtgtcagatcacgagattcttgcagggagcgtagacggtagagtgcggagatatgacttgcgaatgggtcagctgttctctgactacgtgggcagcccgataacctgtacatgctttagtagagatggacagtgtacactcgtgtcgtctttggactccacactgcggttactggacaaagacacaggtgagctgctgggagagtataagggacacaagaatcaggaatacaaactggactgctgcctgtccgagagggatactcacgttgtgtcctgcagtgaggacggaaaggttttcttctgggatctggtggaaggcgcactagcattggcacttcccgtgggatcgggagttgtacagtctctggcatatcaccccaccgagccctgtcttcttacagccatgggaggcagtgtgcagtgttggagggaggaagcctacgaggctgaggatggtgcaggttag

SEQ ID NO: 16389 - DNA, 3015 bp, synthetic construct
  source 1..3015: mol_type = other DNA; note = Synthetic coding sequence
atgaaggccacgaccccactccaaacagtggaccggcccaaagactggtacaaaactatgtttaagcagatacatatggtgcataagccaggattatacaaccccccatacagcgcccaaagtcatccagccgccaagactcaaacatatcggcctttgagcaagtctcatagcgacaattcgcctaacgcgtttaaagatgcctcctcacccgtgccacctcctcacgtaccacctcccgtgccgcccttacggccacgtgaccgctcttccacagaaaagcacgattgggaccctccggatagaaaagtcgatacccggaagtttcgtagtgagccgcggtcaatttttgagtatgagcctggaaagagcagtattctacagcacgagaggcccgcctccctgtaccagagctctattgacaggtccttggagagaccaatgtcttctgcctccatggcctccgatttccgcaagcgccggaaatcagagccagccgttggacctcctagagggctgggagatcagagcgcctcacggaccagccctgggcgcgtcgatttgcccggctctagcacaacactgacaaagagtttcacaagctcaagtcccagcagccccagtagagctaagggcggagacgactcaaagatctgcccttccctgtgctcttatagtggcctgaacggcaatccttcttcagaacttgattactgttctacctatcgccaacatctggatgttccccgcgattctccccgagctatcagcttcaagaacggttggcagatggccaggcagaacgccgagatctggtcctctactgaggagaccgtcagccctaagataaagtcacggtcttgcgatgacctcctgaacgacgattgtgactccttccctgaccctaaggtcaaatcggagagcatggggtccctcctctgtgaagaggacagcaaggagtcttgcccgatggcgtggggtagcccctatgttccggaggtccgcagcaatggcagaagtcggatccgacaccgatccgcgaggaacgcaccagggttccttaaaatgtacaagaaaatgcatcgcatcaataggaaggaccttatgaattcagaggttatctgttctgtgaagtccagaatattgcagtacgagtcggaacagcagcataaagatctgctgcgggcttggtcccaatgcagcaccgaagaggtgcctcgtgacatggtgcctactcgcatatcggagttcgaaaagctgattcagaaaagtaagtctatgccaaacctaggcgatgatatgctatccccggtgactctggaaccccctcaaaacggactgtgcccgaagcgtaggttcagcatcgaatacctgttggaggaagagaaccaaagtggccctcctgccaggggtagaagaggttgccagtccaacgcactggtccccatacatatcgaggtgacaagtgatgagcaaccccgagcacacgttgagttctctgactccgatcaggacggtgtggtgtctgaccactccgactatatccatctggagggctcatcattctgcagcgagtcggacttcgatcacttctctttcacgtctagcgagtcattttatgggtcttctcaccaccatcatcatcaccaccaccaccaccaccgtcacctgatttcatcgtgcaaggggaggtgccccgcatcctacaccagattcactacaatgctaaaacacgagcgggctcgccatgagaacaccgaggagccacggcggcaagagatggaccccggcctgagtaaactcgccttccttgtcagcccagtgccttttcggcggaagaagaacagcgcccctaaaaagcagaccgagaaggcgaaatgcaaggcaagcgtgttcgaagccctcgacagcgccttgaaagatatttgtgatcagatcaaggcagaaaaaaaaaggggcagtttgccagataatagtatcctccatcgactaatttccgaactcttgcccgatgttcctgaaagaaattcatctttacgtgcccttagacggtcccctctacaccaacctctacatcctcttccgccagatggagctattcactgccccccttaccagaatgactgcgggaggatgcccaggagtgcatcattccaagatgtggacaccgctaactcttcctgtcaccaccaggacagagggggcgctttacaggatcgagaaagtcctcgaagctacagttctacccttacagacatgggacgcagcgccccccgggagcggaggggtactcctgagaaagagaagttgcctgccaaggcagtgtacgacttcaaagcccagacaagtaaagagctgtccttcaagaagggagacacggtgtatatactgcgcaaaattgaccagaattggtacgagggagagcaccatggccgggtgggcattttcccaatttcctatgtggaaaaattgactccgcccgaaaaggcacaaccggcaagacctcccccacctgctcagcccggtgagataggcgaggccatcgccaagtacaactttaacgccgataccaatgttgagctgagtctgaggaaaggcgatagggtcatcctcttaaagagggtggaccagaactggtatgagggaaaaatcccaggtactaataggcagggcatttttcccgtgagttatgtcgaggtagtcaaaaaaaacactaagggtgcagaggactatcctgatccacccatcccccatagttacagctccgaccgtatccactctctcagctcaaacaagccccaaagacctgtctttacccatgagaacatccagggcggaggggaaccctttcaggccctctacaactacaccccacggaatgaggacgaactggagttgagagaatccgatgtcatcgacgttatggagaaatgtgacgatggatggtttgtcggaacgagcagaaggactaagttttttggcactttcccagggaattacgtcaagagactgtag

SEQ ID NO: 16390 - DNA, 981 bp, synthetic construct
  source 1..981: mol_type = other DNA; note = Synthetic coding sequence
atggctgcagctgctgccgctgccgcagccactaatggtaccggggggtcatcagggatggaggtcgacgccgcggtccccagcgtgatggcctgcggggtgactgggagcgtttcagtggcccttcacccactggtcatcttgaatatcagcgatcactggataagaatgaggtcccaggaaggccgccctgtccaggtgataggcgccctgataggtaaacaggaggggcggaacatcgaggtgatgaattcttttgaactgctctcacacactgtggaggagaaaatcattatcgataaggaatattattacacgaaggaggagcagtttaagcaggtatttaaggaattggaattcctcggatggtatacaaccgggggacctcccgatccctctgacattcacgtgcacaagcaagtgtgcgagatcatagaatccccgctgttcctcaagttgaacccaatgacaaaacataccgacctgcccgttagtgtgttcgaatcagtgattgacataattaacggcgaggcgactatgctgtttgctgaattaacttacaccttagctacggaggaggccgagaggattggagtggatcacgtggctcgaatgaccgccaccggaagcggagagaactctaccgttgccgagcacctgatagcacagcactccgctatcaagatgctacattccagagtgaaactgattctggagtatgtgaaggcttcagaagccggtgaggtcccattcaatcacgaaattctgagggaggcttatgccctttgtcactgcctccccgtactgtcgaccgacaaattcaaaacagatttttatgatcaatgcaacgatgtggggctgatggcctaccttgggacaattacaaaaacatgcaataccatgaaccagttcgtgaataaatttaatgtactttacgacagacaggggatcggacggcgcatgagaggattgttcttttag

SEQ ID NO: 16391 - DNA, 780 bp, synthetic construct
  source 1..780: mol_type = other DNA; note = Synthetic coding sequence
taatttacagctcaggctccctcagggcggggggcagcagtggggtctggtacacgactggcaagtctccggctcctcacggagctggagtctcctgcttggtggccattttccagcaaactgtggaaaacccccccagagactaaaccacgagaggatgtgtccatgacaagctgtgaaccttttggcaaagagggtattttgatcaaaatccctgcggtgattagtcatcggacagagagccatgtcaagcccgggcgcttgaccgttctcgtctccggactcgagatccacgacagttcctccttactgatgcataggtttgagcgcgaagatgtcgacgatatcaaagtgcatagtccttacgaaatcagcattcgccagagattcatcgggaaacccgacatggcatatcgtctcatttcagccaagatgcccgaggtgatccccatattagaagtgcaatttagcaagaagatggaattgctggaagatgctctggtgctgcggtcagcccggacatcctctccagcagaaaaaagctgcagcgtgtggcacgcagcaagtggcctcatggggcggactctacaccgggaaccccccgccggggaccaggagggcacagccctccatctgcaaacgagcctccctgctttatccgaagctgatacccaggagctgacccagggtttccggcctatgtcactctccacccagaccgttctagttatgctttgcagtgaatccgctggcgctctttggagacagagactgagctag

SEQ ID NO: 16392 - DNA, 1038 bp, synthetic construct
  source 1..1038: mol_type = other DNA; note = Synthetic coding sequence
atggccgccgctgagcccgcttccagcgggcaacaggccccagcggggcagggacagggacagcgcccccctccccagcctccgcaggcacaggccccccagccacctcctccaccacagttaggcggggccgggggcggaagctcccgccacgagaaaagcctgggtctgttgactacaaaattcgtgagtctgctgcaggaggcaaaggacggcgttttggacctcaaagccgccgccgacacgctggccgtaagacagaagaggcgaatctatgatatcactaatgtcctagagggaatcgatctcattgagaagaagtctaagaactcaatccagtggaagggtgtcggcgccggatgcaatactaaagaggttatagaccgccttcgctacttgaaagccgaaatagaagatctggagctgaaagagagggagctcgaccagcagaaactgtggcttcagcagtcaataaaaaatgtgatggacgattccattaacaaccggttttcatatgtgacccacgaggatatctgtaactgttttaatggtgatacactgctcgccatacaagctccttcaggaacccagcttgaagtgcctatacccgagatgggccagaatggtcagaagaaataccagattaatctgaagagccactcagggccaattcatgtgctgctcatcaacaaagagtcatcttcctctaagcctgtggtctttccagtgcctcccccagacgatctgactcagccaagtagccagtccctgactccagtgaccccgcagaaaagcagcatggccacacagaacttgcctgagcagcacgtgtccgaacgcagtcaggctctgcagcaaacctccgctacagacataagctccgggtccataagcggtgacatcatcgacgagctcatgtcttcggacgtattccctctgctccggctgagtccaacccccgctgatgattataactttaatcttgacgacaatgagggcgtgtgcgacctgtttgatgtgcagatcttgaactactag

SEQ ID NO: 16393 - DNA, 96 bp, synthetic construct
  source 1..96: mol_type = other DNA; note = Synthetic coding sequence
atgaccgtaccatggcggccaggcaagcgccgtatcacctacaaggaggaggaagatcttactcttcagcccagatcttgcctgcagtgctcttag

SEQ ID NO: 16394 - DNA, 489 bp, synthetic construct
  source 1..489: mol_type = other DNA; note = Synthetic coding sequence
atgaataatcagaaacagcagaagcctacactgtccggacagagattcaaaacacgtaaacgcgatgaaaaagagagattcgaccctactcaatttcaagactgcatcattcagggacttacggaaaccggaactgacctggaggccgtagctaagtttttggatgcctcaggcgccaagcttgactatagacgttacgcggaaaccctgtttgatatacttgtggccggaggcatgctcgcccccggcggcactctggcagacgacatgatgaggaccgatgtctgtgtgtttgcagcccaagaagacttagaaaccatgcaagcgtttgcacaagtcttcaacaagctgatcagacgatacaaatatctcgagaaagggttcgaagacgaagtgaaaaaattactgttgttcctcaaaggcttctcagagtctgagcggaacaagctagccatgcttacaggggtgcttctggctaatgggacctag

SEQ ID NO: 16395 - DNA, 270 bp, synthetic construct
  source 1..270: mol_type = other DNA; note = Synthetic coding sequence
atggcagcggcaactggagatcccggattgagcaaactgcagttcgcccccttttcatctgcactcgacgtgggattctggcatgagctgacccaaaaaaagttgaacgaatacaggctggatgaggcaccaaaggatattaagggatactattacaacggggatagtgcaggtttaccagcccggttgacactcgagtttagcgctttcgatatgtcggctcccactcccgcaagatgttgtccggccatcggaaccctttacaattag

SEQ ID NO: 16396 - DNA, 2025 bp, synthetic construct
  source 1..2025: mol_type = other DNA; note = Synthetic coding sequence
atgcaaacatcaagctccaggagtgtgcatctctcagaatggcaaaagaattactttgctatcacgtcaggcatctgcactgggcctaaagcggacgcttatagggcacagattctgcggatacaatatgcatgggctaattccgagatcagccaggtctgcgcaacaaaactcttcaagaaatatgctgaaaaatattctgccattatcgactccgacaacgtcgaaagcgggctgaataactacgccgagaatattttgacactcgccggatcacagcaaactgatagcgacaaatggcagagcggtctgtcaatcaacaacgtcttcaagatgtctagcgtccagaagatgatgcaggctggaaagaaatttaaggacagtctgctcgagcctgcacttgcaagcgtcgtgatacacaaagaggctaccgtgttcgatctccctaaattttctgtgtgcggctcttcccaggaaagtgattccctcccaaatagtgcacacgatcgggatcgaacacaggatttccccgaaagtaacaggctcaaattgttgcagaatgcgcagccaccaatggtgactaataccgcacggacatgccctacattcagcgcacccgtgggggaatcagccaccgccaaattccacgttacccccttatttggaaatgtcaaaaaagagaaccactcgagcgccaaggagaacatcggtctgaatgtgttcctcagcaaccagtcctgtttccctgccgcctgtgagaatccccaacgcaagtccttttacgggtccggtacgatcgacgctcttagtaacccgatcctaaataaggcttgctccaagactgaggataatggacctaaggaggacagctcactgccgacatttaagactgccaaagagcaactttgggtcgatcagcagaagaagtaccatcaaccccagcgggccagcgggagttcatatgggggggtcaagaagtctctgggagctagtaggagcagaggcatccttggaaagttcgtccctccaattcccaagcaggacgggggagaacagaacggtggtatgcagtgtaaaccctacggcgctggccctaccgagccagctcacccagttgatgagcggttgaaaaatctggaacccaagatgattgagttgataatgaacgagattatggaccacggtccacctgttaattgggaagatattgcaggcgtggagtttgccaaggccaccattaaagagatagtggtctggcccatgctgcgcccagatatctttactggtttaaggggaccccctaaggggatacttctgttcggccccccagggactggcaaaactttaatcggtaagtgcatcgcttctcagtccggggcaaccttcttctcaatatctgcgagctctctgacttcgaagtgggttggcgagggcgagaaaatggtgagggccctcttcgcagtggctcggtgtcagcagccggccgtgatctttattgatgagattgacagtctgctgtcacagagaggagacggggagcatgagtctagtcggcgaattaagactgaatttctggtccagctggacggcgctaccaccagttcagaagatcggattctcgtggtcggagctactaaccggccccaagagatcgatgaagccgctcggcgaagactggtgaagcggctctacatcccactccctgaggcttcggccagaaaacagatagtgattaacttgatgtcaaaggagcagtgttgtctgtccgaggaggagatcgagcaaattgtgcaacagtccgacgctttttctggggcggatatgacccagctctgtcgggaagcttccttgggacctattaggagccttcagacggcggatattgctacaattactccagatcaagtcagaccaatcgcctatatcgactttgaaaatgcgtttcgcactgtgagaccatcagtatctcccaaggacctagagctttacgaaaactggaataaaacttttgggtgtgggaaatag

SEQ ID NO: 16397 - DNA, 1923 bp, synthetic construct
  source 1..1923: mol_type = other DNA; note = Synthetic coding sequence
atggaaaaccagctggccaagagcaccgaggagcgcacatttcaataccaggactctttgccatccctccctgtaccaagtcttgaagagtccctgaagaaatatctcgagtctgttacgagaacctgctatcaaatccgtggattagatcctgacgcaaagcgggggtttcttgatctgactagagagggcatacaagtgaagcccttcgcgaaccaggaggaatataaaaaaactgaggagatcgtgcaaaagtttcagtctggaattggggagaagttacaccagaaactgctggagagagcaaaaggtaagagaaactggctcgaagaatggtggttgaacgttgcttatttagacgttcgcatcccatctcaacttaacgtgaacttcgcgggaccagctgctcatttcgaacattactggccacccaaggaaggtacccagctagagagggggagcattactctgtggcacaacctgaattattggcagcttctcagaaaagagaaggtccccgtgcacaaagtgggcaataccccactggacatgaaccaattcagaatgctgttcagtacatgcaaagtgcctggaatcacccgcgacagtataatgaactatttccgaacagagtccgaaggtaggtctcctaaccatattgtcgttctgtgccgaggaagagctttcgtctttgacgtaatccatgaggggtgtcttgtgacacctcctgaactcctccgccagctgacttatatccacaagaaatgccattccgaacccgacggcccgggcatcgctgcactgaccagtgaagagcggacaagatgggccaaagcgagagaatacctaattggcctggaccccgaaaatttggcgctgctggagaagattcagagctcattgcttgtgtatagcatggaagacagttcaccccacgtcaccccagaggattatagcgaaatcatcgccgccatcttgataggcgaccctaccgtccgctggggtgataaatcttacaacttgattagttttagtaatggcgtgttcggctgcaattgcgatcacgccccctttgacgcaatgattatggttaacatcagttattatgtggatgaaaaaatttttcagaacgaaggaagatggaaagggagcgagaaagtacgggacatccccctgcctgaggagttgatctttattgtggatgagaaggtgttaaacgatattaatcaggcaaaggcgcagtatctcagggaagcaagcgatctgcagatcgccgcatatgcattcaccagcttcggtaaaaagcttacaaaaaataaaatgctccacccagacacctttattcagttggcgctgcagcttgcatattaccgactgcacggccacccagggtgctgctacgagaccgcaatgaccagacacttctaccacggtcggaccgagactatgcgatcatgcaccgtcgaggctgtgcgctggtgccagtccatgcaggaccccagcgtgaacttgcgagaacgtcagcaaaagatgctgcaggcatttgcaaagcacaataaaatgatgaaggactgttctgccggtaaaggctttgataggcatttgttaggcctgctcctgattgcaaaagaggaaggtctcccagtgcctgaattgttcacagatcccctgttcagtaaaagcggaggggggggaaacttcgtgctgagcaccagtctcgtggggtatctgcgggtgcagggggtcgtggtgccaatggttcataacgggtacggattcttctatcatatccgcgatgaccgattcgtggtagcctgttctgcctggaaatcttgcccggagaccgatgccgaaaagctcgtgcagcttaccttctgtgcctttcacgacatgatccagttgatgaactcaactcatctctag

SEQ ID NO: 16398 - DNA, 474 bp, synthetic construct
  source 1..474: mol_type = other DNA; note = Synthetic coding sequence
atggccacctccgcccctttacggagcctggaagaagaagtcacttgcagcatttgcctggactatctgagggacccagttacaatcgactgcggacacgtgttctgtagatcttgtaccacagacgtccgtccgatctctgggtctcggcctgtgtgccctttatgtaaaaagcctttcaaaaaggagaatataaggccagtgtggcaacttgcttccctcgtggagaatatcgagcggctaaaggtggacaaaggccggcagcctggcgaagtgaccagagaacagcaagacgcaaagctgtgtgagcgtcaccgggaaaagctacactattactgtgaagacgacggaaaactcctgtgtgtcatgtgcagggagtctcgcgagcacaggccacatacagcagttttaatggaaaaggccgctcaaccacaccgcgaaaagattttgaaccatctgagcacactacgatag

SEQ ID NO: 16399 - DNA, 432 bp, synthetic construct
  source 1..432: mol_type = other DNA; note = Synthetic coding sequence
tgaacaagacatttcaaagagtccattaagtttattcacgaatgtcgcttgcggggtgaatcgtgcctcgtccattgtctggcaggagtttctaggtctgtgacattagttattgcgtatattatgaccgtgaccgattttggatgggaagacgctttacacacggtgagagcaggtcggtcctgcgcaaacccgaacgttggattccagcggcagctgcaggagtttgaaaaacacgaggtgcatcaatatcggcagtggctcaaagaagagtatggcgaaagcccgcttcaggatgctgaagaagctaaaaacattttaggtaaatacaaagagcagggtcgcaccgaaccacagcctggagcacgtaggtggtcatccttccctgcactggcccctctgacatacgacaattacactaccgagacgtag

SEQ ID NO: 16400 - DNA, 495 bp, synthetic construct
  source 1..495: mol_type = other DNA; note = Synthetic coding sequence
atggtaaacagtgtaatcttctttgacattactgtggatggaaagccacttggcaggatctctatcaaacagtttgctgacaaaattcctaaaaccgctgaaaacttccgagcgctgtccaccggagagaaaggttttagatataaaggatcttgctttcaccggataatccccggcttcatgtgccaaggaggggactttactcaccccaatgggacaggtgataaaagtatctacggcgaaaaattcgacgatgaaaatttgattcggaagcacacaggctccggaatcctcagtatggcgaatgccggacccaataccaacggttctcagttcttcatatgtaccgcgaaaaccgagtggcttgatggtaagcatgtggctttcgggaaagtgaaggagcgcgtgaacattgttgaggctatggaacatttcgggtatcggaactccaagacaagcaaaaaaataaccatagcagactgcggtcagttctag

SEQ ID NO: 16401 - DNA, 468 bp, synthetic construct
  source 1..468: mol_type = other DNA; note = Synthetic coding sequence
atgtctgagggtgagtcacaaactgtcctgtcctctggctcagacccaaaggttgagtcaagctcatctgcccccggccttacatccgtgtctccaccagtgacctccacaacttcagcggccagcccagaagaggaggaggagtccgaagacgagtccgagatcctggaagagtctccttgcggacggtggcagaagcgccgcgaagaggtcaaccagcggaacgtcccaggtatcgactccgcttacctcgccatggacacagaggagggcgtggaggtagtgtggaatgaagtgcaattctcggaacgaaaaaactacaagctgcaagaggaaaaagtaagggcggtgtttgataatcttatccagctagagcatctgaatattgttaagttccacaaatattgggcagatattaaagaaaacaaggctcgggtgatttttatcactgaatacatgagctcgtag

SEQ ID NO: 16402 - DNA, 837 bp, synthetic construct
  source 1..837: mol_type = other DNA; note = Synthetic coding sequence
atgtggccgttccccagccggtccctctttcccccaccaactcaggcctggctgcagactgtcagctccgatcctgaggcccaaggctggggcgcctggaatgaaacgaaagagatactgggacctgaaggcggggagggtaaagaggaaaaagaggaagaggaagatgccgaggaagatcaggatggtgacgcaggttttctgctaagcctgctagaacaggaaaatctggcggagtgtccgctgcccgaccaggagttggaagctatcaagatgaaggtttgtgcaatggagcaggctgagggcacccccaggccacccggggtgcaacagcaagcagaagaggaagaggggactgccgcaggacaattgctgtctcctgaaaccgtcgggtgccccctgtccggtactccagaggagaaggtggaagctgatcatcgcagcgtgtatgtaggtaacgtagattatgggggaagtgctgaagagctggaggcccacttcagcaggtgcggggaagtacacagagttacaatactgtgcgataagttttcgggacatcctaaagggtacgcctacatcgagtttgccactaagggctctgtgcaggccgccgtcgagttagaccagagcctttttcggggtcgggtgatcaaggtgttgccaaaacgcaccaatttccccgggatcagcagcactgatagaggaggcctgagaggccacccgggatcccgcggcgcaccttttccacatagcggcctgcaggggcggccacggctgcgaccccagggccagaacagagctaggggtaaattttccccttggttcagtccttactag

SEQ ID NO: 16403 - DNA, 132 bp, synthetic construct
  source 1..132: mol_type = other DNA; note = Synthetic coding sequence
atgtctgaacaaggcgatctcaatcaggcaattgctgaagaaggagggaccgagcaggagacagccactcctgaaaatggtattgtcaaatctgagtcattggacgaagaagagaaactcgaattgcaatag

SEQ ID NO: 16404 - DNA, 390 bp, synthetic construct
  source 1..390: mol_type = other DNA; note = Synthetic coding sequence
atggccgatgaagagctagaggccctcagacgacagcggttggccgagctgcaagctaagcacggcgatcccggggacgctgcccagcaagaggctaagcacagagaggccgagatgcggaattcaattctggctcaggtgctggaccagagcgccagggcacggttgagcaatttggctctcgtcaaaccagagaaaactaaggccgtcgagaattatctcattcaaatggccaggtatggacagctgtcagaaaaggtgagtcttgactctttggaagaactatattgttacctcttgtaccagaatatggctagtaaaggtcagctgcacctacactggattaccgagtttcttctgaccttgagaaggaattgttggagagagtag

SEQ ID NO: 16405 - DNA, 2286 bp, synthetic construct
  source 1..2286: mol_type = other DNA; note = Synthetic coding sequence
atgcgtaagcaggaggtgaggacaggacgcgaagctggacagggccatgggacagggtcgcccgctgaacaggtaaaggctttaatggatttgcttgccggaaagggatcccagggctcgcaggccccccaggcactggataggaccccagacgcaccgctgggtccatgttccaatgactctcgtatccaacgccaccgcaaggccctgctctcaaaggtcggaggcggcccggaactgggaggaccatggcaccgcctagctagcctgctcctcgtcgaagggctcacagacctccagctgcgcgaacacgatttcactcaggtggaggctacacgaggaggaggccatcccgctcggaccgtcgctttagaccgcctctttctgcctctgagtagggtctctgtccccccccgagtcagcattactatcggagtggccgggatggggaagactaccctggttcggcatttcgtgagactgtgggcccacggtcaagtcgggaaggattttagcctggtgctgcctttaactttccgggacctgaacacccacgagaaactgtgcgctgatcgcttaatctgctcagtatttccccatgtgggcgagccaagtcttgcagttgcagtacccgcccgagccctcctgatcctggacggtctcgatgagtgtcggacgcctctcgatttttccaacaccgtggcctgcaccgaccctaagaaggaaattcccgtggatcatcttatcactaatattatacggggaaatctgttccccgaagtttcaatctggatcactagtagaccaagcgcgtccggtcagattcctggcggtctcgtagatcggatgaccgagatccgcggcttcaatgaagaagaaatcaaggtctgcctggaacagatgttccccgaggatcaagctctgctgggatggatgctaagccaagtgcaggctgaccgcgcactctatctgatgtgtactgtgcccgcattttgccgactaaccggcatggctctgggccatttgtggcggagcagaacaggaccccaggatgctgagttatggcctccacgcacactgtgtgagttgtatagttggtactttagaatggccctttccggcgagggacaggaaaaaggcaaggcatccccacgcatcgagcaggtagctcacggaggacgcaaaatggtcgggactcttggcaggcttgccttccacgggctcttaaagaagaaatatgtgttttacgagcaagacatgaaggcattcggagtggaccttgccttgctgcaaggagctccatgttcatgcttcttacagcgcgaggaaactcttgccagcagtgttgcgtattgctttacacacctgagcctccaagaatttgtggcggcagcctactattacggtgctagccgacgcgctatcttcgacctgtttactgagagcggagtatcatggccccgcttaggattcctgactcatttcagatcagcagctcagcgcgccatgcaggcagaggacggtcggcttgacgtcttcctgcgattcctgagcggcctcctgagcccacgcgttaacgctttgctggcaggcagtcttctggctcagggggagcaccaggcctaccgtactcaggtcgctgaattacttcagggctgcctgcgtccagacgcagccgtgtgcgctagagccatcaatgtcctgcactgcttgcacgagttgcagcacactgaactcgcaagaagtgttgaggaagcaatggagagcggtgcactggcgcgtttgaccggacctgctcaccgggcagcactcgcttatctcctgcaggtttctgacgcttgtgcacaggaggcaaacctgagcttaagcctgtcccagggtgtgttgcagagtctgctgccgcagctcctctattgtcggaaactgaggctggataccaatcagttccaggacccagtcatggagcttctgggcagtgtgctgagcgggaaagactgcagaatccagaagatcagccttgctgaaaaccaaatctctaacaaaggagctaaagccctggctaggtcccttctggtgaatcggagcctgacctcactggacctccgcgggaattccattggcccgcagggcgcaaaggctctcgccgacgctcttaagatcaatcggactttaacttctctccgggtaaagttcatgtatcacaaaatcgattgtttcagaagagtaccagaggctgatgcatgtaatccatcaacgctcggagggcagggcaggtggattacatag

SEQ ID NO: 16406 - DNA, 474 bp, synthetic construct
  source 1..474: mol_type = other DNA; note = Synthetic coding sequence
atggccacgtcggcacctttgcgctcactagaagaagaggtgacatgtagcatttgcctcgattatttgcgcgatccggtcacaattgactgtgggcacgtgttttgcaggtcctgtaccacagacgtgcgacccatcagtgggagcaggccagtgtgccctctgtgcaagaaaccctttaagaaggagaacatacggcctgtctggcaattggcatcacttgtggagaatatcgagcggcttaaagtcgacaaaggacgacagcccggagaagtgaccagagaacagcaagacgctaagctctgcgagagacaccgcgaaaagcttcactattattgcgaggatgatggcaagctcctttgtgtgatgtgccgggagtcaagggagcatagaccccacaccgcagtcctcatggagaaggccgcccagccacatcgggagaagattttgaatcatctgtcaactctcaggtag

SEQ ID NO: 16407 - DNA, 1473 bp, synthetic construct
  source 1..1473: mol_type = other DNA; note = Synthetic coding sequence
atgacgattggaaggatggagaacgtggaggtatttacagcggaagggaaaggaaggggcctaaaggctaccaaggagttttgggctgccgatatcatcttcgccgaacgggcctactcagccgtcgtgtttgacagccttgtgaatttcgtctgccacacttgttttaagcgtcaggaaaaactgcacagatgtgggcagtgtaagttcgcgcactattgtgatcgcacctgtcagaaagacgcatggctgaaccataaaaacgaatgtagtgctatcaaacgctacggtaaggtgccaaacgagaacatccgtcttgccgcacgtattatgtggagagtggagagggaaggcactggcctgactgaaggctgcttggtgagcgtggacgacctacaaaatcatgtggagcacttcggtgaggaggaacagaaggatctgcgggtggatgtggatacgttcttgcagtactggccaccgcagtcccagcagtttagtatgcagtacatatcacacatctttggtgtcattaactgcaacgggtttactttaagtgaccaacgaggcctgcaagcggtgggagtgggcatctttccaaatctaggccttgttaatcacgattgctggcccaactgcacagtcatctttaacaatgggaaccatgaggccgtaaagagcatgttccacacacagatgcgcattgaactcagggccttaggaaaaatctcggagggagaggaattaacggtaagttacatcgattttctgaacgttagtgaggagcgcaaaaggcagctgaaaaaacagtactattttgattgcacttgtgaacattgccaaaaaaagttgaaggatgacttgtttctgggggtgaaagataatccaaaaccaagtcaggaagtcgtcaaagagatgatccagttctctaaagacacgttagaaaagatagataaagccagatctgaaggtctgtaccacgaggttgtcaagctatgcagggagtgcctggaaaagcaggagcccgtatttgctgatacaaacatctatatgcttcggatgctgtccattgtcagcgaagtcctgtcttatctgcaggctttcgaggaggcttccttctatgcgcggcgcatggtggatggatatatgaagctgtatcaccccaataacgcccagctgggcatggctgttatgcgagccggactaactaactggcatgccggcaacattgaggtcgggcatggcatgatttgcaaggcgtacgcgattctcttggttacccacggcccatctcatccgatcacaaaagatctcgaggcaatgagagttcagaccgaaatggagctacggatgtttcgacagaatgagttcatgtactataaaatgagggaggccgccctgaataaccagcccatgcaggttatggccgagcccagcaacgaacccagtccagcgctttttcacaagaaacaatag

SEQ ID NO: 16408 - DNA, 1491 bp, synthetic construct
  source 1..1491: mol_type = other DNA; note = Synthetic coding sequence
atgtgggggagatttctcgcccctgaagcctccggcagagacagtcccgggggcgcgaggagcttccccgccgggcccgactattcaagtgcctggcttcccgcaaacgagtcactgtggcaggccaccacggtgccgtccaaccatcggaacaaccacataaggcgacacagcatcgccagcgactctggcgacactggtattggcacatcttgcagtgacagcgtggaagatcattcgaccagcagcgggactctgtctttcaagccctcccaaagtctcattacccttcctaccgctcatgttatgccaagtaattcctccgccagcatttcaaagctgcgcgagtccctcacacctgacggaagcaagtggtccactagcctgatgcaaacactgggaaaccactcgaggggtgaacaagattcgtccctggatatgaaggacttccgccccctccgcaagtggtcctccctaagcaagttgactgcccccgacaactgcggacaggggggcaccgtctgcagggaggagagccggaatggcctcgagaagatcggtaaagcaaaggctttgacttcccagttgcggaccattgggccgtcttgtctacatgattccatggagatgctgagattagaggataaggagattaacaaaaaaaggtccagcaccctggactgcaaatataagttcgaatcttgcagcaaggaagactttagggcctcctcatcaacacttcgccggcaacccgtcgatatgacatattcagcactgcctgaatccaaacctataatgacctcttccgaggcctttgagccacctaagtacctcatgctgggccaacaggccgtcggcggtgtgcccatccagccgtcagtcaggactcaaatgtggctcactgagcaactgaggactaatccgctggagggccgcaatacagaagattcctattcactggcaccttggcagcagcagcaaatcgaagacttccgccaagggtcagagacccccatgcaggtgttgacaggtagctctcgccagtcctattccccgggttaccaggatttttccaagtgggagtccatgctcaaaatcaaagaaggcctcctgcgacagaaggagatagtcattgatagacagaagcagcagattactcatctccacgaacgcatccgagacaatgaactgagggctcaacacgctatgctaggtcactatgtaaattgcgaggactcctacgtggcaagcctccagccccagtatgagaatacatcgcttcagactccattttcggaagagagcgtaagtcacagtcagcaaggagaattcgagcagaaattggcctccacagagaaagaagttctgcagctgaatgaattcctgaaacaacgtctgtccctgttttcggaggaaaagaaaaaactcgaagaaaaggtcgggttcagtaataaggtagaattgggacagcagcatttcctgtccatatag

SEQ ID NO: 16409 - DNA, 1083 bp, synthetic construct
  source 1..1083: mol_type = other DNA; note = Synthetic coding sequence
atggcagagcttcagcaactgcaggaattcgagatcccaaccggccgcgaggctctgagaggaaatcatagtgcgctgcttagagtggctgactactgtgaagacaattacgtgcaggcaactgacaaaaggaaagcattggaagagacaatggcgtttactactcaggctctggcgagcgttgcgtaccaggtgggtaatttggcggggcatacattgagaatgcttgatctgcagggcgcagctcttcggcaggtggaggcccgaatggtcaatatgcatatggaaaaggttgcaaggcgcgagatcgggacactggccaccgtgcagagattgccccccggacaaaaagtcattgccccagagaacctgcctccccttacaccttactgccgcagacccctgaatttcggctgtttagacgatatcggacacggcattaaggatctgagtacacagctttcgaggacaggcacactgagcaggaaaagtataaaagcaccagccacgccagcttcagccacgctcggtcgtcccccgagaatccccgagcctgttcacctcccagtcgtgcctgacggacggcttagcgctgcgagcagtgccttctcactggcgagtgccggaagtgccgaaggcgttggaggagccccaacgcccaaaggccaagccgcgcctcctgcgcctccactgcctagctccctggacccacccccccctccagctgctgtggaagtttttcaacggcctcctacactggaagaactcagtcctcccccacctgacgaggagctgcctctcccgctggacctaccccctcctcctccactggatggcgatgaactggggctccctcccccccccccaggctttggacccgacgagccaagctgggtgcccgcatcatacctggagaaggtagtcaccctctacccctatacgtctcagaaagacaatgaactatccttctccgaaggcaccgtgatttgtgtaactcgacgatatagtgatggatggtgcgaaggcgtctcttcagaaggaacaggttttttccccggcaactatgtggagccctcctgctag

SEQ ID NO: 16410 - DNA, 201 bp, synthetic construct
  source 1..201: mol_type = other DNA; note = Synthetic coding sequence
atgttgcgctgtggccagatgatcttcgctcaagcgctagtttgccgccatctgggcagggattggcgttggacgcagcgcaaaaggcagcccgattcttacttttctgtcctgaatgcattcattgaccgcaaggacagctattatagcattcaccagattgctcagatgggggtgggggaggggaaaagtatcgggtag

SEQ ID NO: 16411 - DNA, 1476 bp, synthetic construct
  source 1..1476: mol_type = other DNA; note = Synthetic coding sequence
atggaacagcctcccgcccctaaaagtaagctgaaaaaactctcggaagactccttgaccaaacagcccgaggaagtgttcgatgtgctggagaaactcggcgaaggaagttacggctctgtgtttaaagctattcacaaggaaagtggccaggtggtggcaatcaagcaggttcccgtggagtctgatctgcaagagatcattaaggagatttcaataatgcaacagtgtgactcgccctacgtggtgaagtattacgggagttatttcaaaaacaccgacctgtggatcgtgatggagtattgtggtgccggctcggtctccgacataattagactgagaaataagacactgatcgaggacgagatcgccaccattttaaaatccaccctcaagggcctcgagtatctgcatttcatgagaaaaattcaccgcgacatcaaggccggcaacattctgctcaacacagaagggcacgcaaagctggctgattttggggtggctgggcaattaacggacaccatggctaaacggaataccgtgataggcacgcccttttggatggcacctgaagtcattcaggagatcgggtataattgcgtggccgatatttggagtctgggcatcacatcaatcgaaatggccgaaggcaagcctccctacgcagacatacatcctatgcgcgccatttttatgatcccgactaatcccccgccaacgtttagaaaacccgaactgtggtctgatgacttcacagactttgttaagaaatgtcttgtgaagaacccggagcagagggctacggcgacccagttgctccagcatccttttatcaagaacgcaaaaccagtgtctattctgcgagacctcatcaccgaggcaatggaaatcaaagccaagaggcacgaggaacagcagcgggaattagaggaagaggaggaaaatagtgatgaagatgagttggatagtcacactatggtgaaaacttctgttgagagtgtcgggaccatgagagccacaagcaccatgtctgagggcgcccagacaatgatcgagcacaacagtactatgctcgagtctgacctgggtactatggtaataaactctgaggatgaggaggaggaagatggaaccatgaagcgaaacgccacctcacctcaagtccaacggccatcattcatggattacttcgataagcaggactttaaaaataagagtcatgagaactgcaatcagaatatgcacgagccctttcctatgtcaaagaacgtctttcccgataattggaaagtgccccaggacggcgacttcgactttctgaagaatttgtccctggaggagttgcaaatgcggctgaaggcgctcgaccctatgatggaacgcgagatcgaagagctaagacaacgctacacagccaagcgccaaccaattcttgacgccatggacgcaaaaaaaagacgccaacagaatttctag

SEQ ID NO: 16412 - DNA, 126 bp, synthetic construct
  source 1..126: mol_type = other DNA; note = Synthetic coding sequence
atgagtagcaagggtagttccaccgatggaaggactgacttagcaaatggtagtctctcaagttcacccgaggagatgtccggggcggaggagggtcgggaaacctcctcaggcattgaggtatag

SEQ ID NO: 16413 - DNA, 945 bp, synthetic construct
  source 1..945: mol_type = other DNA; note = Synthetic coding sequence
atgccaaacgtagcggagaccgagcggtctaacgatagcggaaatggggaacacaagtctgaacgcaagtcacccgaagagaacctgcaaggagcagtgaaaagcttctgcacgtctgcttcaggagccccccttggtcctaaaggcgacgggcactatccctggtcctgcccggtcacccatactcgggagaaaatctatgccatctgctctgactatgcctttctgaaccaggcaactagtatttacaagaccccaaacccatctagatcgccatgcctgcccgacagcacatctctctcagccggaaacaatagtagccggtacatcggtatcccgacatccacaagcgaaattatttataatgaagaaaattctttggagaaccttagcaactctcttggaaaactgccactggcttgggagatagacaagagcgagttcgacggagtgactacaaattccaagcataaaagcggcaacgctaaaaagcaggtgtcgaagagaaagacctctgataagaagggcaggtaccagaaggagtgcccacagcattcccctctcgaggacatcaagcaaaggaaggtcttggaccttcgcaggtggtattgcattagccgtccccagtataagaccagctgcggcatcagctccctgatctcctgctggaatttcctatattccacaatgggtgcaggtaatctgccaccgattactcaggaagaggcgctgcacatcctcggcttccagcctccgttcgaagacataagattcggcccctttacaggcaacactacgctgatgagatggtttcgtcagattaatgaccactttcatgttaagggatgctcatacgtgctttataagccacacggaaagaataaaacggccggcgaaacagctggggatttaagtcaccacaggaagctgaatatcggctcttag

SEQ ID NO: 16414 - DNA, 1500 bp, synthetic construct
  source 1..1500: mol_type = other DNA; note = Synthetic coding sequence
atgccagaaatccgtgtcaccccccttggagcaggccaggatgtgggcagatcctgtattctcgtgtcaattgcaggtaagaacgtgatgctcgattgtggaatgcatatgggatttaacgatgacgttgacgacgagctggaaattaaggcgtattacgcagggcacgtgctgggcgcagccatgtttcaaatcaaggtcggtagcgaatccgtcgtgtacacaggcgattataacatgactcccgatcgtcacctgggggccgcctggatcgacaagtgccggcctaaccttctgattacagagtcaacttatgccaccactatcagagattcaaaacgatgccgggaaagagactttctcaagaaagttcatgagaccgtagagcgcgggggaaaggtgcttattcctgtgtttgcactgggccgcgcccaggagctgtgtattcttctagaaacattctgggaacggatgaatttaaaagttccaatctacttcagcactgggttgactgaaaaggctaaccattactacaagctctttattccttggacaaatcagaagatcagaaaaaccttcgtccagaggaatatgttcgagtttaagcatatcaaagccttcgatagggcctttgcagataatccaggtcctatggtggtgttcgccaccccagggatgctgcacgccggccagtccctgcagatctttagaaaatgggcagggaatgagaagaacatggtgatcatgccaggctattgtgtgcagggcaccgtgggtcacaagatactcagcggacagcgcaagctggagatggaggggaggcaagtgctcgaagttaagatgcaggtagaatacatgtccttcagtgcgcatgcagatgccaagggtattatgcagcttgttgggcaggcagaacccgaaagcgtccttttagtacatggtgaggctaaaaagatggaattcctcaagcagaaaatcgagcaagaacttagagtgaattgctacatgcccgcaaacggggaaactgttaccttgccaacctccccatccatccctgtgggtattagcctcgggctcctgaagagggaaatggctcaaggattgctccccgaggcaaaaaaaccccgactccttcacgggacgctgatcatgaaggacagcaacttcaggttggtgtcctcagaacaggccctaaaagagctggggctggctgaacatcaactacgattcacctgccgggtccacctgcacgacactcgcaaagagcaggagaccgcccttcgcgtgtacagtcacttgaaatccgtactgaaggaccactgcgttcagcacctgcccgacgggagtgtaacagtcgaatccgtcctgctgcaggcagctgcaccctctgaagacccaggtaccaaagtcctactggtttcatggacttaccaggacgaagaactcggctcttttctcacttctctgctaaagaagggattgcctcaagcacctagttag

SEQ ID NO: 16415 - DNA, 396 bp, synthetic construct
  source 1..396: mol_type = other DNA; note = Synthetic coding sequence
ggcaccatttcctgttctactggaaccttgcagagaagaaatctcggtcctgagcgccaaacgggactgctgctgctgggaatgaaggaaaaccaggagctcaaaacgattcaagccaacctgtccaggcaacgggtggagcatcaatgcctgagttcagaggagttgaaacagcggtttcccaacatccgcctgcccaggggcgaggtggggctcctagataactctgggggtgtcatctatgcttataaagcactaagagccctacaagacgccatccgccagctaggtggcatcgtcagagatggggaaaaagtagtcgagatcaatcctggacttctggtgacagtaaaaacgacgagtaggtcgtatcaggcgaagtctctggttatatag

SEQ ID NO: 16416 - DNA, 687 bp, synthetic construct
  source 1..687: mol_type = other DNA; note = Synthetic coding sequence
atgagcagggagaggggctctcgatctgaggaacccggggccggcaatcgagaaagcggcagtagagaacccgggcttgccgccgcagctatgtctaccgtagaccttgcgcgggtgggggcctgcatcctgaagcacgcagtgactggcgaagcagtcgaattacggtctctctggagggagcacgcttgcgttgttgcaggcctccgtcgctttgggtgcgtcgtctgccggtggatcgctcaggatctgtcttcgttggccggtttactggatcagcacggcgtgcgactggttggagtgggccctgaagctctgggcctccaagagtttttggacggggattacttcgcaggagaactgtatctggatgaaagcaagcagctgtacaaagaactcggcttcaagagatataattctcttagcatcctgcccgctgctctgggcaagccagtgagggatgttgcggcgaaggccaaggctgttggtatccaaggaaacctatctggggatttactgcagagcgggggcttgctagtagtcagtaaaggtggagataaggtgctgctgcactttgtccagaaaagccctggtgattacgttccaaaagagcatatcctccaggtattgggcatcagtgccgaggtatgcgccagtgatcctccacagtgtgaccgcgaggtgtag

SEQ ID NO: 16417 - DNA, 654 bp, synthetic construct
  source 1..654: mol_type = other DNA; note = Synthetic coding sequence
atgaatttctcagaagtattcaagttgagttctctgttgtgtaaattcagcccagatggtaaatacctggcatcttgcgtacagtaccgtttggtcgtgcgtgatgtgaatacacttcagatcctccagctttacacttgcctggatcagatccagcatattgagtggagcgccgatagcctgttcattctgtgcgcaatgtataaacgcggattagtccaagtatggtccctcgaacaaccagagtggcactgcaagatagacgaggggtcagcagggctcgtggcttcttgttggtctcctgatgggaggcacatactgaatacaactgaatttcatctacgtataactgtgtggtctctttgcaccaagagtgtctcatacatcaagtaccccaaggcttgtctgcagggcatcacgttcacccgggacggacgctacatggcactggcagaaaggcgggactgcaaggattacgtgagcattttcgtgtgctcggattggcagttgctgaggtacaaaattttgctttactcattggacgggagattgctctccacgtattccgcctacgagtggtctctggggatcaagtccgtcgcttggagcccatcctcccaattccttgctgtcggatcttatgatggcaagtag

SEQ ID NO: 16418 - DNA, 483 bp, synthetic construct
  source 1..483: mol_type = other DNA; note = Synthetic coding sequence
atggaggccgagaggccacaggaagaggaggatggcgaacagggtcctccccaggacgaagagggatggcctccacccaattccactacccggccctggaggagcgcgccccccagtccacctcccccggggactcggcataccgctcttggccctcgcagcgccagccttctgtcactccagacagagctactcctcgacttagttgccgaagcccagagtcggcggctcgaagaacagcgagccaccttttataccccacagaatccgtcatcgctagctccagcccccttgcgtcctctggaagaccgtgagcagctgtactcaacaattctgtcacatcagtgtcagaggatggaggcccagcggagtgaaccccccctgcctcccggaggccaggaactacttgagctgctgctcagagtgcaagggggtggaaggatggaagaacagaggtctcgcccccccactcacacatgttag

SEQ ID NO: 16419 - DNA, 951 bp, synthetic construct
  source 1..951: mol_type = other DNA; note = Synthetic coding sequence
atggaagagaacaacctccagtgtagttctgttgtggatggtaattttgaggaggttccaagagaaacagctattcagttcaagccgccactttacaggcagcgctaccagttcgtcaagaatttagtggaccagcacgagccaaaaaaggttgccgacctgggctgtggcgacacatccctgctcaggcttctgaaagtgaacccgtgcattgagttgctagtgggcgtcgacataaatgaggataaactcagatggaggggggacagtctggcgccttttctgggagattttcttaagcctcgagatctgaacctgacaattacactttatcacgggtcggtcgtcgagcgggattctagactgcttgggttcgatctcatcacttgcatcgaattaatagaacatttggactccggcgatctcgctcggttccctgaggtggttttcggctatctgtcacctagcatgatagtgataagtactccaaactccgagttcaacccgctgttcccgagcgttacgctgagggacagtgaccacaagttcgaatggacaagaatggagtttcagacatgggcactgtacgtggccaatagatatgattattctgtggagtttaccggtgtcggagaacctcccgctggagcggaaaatgtcgggtactgcacccagatcggtatcttccgaaaaaacggtggcaaagctacagaatcttgtctttctgagcagcatgatcagcatgtgtataaagcggtctttaccactagctaccccagtctccagcaggaacgcttttttaagctggtcttagtgaacgaagtgagtcaacaggtggaatccttacgggtgtcacacctgcctcgccgaaaggagcaggctggcgagcgaggggacaagcccaaggacatcggaggcagcaaggctcctgtgccctgtttcggaccatag

SEQ ID NO: 16420 - DNA, 1056 bp, synthetic construct
  source 1..1056: mol_type = other DNA; note = Synthetic coding sequence
atgtggacccccagaccagccctccacgtgcacgtgattctctactccccgatccatcggtgttatgcccgtgcagacccgactatgggacgaatctgggtggacgccgctgtgccttgtcttgaggagtgcgggttcctcctgcacttccgcgatggatgttatcacctggaaacgtccacacatcacttcctcagccacgtcgaccggctattctcccaaccatcttcccagacagcatttcacatgcaggtaagaccgggaggcttggtagcattgtgcgatggcgaaggagggatgctgtacccacaggggacccatctgttactgggcatggggtgcaaccctatgcgcggtgaagaatggtttattctccagcattgtccgacctgggtttcgcttaggtccaagaccggaagatttatcagtgtcatttacgatggcgaggtccgtgcagcatcggagcgactgaatcggatgagcctcttccagtttgagtgtgactctgagtctcctacagtgcaacttcgctctgccaacgggtactatttgtcccagcgtaggcacagggctgtgatggccgacggccatccacttgaatctgataccttctttcggatgcactggaactgcggccggatcattttgcagagctgccgggggagattcctggggatagcaccaaattcacttttgatggcgaatgtgatccttcccggcccaaacgaggagtttggcattttgtttgcgaatcgctccttcctcgttctgcggggaaggtatggctacgtggggtcatctagtggccacgacctgatccagtgcaatcaggatcagcccgacaggattcatctgttgccctgccggccgggcatataccactttcaggggggaattctgcttgtgaacaatatcctttggcatctgtccccactgggacaggtgtgccctcagctcctgtacagggcttccggggaacagcttacccactgcactggcccccagtggttactccatgccagccggccaaagtggcatcctgtgggcagacaatag

SEQ ID NO: 16421 - DNA, 333 bp, synthetic construct
  source 1..333: mol_type = other DNA; note = Synthetic coding sequence
atgcaaatatcaagcgagaaggaggaggacgataacgagaagaggcaggaccccggtgataattgggaggaggggggggggggtggaggtggcatggagaaaagcagtggcccgtggaacaaaacagcccccgtacaggcccctcctgcgcccgtgatagtcacagaaacccctgaacctgcaatgaccagtggcgtttaccggccccctggggccaggctgactacaacgaggaaaaccccccagggccctcctgagatctattctgacacccagtttccaagcctgcaaagtaccgcaaaacacgtggagtcacgaaaatatctgaagtag

SEQ ID NO: 16422 - DNA, 972 bp, synthetic construct
  source 1..972: mol_type = other DNA; note = Synthetic coding sequence
atggagggtcacgatcccaaggaaccagagcaactacgcaaactgttcattggggggctgtcctttgaaacgaccgatgattccctccgcgaacattttgaaaagtgggggacactcaccgactgcgtcgttatgagagatcctcagaccaagcggtccagggggttcggttttgtgacctacagctgcgttgaggaagtagacgcggcgatgtgtgctcgtccccacaaagtcgatggtagagttgtggaaccgaagcgcgccgtctctcgcgaagattctgtgaaaccaggagcgcacttaacagttaagaagatcttcgttggcggaattaaggaggatactgaggaatataacctcagagattatttcgagaagtacggaaaaattgagaccatcgaagtcatggaggatagacagtccggtaagaagaggggctttgccttcgtcaccttcgacgaccacgacaccgtggataaaatcgtcgtgcagaaataccatacaataaacggccataattgtgaggttaagaaggctctcagcaagcaggagatgcagtccgccggctcacagaggggaagagggggggggtcaggaaatttcatgggcagaggcgggaatttcggaggcgggggagggaacttcgggaggggcggcggaaattatggggggggacccggctactcgagccgagggggatatggagggggcggtcctggctacggaaaccagggcggtgggtacggcggtggggggggatacgacgggtacaatgagggaggcaacttcggcggcggcaattacggagggggggggaactataatgatttcggaaattactctggacagcaacagtctaactacgggcctatgaagggcggatccttcggcggtaggtcatccggttcaccgtatggcggaggctacggaagtgggggcggaagtggcggttacggtagccgacgcttctag

SEQ ID NO: 16423 - DNA, 291 bp, synthetic construct
  source 1..291: mol_type = other DNA; note = Synthetic coding sequence
aatattcagctggtcgcagacggatgttgtaatctccagaaacagattcagataactcagctgtttggtgtacccgtggtggtggccctcaacgtgtttaaaacggacacccgcgccgagattgaccttgtctgcgaactcgccaaaagagctggggcttttgatgctgttccgtgctaccactggagcgtgggtggtaagggcagtgtcgatctggcaagggcggttagagaagctgccagtaaacgctcacggttccagttcttatatgatgtgcagcccttctcatag

SEQ ID NO: 16424 - DNA, 483 bp, synthetic construct
  source 1..483: mol_type = other DNA; note = Synthetic coding sequence
atgaccgatgttccagctacttttacgcaggccgagtgtaacggggacaagcctcccgagaacggccagcagaccatcactaaaatttcagaagagctgactgacgttgatagcccacttcctcactatcgtgtggagccaagcctcgaaggcgctctgacaaaaggctcccaggaggagaggagaaagttacagggaaacatgctactgaatagcagtatggaagacaagatgctaaaggaaaacccagaggagaagctgttcatagtgcataaagcgattaccgatcttagcttgcaagaaacgtctgcggatgagatgaccttccgtgaggggcaccagtgggagaaaatcccactgagcggctcaaatcaggaaatccggaggcagaaggagcgcatcaccgaacaacctcttaaagaagaggaagatgaggatcgtaagaacaagggccatcaagccgccgagatcgaatggctttag

SEQ ID NO: 16425 - DNA, 480 bp, synthetic construct
  source 1..480: mol_type = other DNA; note = Synthetic coding sequence
atggctacaagtgcaccattgcgtagcctggaggaggaagtgacatgcagtatctgccttgattatctgagggatcctgtaacgatagactgcgggcatgttttctgcaggtcttgtacgactgatgtgaggcccattagcggttcaaggccagtctgcccactgtgtaagaagcccttcaagaaggagaacatcagacccgtgtggcagctggaaaagatccttaatcacctatctacactaaggagagatcgggataaaatccagggctttcaggctaaaggcgaagccgacatattggctgcactcaaaaagctgcaggatcaaagacagtacatcgtggccgagtttgaacagggacatcagttccttagagagcgggaggaacacctgcttgagcagctggcgaagctggaacaggaactgacggagggacgtgagaagtttaaaagcagaggggtaggcgaactagccaggtag

SEQ ID NO: 16426 - DNA, 432 bp, synthetic construct
  source 1..432: mol_type = other DNA; note = Synthetic coding sequence
atggacagctctcagcaaaagacattccgaggacacgatgccccagtactgtctcttagctttgacccaaaagatatttttcttgcttccgcgtcctgtgacgggagtgttagagtctggcaaatttcggatcagacatgtgctatttcatggcctctgctgcagaagtgtaatgatgtcattaacgccaagagtatctgtaggcttgcttggcagccgaaatctggcaaactcctggccatcccggtggaaaagtccgtaaagctgtacaggagagaaagctggagtcatcagtttgatctctcggataacttcatttcacagacccttaacattgtgacctggtctccttgcggtcagtacctggcagccggatcaatcaacgggcttatcatcgtctggaacgtggaaaccaaggactgtatggagtag

SEQ ID NO: 16427 - DNA, 2109 bp, synthetic construct
  source 1..2109: mol_type = other DNA; note = Synthetic coding sequence
atgaccgagagatgctctctgtggagcgctctgagcgctgcggcctgttgtttttacagaggcagtttcgtacaggtccaattctcgaaagaaaagtacatcctggacagctcacctgagaagctacataaagaactggaagaggagttgaaactgtcctctactgatttacgaagccacgcatggtaccatggaagaattccaagagaagtgagcgagacgttggtgcagagaaatggcgatttcctcatcagggacagcctcactagtctgggtgactacgttcttacctgtaggtggcgcaatcaggcccttcacttcaaaatcaacaaagtggtggtgaaagcaggggagtcatacacacatatacaatacctcttcgaacaggagtcattcgatcacgtgcccgcgctggtgaggtatcatgtcggctctcgcaaagctgtctccgagcagagcggggccattatttactgccctgtgaacaggaccttccccttgaggtacctcgaagcctcctatggtttgggacaaggctcgagtaagccggccagtccagtctctcctagcggacccaagggcagccatatgaaacgccggtctgtcacaatgactgatgggctgacagccgacaaagtgaccaggagtgatggctgtcccactagcacatccctgccccggcccagggatagcattcgctcttgcgcactgtctatggaccagatacccgatcttcactctcccatgtctccgatctcggaaagtcctagctctccagcatacagtaccgtaacacgggtacatgcagcgcctgctgccccctcggcaacagctctgcccgccagccctgtagctaggcgttcctcggagccacaactctgtcccggcagcgctcccaaaacgcacggcgagagtgataagggcccccatacatctccatcacatactttagggaaagcctctcccagtcccagtctgagctcctactctgatcctgactcggggcactactgccagttacagcccccagtgcgcggatcccgcgaatgggcagcaacggagacttcgtctcagcaggccaggtcctacggagagaggttgaaggaactttccgagaacggggccccggaaggcgactggggaaagacctttacagtaccgatagtcgaggtcacctcaagtttcaaccccgccaccttccaaagtctcctgataccgcgagacaaccgcccgttagaggtcggtctgttgcgcaaagtgaaagaactacttgcagaagtcgacgcgaggaccctagccaggcacgtgacgaaagtcgactgcttggtggctagaatcctgggagtgaccaaggagatgcaaactttaatgggggtacggtggggaatggaacttctcaccctcccacatggccgccagctgcgactggatctgttggagcgctttcatacaatgtccatcatgctagctgtggacattctggggtgcactgggagcgcggaagagcgcgccgcgctcttacataagacaattcaactagctgccgaactcagaggtaccatggggaatatgtttagctttgctgctgtcatgggcgcactggacatggctcagatctctaggctggaacaaacctgggtgactcttagacagagacacactgagggggcaatcctgtacgagaagaaactcaaaccattcctgaagtcactgaacgagggtaaggaggggcctccactgtcaaacacaacattcccccacgtcttgcccctgatcactttgctggaatgtgattctgccccacccgaggggccggagccatggggcagcactgagcacggcgtggaggtagtccttgcccacctggaggccgccaggacagtggcccaccacggcggactgtaccatactaatgccgaggtgaagctgcagggattccaggcacggcctgagttactcgaggtgttttcaacggaattccaaatgagactgctgtggggaagccaaggcgcttcctcctcgcaagctaggagatacgaaaaattcgataaagttttaacggccctgtcacataagttggagcctgccgtccgaagctcggaattgtag

SEQ ID NO: 16428 - DNA, 585 bp, synthetic construct
  source 1..585: mol_type = other DNA; note = Synthetic coding sequence
atgaccgaggattctcagcggaattttcggtccgtgtactacgaaaaagtcggcttccgtggggtggaggaaaaaaagtcgttagaaatcctgctgaaagacgatcgactaggaattctacccccacaccacgagtcgcacgccaaagtcatgatgtaccgtaaggagcaatacttggatgtgctgcatgctctgaaagtggtccgctttgtgtcagacgctacaccacaggcggaagtgtatttacgcatgtaccagttggagtcaggtaaactgcctagaagcccctcgttccccctggagcccgatgacgaggttttcctagcaattgccaaagcgatggaggaaatggttgaagactcagttgattgttactggatcacacggagatttgtgaaccagctcaacactaagtaccgagattccctgccccaactgcctaaggccttcgagcagtatctgaatctggaggatggcagattgctgacccatcttagaatgtgttctgccgcccctaaattaccttacgatttgtggttcaagcgctgctttgctgggtgccttcccgaatcaagcttacagtag

SEQ ID NO: 16429 - DNA, 2334 bp, synthetic construct
  source 1..2334: mol_type = other DNA; note = Synthetic coding sequence
atggagccgaaggaggccactggcaaggagaacatggtgactaaaaagaagaatcttgcctttcttagaagtcgcttgtacatgctggagcgccgcaaaacggacactgttgtcgaaagctccgtttcaggagatcacagcgggacattgcgcagatcacagtctgacagaacggaatataaccagaagctccaggagaaaatgaccccccagggggagtgtagcgtagccgagaccctaacaccagaagaagaacaccacatgaaacgcatgatggccaagagagagaaaattatcaaggaattaatccagacggaaaaagactatctgaatgatcttgagctctgcgttcgggaggtagtgcagccgctccgtaataaaaagacggatcgcctcgacgtggatagtttatttagcaacatagagtctgtgcatcaaatttccgccaagctgctgtcccttttagaggaggccacaactgatgtggagcctgccatgcaggttattggggaagtctttttgcaaattaaaggccctctggaggatatttacaaaatctactgttaccaccacgacgaggctcactctatactagagtcttacgagaaggaagaggaactcaaggagcatctcagccactgtattcagagtctaaagaaaatctatatgcaagagggtaagccaaatctgctcgacatgggttcactcatgattaaacctatacagagggttatgaaataccccttgttgctgtgtgagctcaggaattcaacccccccaagccaccctgattatagggccctagatgacgctttcgcggctgtaaaagacatcaatgttaacataaacgagctgaaacgccgcaaggacttagtgctgaagtataagaaaaacgacgaagatgagtcgctgaaggataaactcagtaaactaaacatccacagcatctcaaaaaagagtaagcgagtaaccaaccacctgaagattttgacgcggggcgaatcccaggtcaaagacaacacgtttaatcgagaagaaaaacttttccgcgctctcgagaagaccgtgcgtttatgcgtcaagaatatatctctctgcctgcagcacatccaggacgctatgccgctcgcacttcagtccgtcatggacttacaggaaattagttacaacaaggacgatgaaatggactactctgagacgctatctaatgcgctgaacagctgccatgattttgccagccacctccagagactcatcctgactcccttgtcagcgctcctcagccttttccctgggccccacaagctgattcagaagcggtatgataaattactcgattgtaatagctaccttcaaagaagtacaggcgaggagtcggacctcgcaaaaaaggaatacgaagccttaaacgcccagctggtggaagaattgcaggcctttaaccaggccgctaggaagattttgctgaattgtctctgcagttttattaccctccttcgcgacctgatgctcgtcgcccagcaggcctactctaccttggttcccatgccattgctcgttagctcaatcagcgagatccagaaccaggtgctagaagagattcagaacctgaactgtgtgaaggagaattccgctactttcatcgagcgaaagctgagctttgaaaagaaaaagccggtgcagatactcccggagatgccgcatcagaccgatatccatcggagcaaattattgagcacatactccgcagaggagctttaccaagctaaacgtaaatgcaacgccacccaagaatatgacattaacctcctggagggagatttggttgctgtcatcgaacagaaagatccgctgggctccacaagtaggtggctggtcgatacaggtaatgtgaaagggtatgtatattcgtcatttttgaagccttataatcccgccaaaatgcagaaggttgatgctgagaaccgcttttgcgatgatgatttcgagaatattagcctgtttgtttcttctagacctgccagtgatagcgtgactggcacaagtgagagctctatcggggatagtagcagcagcctgtccggcacgtgtgggaagttcgagaccaatggcactgatgtggactcgttccaggaggttgatgagcagattttctacgcagtccacgcatttcaagctcggtctgaccatgaactgtccttgcaggagtaccagagagtgcatattctccgcttctgtgacctcagcgggaacaaggagtggtggctggccgaggcccaggggcagaaaggctatgtgcccgcaaactaccttggaaagatgacctatgcttag

SEQ ID NO: 16430 - DNA, 543 bp, synthetic construct
  source 1..543: mol_type = other DNA; note = Synthetic coding sequence
tgatctcagcctaaatcttttgagaatagtcccggagacttaggcaactcttcgctgcccaccgcaggatataagcgcgcccagacctctgggatagaagaagagactgtgaaggagaaaaagcggaaggggaataaacagtcaaaacacggcccagggcgacccaagggcaacaaaaaccaggagaacgtgtcacacctctccgttagttctgcatccccaacctcctctgtagctagcgctgccggcagtataacctcatcctccctgcagaagagccctactttactgagaaacggatcccttcaaagcttgagcgttggaagcagtcccgtcggatccgagatctccatgcaatataggcatgatggagcgtgtcctaccacttctatttacaacagtaacgatgtggctgtgtcttttcctaatgtggtctcaggaagcggtagtagcactccagtgagttcctcccacctgccacagcagtcttcgggccatctgcagcaggtcggcgccctcagccccagcgcggtctcgtcatag

SEQ ID NO: 16431 - DNA, 384 bp, synthetic construct
  source 1..384: mol_type = other DNA; note = Synthetic coding sequence
atgaccaccaaaaacctcgagacaaaggtaactgtgaccagcagtcctatccggggggccggagatggaatggagaccgaggaaccccctaaatcggttgaggtcacttctggggtccaatccaggaagcatcacagcctccagtccccatggaaaaaggcagtaccgtcagagagtcccggagttctgcagctgggcaagatgcttactgagaaggcaatggaagtgaaggcagttaggatcctagtgcccaaggctgccatcacacacgatattcccaacaaaaataccaaggtcaagtctctgggccatcataagggcgaatttcttggccagagtgaaggtgtgattgaaccaaataaggaactcagcgaagtgaagtag

SEQ ID NO: 16432 - DNA, 1683 bp, synthetic construct
  source 1..1683: mol_type = other DNA; note = Synthetic coding sequence
atgagcgagcactccaggaatagtgaccaggaagagctgcttgacgaagagataaatgaagacgagatcctggccaatctgagtgctgaggagctaaaggagcttcagtcagagatggaagtgatggcccccgatccctctctgccagtgggtatgatccagaaggaccagactgataaacctccgaccggcaactttaaccacaagtcactcgttgactatatgtactgggaaaaggcctcccgtagaatgttggaggaagagcgggttcctgtaaccttcgtgaaaagtgaggagaaaacccaggaggaacatgaggaaatagaaaaaaggaacaaaaacatggctcaataccttaaggaaaaattgaataatgaaatagtcgcaaacaaaagagagtcaaagggctccagtaacatccaagaaacagatgaggaagacgaggaggaagaggatgatgacgacgatgatgaaggggaggatgacggggaagaaagcgaagaaaccaatcgtgaggaggaaggcaaggctaaggaacagatcaggaactgcgaaaataactgccagcaagtgacagacaaggcatttaaagagcagagggaccgcccagaagcccaggagcaaagcgaaaaaaagatctccaaacttgacccaaagaaacttgcacttgatacctcatttctgaaggttagtacccgccccagcggtaaccagaccgacctcgatggctccctgcgcagagtcagaaagaacgatccagacatgaaagagctgaaccttaataatatcgagaatattcctaaggagatgctgctcgactttgtgaacgccatgaagaaaaataagcacattaaaaccttttctttggcaaatgtgggagcagatgagaacgtcgcctttgcacttgccaatatgctacgagaaaaccggagtattacaacgctgaatatcgagagcaattttatcaccggcaagggtattgtagccatcatgcgctgtttgcagttcaatgaaacactgaccgagttacgtttccataatcagcggcatatgcttggccaccacgcggagatggagatcgccaggctgctgaaagcgaacaatacacttcttaagatgggataccactttgaacttcccggcccaagaatggtggtgaccaatctgctgacccggaaccaagataaacagaggcagaagaggcaggaggaacagaagcagcagcagctgaaagaacagaagaaactcatcgctatgttagagaacggcctgggcttgccacccgggatgtgggagctactcggtgggccgaagcctgatagcaggatgcaggagttcttccaaccaccaccacccaggccgccaaatccccagaacgtcccattcagccagaggagcgagatgatgaaaaagcccagtcaggcccctaaatatcgcacggaccctgactccttcagggtcgtaaaattgaaaaggattcagcgcaagtcaagaatgccagaagctcgcgaaccacccgagaaaaccaatcttaaggacgttattaaaaccctgaagcccgtcccccggaatcgtcccccgccccttgtggagattacccctcgggaccaacttctgaatgacatccgacattcctccgtagcatacctgaagcctgtccagcttccaaaggagctggcctag

SEQ ID NO: 16433 - DNA, 51 bp, synthetic construct
  source 1..51: mol_type = other DNA; note = Synthetic coding sequence
atgtgcacatccgagacctttcaggctctggacaccttcgaggctagatag

SEQ ID NO: 16434 - DNA, 513 bp, synthetic construct
  source 1..513: mol_type = other DNA; note = Synthetic coding sequence
atgcccattctcctcttcctcatcgatacctctgccagcatgaaccagaggtcgcatctcggcacaacatatttggatacagccaaaggcgccgtggaaactttcatgaagctacgcgcccgagacccagcctcccgtggcgatagatacatgttagttacgtttgaagagcccccatatgctattaaagctggatggaaggaaaaccatgccactttcatgaacgaactgaaaaatctgcaggccgagggactgacaacgcttggtcagtccctccggactgcctttgatctgttgaatcttaatcgcttggtgaccggtatagacaattacggtcagggacgcaatccattttttttagaaccagcaatcattataaccataaccgatgggtcaaagctaaccacaacaagcggcgtgcaggacgaagcagtgcacatcctttgcgtgttgcaggagtgcctgatctccgtgtggtctccatggtgccgtaaatataaagtgggctggtag

SEQ ID NO: 16435 - DNA, 204 bp, synthetic construct
  source 1..204: mol_type = other DNA; note = Synthetic coding sequence
atgagtcggcgtaggttcgactgtagatccatttcagggctgttaacaactaccccccaaatacccatcaagatggaaaatttcaacaatttctatatcctgacatccaaagagctgggaaggggtaaattcgctgtggtgaggcagtgtatttctaagagcactgggcaggaatacgccgccaaatttctgaagaagcgctag

SEQ ID NO: 16436 - DNA, 1107 bp, synthetic construct
  source 1..1107: mol_type = other DNA; note = Synthetic coding sequence
atgctcagcaagcgggggtgccacgcaagaatctacgcagactttccaatccgcagacttatcagccagcgcagctctcttgaaacactggaagatattgaggagaacgctccactccggcgctgcagaacattaagcggatcccccaggcctaagaactttaaaaaaatacacttcatcaaaaatatgcgccagcacgatacccgaaacgggcgtatcgtgttgatttcgggccggagaagcttttgctcgatttttagcgttttgccatacagagatagcactcaggtgggggacctcaagctggatggaggtagacagagcaccggcgctgtttcccttaaagagatcataggtctggaaggcgtcgagctaggtgcggatggcaagactgtttcatacacgcagttcttactccctaccaatgccttcggcgccaggagaaacacgatcgactccacctcctcattttcgcagtttcgcaacttgtcgcatcgaagccttagcataggccgggcttccggcacacagggcagcctcgacactggaagtgacctcggggatttcatggattatgaccccaatctgcttgacgatccacaatggccttgcgggaagcataaacgagtacttatcttccccagctatatgactacagtgatagactacgtcaagccaagcgacctaaaaaaggacatgaacgaaactttcaaggaaaagttcccccacatcaaactgactctttctaaaatcaggtctctgaagagagaaatgagaaagctcgcccaggaagattgtgggctagaggagccaactgtcgccatggcatttgtttattttgaaaagctcgcactcaagggcaagctgaataaacagaaccgtaaactttgcgctggggcatgcgtgttgcttgcggccaaaatcggttccgatctgaaaaagcacgaggtcaagcacttgattgataaactcgaagagaagtttaggttgaacagacgcgagctgatcgctttcgaattccccgtgttggtcgcccttgagtttgccctccatctcccagaacacgaggtgatgccccattacagacgcttggtccagagcagctag

SEQ ID NO: 16437 - DNA, 795 bp, synthetic construct
  source 1..795: mol_type = other DNA; note = Synthetic coding sequence
atgacagatgtgccggctaccttcactcaggcggaatgtaacggcgataagcctcctgagaacggccagcaaaccatcactaagatttctgaggagctaacagatgtcgatagtcctctgcctcactaccgcgtagaaccatctctggaaggcgcgctcacaaagggctcccaggaggaaagacgaaagttgcagggaaacatgttgttaaatagtagcatggaggataaaatgcttaaggagacatctgctgacgagatgacattcagggaaggccatcagtgggaaaagatacccctaagtgggagtaaccaagaaataagaaggcaaaaggaaaggataaccgagcagcctctcaaggaagaagaggacgaggatcggaaaaataaaggccatcaggctgcagagatcgagtggctcggattcagaaagcccagccaggctgacatgctgcactctaaacatgatgaagagcaaaaggtgtgggacgaggaaatcgatgacgacgacgacgataattgtaacaacgatgaggatgaggttcgagtaatcgagttcaagaaaaagcacgaagaggtttctcaatttaaggaggaaggtgacgcatccgaagattcccccttgtctagtgccagctctcaggcagtgaccccagatgagcaacccacccttggaaagaaatccgatatttcccgcaacgcctattcacgatataacacaatcagttacaggaagatcaggaaaggaaacacaaaacagcgcatcgatgaatttgagagtatgatgcacttgtag

SEQ ID NO: 16438 - DNA, 4302 bp, synthetic construct
  source 1..4302: mol_type = other DNA; note = Synthetic coding sequence
atgtggagcctaaccgcaagcgaaggagagagcactaccgcccattttttcctgggcgccggtgacgagggtttggggacaagaggcatcgggatgcgcccagaagaaagtgactccgagctgcttgaagatgaggaggacgaggtgccgccagagcctcagatcatcgtggggatctgcgcaatgacaaaaaaatccaaatcaaagcctatgacccagatactcgaaagactatgccgtttcgactatcttactgtggtaatcttgggggaggacgtcattctgaatgaacccgtggagaactggcccagctgtcactgcctgatcagttttcactccaagggctttccactcgataaggccgtcgcctattcaaagttgcgaaacccctttttgatcaacgacttggctatgcagtactatatccaggaccgccgggaggtttacagaatccttcaggaggagggtattgacctgcctaggtatgctgttctgaatcgcgatcccgctcggccagaggagtgcaacctgatcgagggtgaagaccaggttgaggtcaatggagctgttttcccaaagcctttcgtagagaaacctgtatcagccgaagaccacaacgtgtacatctattacccgagcagcgccggaggtggatcccagcgactgtttcgcaaaattggtagcagatctagtgtttattcgcccgagtcatccgtgcggaaaacagggtcctacatctacgaagaatttatgcccacagacggcaccgatgtgaaggtgtacactgtgggacccgattacgcacacgcagaggcacggaaatctccagccctggacgggaaggtggaacgtgactcagaaggcaaagagattagatacccagtgatgctaaccgccatggagaagttggttgctagaaaggtctgtgtggctttcaagcagactgtgtgtgggtttgacctgctgcgcgcaaacgggcactctttcgtgtgcgacgttaatggtttttccttcgtcaaaaacagtatgaagtattacgatgattgcgccaagatcctagggaatacaattatgagagagctcgctccacagttccagataccctggtcaatcccaacggaggctgaggatataccaattgtccctacaactagcggcactatgatggagctcagatgtgtaatcgcgattatccggcatggtgataggacccctaaacaaaagatgaagatggaagtgaaacacccccgattcttcgctctcttcgagaagcacgggggatataagaccggcaagctaaagctgaaacggcctgagcagctacaggaggtgctggatattactagactcctcctggccgaattagaaaaagagcccggcggagagattgaggagaagactggaaaattagagcaactgaagtctgtgcttgaaatgtacggtcacttctcagggataaaccgcaaggttcagctgacctactacccacatggggtgaaggcgagcaacgagggccaggacccacagcgggaaacgctggcccccagcctgctgttggttctgaagtgggggggcgaacttacccccgccggacgcgtgcaggccgaggaactcgggcgcgctttccgctgcatgtatccgggaggccagggggactacgccggctttccagggtgcggccttttacgtttacactccacgttccgccacgatctgaaaatctatgccagtgatgaagggcgagttcagatgactgccgcagctttcgcgaagggcttgttggccctggagggtgagttgaccccaatacttgtgcaaatggttaagagcgccaatatgaatggcctgctggacagtgatggcgacagtctgtcctcctgtcagcatagggtgaaagccaggttacaccacatcttgcagcaagacgcccccttcggccctgaggactatgaccaactcgcccctacccggtccacgtctttactcaactcaatgacaattatccagaacccagtaaaggtttgcgatcaggtgttcgccctcattgagaacctgacccaccagataagagagcggatgcaagaccctagatccgttgatctgcaattgtaccattctgagacactggaactcatgctgcaaaggtggtccaagcttgagcgggattttagacagaagtccggtagatacgatatttccaagatacccgatatctacgactgtgttaaatacgacgtgcagcacaacggttctctcggcctgcaaggaaccgctgagctcctcagactttcaaaggccttagcagatgtcgtcatcccccaagagtatggcattagccgggaggagaagttagaaattgctgttggtttctgcctgccactgctgcggaaaatattgctagacctacagcgtacccatgaagacgagtccgtgaataagctgcatccactgtgttaccttcgctactcccgcggtgtattgtcacccggtcgccatgtgaggacacgactgtatttcaccagcgaaagccacgtgcatagtttgttatctgtgttcagatatgggggacttctcgacgaaactcaagatgcccagtggcagagagcccttgattacctatccgccattagtgagttaaactacatgacacagattgtcatcatgctatacgaggacaacacacaggaccctctgagtgaggagcgtttccacgtagagctacatttctcacccggggtgaagggcgtagaagaagaaggcagtgcgcctgcaggatgtggcttccgccctgcgtcttccgagaacgaagagatgaagaccaaccagggctcaatggagaacctttgtccgggaaaagcatcggacgagccagacagggctctgcagacctcgcctcagccgccagagggtccaggcctgccccgacggagccctctgattcgcaacaggaaagctggctcaatggaggtcttgtccgagacttcttctagcaggcccggtggctatcggctgttctcctcttcaagacccccaactgagatgaagcagagtgggcttggttctcagtgcaccggactgttctctaccactgtgctcggaggctcatcctctgccccaaacttgcaggattacgccagatcccatggcaaaaagctgcctccagcctcgctgaaacatcgggatgagctcctattcgtgccggctgtaaagcgattctctgtgtcctttgccaaacatcccactaacggtttcgagggatgtagtatggtccccaccatttacccccttgaaacccttcacaacgcactctcactgagacaggtaagcgaatttctgtctcgggtgtgtcagaggcatactgatgcgcaggcccaagcctctgcggctctcttcgactctatgcactcttcacaagcatcagacaatccgttctccccaccacgtacattacacagtcctcctctgcaactgcaacagagaagcgagaagcctccctggtactcttcggggccgtcctctaccgtcagctccgcagggccatcaagcccaacaacagtcgacggcaattcacagtttgggttttctgaccagccatctctcaattcacacgtggccgaggagcaccagggcctaggtctccttcaggaaacccccgggtccggggcgcaggagctcagtatagagggcgagcaggagctgtttgagcccaaccagtctccccaggtgcccccaatggaaacttctcagccttacgaggaagttagccagccctgtcaagaagttccagatattagtcagccctgccaggatatttctgaagctctgtcacagccctgccaaaaggtgcccgacatctcccagcaatgccaggaaaaccacgacaatggaaatcacacatgccaggaagtcccccacatttctcagccttgccagaagtcgtcacagctgtgtcaaaaggtgtcggaagaggtgtgccagctttgcctcgagaactctgaagaggttagtcagccatgccagggagtatcagtagaggtcggcaagctggtacacaaatttcacgtcggtgtcggcagcctcgtgcaggaaactttagtcgaagtcggcagtcctgcagaggagatccccgaggaagtgatacagccatatcaggagttctccgtagaagtcggcagattggcccaggaaacttctgcgattaacctcctgtcccaggggattcctgagatcgacaaaccatctcaagaatttcctgaggagatcgatttacaggctcaggaagtgccggaggagatcaactag

SEQ ID NO: 16439 - DNA, 810 bp, synthetic construct
  source 1..810: mol_type = other DNA; note = Synthetic coding sequence
atgtttccagcactcgagacccacctgaaacaaaccatccctgatccatacgaggacttcatgtatagacacctgcagtattatggctattttaaagcccaacgggggagcttacctaactccgctacacaccagcatgtgcgcaaaaataatcctcaatgtctgcttaatggatctcttggcgagaaagatgacctcattcccgacacattacaaaaggagaaactactgtattcccacatgctatccttaccacatttacggtccagacagctcctttacgatgagctggatgaagtcaatcccaggcttagagagcctcaggaactattctcgattctctcgactaagcgtcccctgcaggcccccaggtggcctatcgaatgtgaggtcatcaaggagaacatccaccacatcgagtgggcgcctccacagccagagtacttctaccagcccaaggggaatgaaaaggtccctgaaatcgtgggagaaaagaaggggacagtcgtgtatcagttagattccgtgcctatcgaggggtcatatttcacctcctcacgagtgggcgggaaacggggcattgtgaaagagttagctgtgaccttgcagggccctgaggacaacacattactcttcgagtctagattcgaatccggtaaccttcagaaggccgtcagggtggacccaatgagtatgaactctccctgtgagcttacttcgaccctgacaaacactctgtctggattcatttttgtgttccgtacgcccgagaagatgctccctatcgctagtcctctgagtacttgctag

SEQ ID NO: 16440 - DNA, 975 bp, synthetic construct
  source 1..975: mol_type = other DNA; note = Synthetic coding sequence
atgccattacaggtcagtgattactcatggcagcagacaaaaaccgccgtttttctcagcctgccactgaaaggagtatgtgtgcgtgatacagacgtgttttgcaccgaaaattatcttaaagttaacttccctcccttcctgttcgaggcgtttctatatgctccgatcgatgacgagtctagtaaggccaagatcggcaatgatactattgttttcaccctgtacaaaaaggaggcagctatgtgggaaaccctgagcgtaactggtgtagacaaggaaatgatgcagaggattcgtgagaagagtattctgcaggcacaagagagggctaaggaagcaacagaagccaaggctgcggcgaaaagggaggaccaaaaatacgcgctgtcagtgatgatgaaaattgaagaggaggagcgaaaaaaaattgaggatatgaaagagaacgagcgtataaaggcaaccaaagcgctggaagcttggaaggaataccaaaggaaagcggaggagcagaagaaaattcaacgggaggagaaactctgccagaaggagaagcaaattaaagaagaacgcaagaagatcaaatataagagcttgactcgcaacctagcctcgcggaatctggcccccaaaggcaggaatagcgagaacattttcaccgagaaacttaaagaagacagcatacctgcaccaaggagcgtgggtagtataaaaatcaatttcacccctagggtcttcccaactgcgctgagggagagtcaagtggccgaagaggaggaatggttacacaagcaggccgaggcgagacgcgccatgaacactgacattgctgagttgtgtgatctcaaagaagaagagaaaaatcccgagtggctgaaagataagggaaaacctgaaaggtgcctgaaaatacctgtgacagtcatccacctagtggtaggactcagcagcgttatgcgcggccagatctag

SEQ ID NO: 16441 - DNA, 162 bp, synthetic construct
  source 1..162: mol_type = other DNA; note = Synthetic coding sequence
atgcagacctcatcaagccggagcgtgcatctctctgagtggcagaaaaattattttgcaattacgtcagggatctgtaccggtccgaaggcagacgcatacagggcccagattctgcgcatacagtacgcctgggccaattcggaaatctcacaggtttag

SEQ ID NO: 16442 - DNA, 2079 bp, synthetic construct
  source 1..2079: mol_type = other DNA; note = Synthetic coding sequence
atggtgaccacccttggacccaagatggccgcagagtgggggggcggtgtgggctactccggatccggccctgggcgcagccggtggaggtggagcgggagtgtctgggttcgctctgtgctcctgttactgggcggactcagagcgtctgcaacatccacccctgtgtctctcggcagtagcccaccctgcagacaccacgtgccaagtgacactgaggtgatcaataaggtgcatttgaaagccaatcacgtcgtgaagagggacgtggacgagcatctgcgcataaaaacagtttacgataagagtgtcgaagaactgttaccagagaaaaagaacctggttaagaataaactgttcccccaggccatctcatatctggagaagacattccaggtgaggcgccccgccggcacaatcttactctctcgccagtgtgccacaaatcaatatctaagaaaggagaatgatccccaccggtactgcactggtgaatgcgccgctcacactaagtgtggtccagtcatcgtgcctgaggagcacctgcagcagtgtcgcgtgtatagaggtggtaagtggccacacggcgccgtaggcgttcctgatcaggaaggtatctcagatgccgacttcgtgctgtacgtgggcgcgctcgccaccgagcggtgctcgcatgaaaacatcatctcatatgctgcatactgtcagcaagaagccaacatggataggccaattgctgggtatgctaatttatgtcccaatatgatttcaactcagccacaagagttcgtgggcatgctgtccaccgtgaagcatgaggtgattcatgcactgggatttagcgccggactcttcgcattctaccatgacaaggacggcaacccactcacctcccgctttgccgacggtctgcctccctttaattactcactcggactctaccagtggtctgacaaggtggtgagaaaagtggagcggctctgggatgtgcgtgataataagattgtgagacacacggtctatctgctggtaacccctcgcgtggtcgaggaggcgcgcaagcactttgactgtcctgtgttagaaggcatggagttggagaatcagggcggggtggggactgagctgaatcattgggaaaagcgcttacttgagaacgaagccatgactggcagtcatacacagaaccgggtattgtctaggatcacacttgccctgatggaagatacaggctggtataaagcaaactacagcatggctgagaaacttgattggggtcggggtatgggctgcgacttcgtgcgcaaaagctgcaagttttggattgaccagcagagacagaagcgacagatgctatccccctattgcgacactctgcgcagcaaccctctacaattaacctgcaggcaggaccagagagctgtggcggtgtgcaatcttcaaaagtttcccaagccattaccacaggagtatcagtacttcgacgagctgtcaggaattcctgccgaagacctgccctactacggcggaagcgttgaaatagcagattactgcccgttctcccaggagttcagctggcacctgagcggcgagtaccagcgaagtagcgattgccggatactagagaaccagcccgaaatttttaagaactatggggcggagaagtatggtcctcactcagtttgtcttatccagaagagtgccttcgttatggagaaatgtgaacgaaaactgagctaccctgactgggggtctgggtgttatcaggtctcctgctcaccgcagggtctgaaagtgtgggtgcaagatacttcatacctgtgcagtcgggccggacaagtgttacccgttagtatccagatgaatggctggatccacgacgggaacttattgtgtccatcttgctgggatttctgtgaactttgtcccccagaaaccgacccacctgcaaccaacctgactcgcgctctgcccctagatctgtgctcatgcagttcatctctcgtcgtaactctgtggctgctgttaggcaatctcttccctctgttggccggattcctcctctgcatttggcattag

SEQ ID NO: 16443 - DNA, 3021 bp, synthetic construct
  source 1..3021: mol_type = other DNA; note = Synthetic coding sequence
atggatagtagtcagcagaaaactttcagaggacacgacgccccagtccttagcctcagcttcgatcccaaggatatctttctggcctctgcttcatgcgatggatccgtgagggtttggcagatcagtgatcagacatgtgccatcagctggccactcctgcaaaaatgcaatgacgtgataaacgcgaaaagcatttgccgtctggcgtggcagcctaaatcgggcaaactgttagccatccccgttgagaaaagtgttaaactttaccgccgggagtcttggtctcaccagtttgacttgtcggacaatttcataagccagaccctaaatattgttacgtggtcaccttgtggtcagtacctggccgccggctccatcaatggactgataattgtatggaatgtggagacaaaagattgcatggagcgcgtcaagcatgagaaagggtacgccatctgtggactggcgtggcaccccacctgtgggcgcataagctacaccgatgctgagggaaatctggggctgcttgaaaacgtctgcgatccctccggaaagaccagctcttctaaagtgtcatcacgcgtagagaaggactacaacgatctgtttgatggcgatgacatgtctaacgccggggactttttgaatgacaatgcggtcgagatccctagtttcagtaaggggataatcaatgatgacgaggatgacgaggaccttatgatggcgtcagggcggccgcgtcagaggtcccatattctggaagacgacgagaactcggtggatatctcaatgctgaagaccggatcttcgctgctgaaggaagaagaggaggatggccaggaaggctctatacacaatctcccccttgtcacttcgcagagacccttttacgatggacccatgccaacgccgagacagaaacctttccagtctggttctacccccctccacctgactcatcggtttatggtgtggaactcaattggaatcattaggtgctacaacgatgagcaagataatgctatcgacgtcgagttccatgacactagcatccaccacgcaacgcatctctcgaataccttgaattacactattgccgacctgtcacatgaggctatattgctcgcatgcgaaagtaccgatgagctggcttctaagctgcactgcctgcacttttcgagttgggacagtagcaaagagtggatcatcgatcttccccagaacgaagacatcgaggcaatctgcctcggacaaggctgggccgcagccgcaacaagtgcccttctgctccggttgtttaccattggcggcgtgcaaaaagaagttttcagcctggccgggcccgttgtgtccatggcaggacacggcgaacagctgttcatcgtctatcacaggggaacaggattcgacggagaccagtgcttgggggtccagctgttggaacttggaaagaaaaagaaacaaattttacatggcgatccactgcccctgaccagaaagtcgtacttggcttggattggcttcagcgccgagggcactccctgctacgtggatagtgagggtattgtgcggatgttaaatagagggctggggaatacttggactccgatctgcaatacaagagaacactgtaagggtaagtcagatcattattgggtggtagggattcacgaaaacccccagcaactccgctgtatcccatgcaaggggtcccggttcccccccacccttccgagaccagccgtcgctattctaagcttcaagttgccgtactgtcagatcgccacagaaaagggtcagatggaagagcagttctggcgatctgtgattttccacaaccacctcgactacctggcaaaaaacggatacgagtacgaagaaagcaccaagaaccaagccacaaaagagcagcaagagctgctgatgaaaatgctggcccttagttgcaaactggagcgggagtttagatgcgtcgaactggctgatctcatgacacaaaacgccgtgaatctcgctatcaagtacgctagtcgctccaggaaattgatcctggcccagaagctgagcgagctcgcagtggaaaaagcagctgagctgaccgcaactcaagtggaggaggaggaagaggaagaagattttcgaaagaagttaaacgccggctactctaacaccgctacggagtggagtcaaccccggtttcgtaaccaggtagaagaggacgctgaagattccggcgaagcggatgatgaggagaagccagaaatccacaagcctgggcaaaacagcttcagtaaatccactaattccagcgatgtgtccgccaaatcaggcgccgtgacattttcaagccagggtagggtaaatcccttcaaggtctccgccagctccaaagagccagccatgagcatgaactccgcgaggtcaacaaatatcctggacaacatggggaagagttcgaagaaatcgaccgccttatcaaggactacgaacaatgagaaaagtccaatcattaaaccactgataccaaaacccaaaccaaagcaggcatccgcagccagctactttcagaagcgtaactcccagaccaacaaaacagaagaagtgaaagaggaaaacctcaagaacgttttatctgaaacaccggcaatttgcccgcctcaaaacaccgaaaatcagcggcccaagacagggtttcagatgtggctggaagagaaccggagcaacatcttgtccgacaatccagatttcagtgacgaggcggacattattaaggagggcatgatcaggtttagggtactgagtacagaggagcgaaaagtctgggccaacaaagctaagggcgaaactgcgtccgaggggacagaggcaaagaaaagaaaacgggtggtggacgagagcgacgaaactgaaaatcaagaggaaaaggcgaaggaaaatttaaatctgtctaagaaacagaaaccactggatttttctacaaaccagaaattgtcagcattcgcctttaaacaggagtag

SEQ ID NO: 16444 - DNA, 540 bp, synthetic construct
  source 1..540: mol_type = other DNA; note = Synthetic coding sequence
atgactgaagatagccagcgcaattttcgcagtgtgtattatgaaaaggttggttttagaggtgtggaggagaaaaagtctctggagatactgttgaaagacgatcgcttggacaccgaaaagctgtgcacgttcagtcagagatttcctttgccgagcatgtatcgagcgctggtctggaaggtcctgctagggatcctgcctccccatcacgagagtcatgccaaagtgatgatgtatagaaaggaacaatatctcgacgtgctgcacgccctgaaggtcgtgcggttcgtgtctgatgccacaccccaggccgaggtgtacctcaggatgtaccagctggaaagcggcaaacttccacgttcacccagtttcccacttgaacctgatgacgaagtttttctggctatcgctaaagcgatggaggagatggtggaggattccgttgattgctactggatcactagacggttcgtcaaccagctgaacaccaagtatagagatagcctgccccaactggagggcattaatgtgggctag

SEQ ID NO: 16445 - DNA, 3189 bp, synthetic construct
  source 1..3189: mol_type = other DNA; note = Synthetic coding sequence
atgatatctaaaggcgggtctgaggcgcttttacagacactcgtggatactgcacgaaccgcacccccggattatgacatcctgctcccgctcttccggttgcttgcaaaagtgggactgagagataaaaaaataggccgaaaagccctggagctggaagcactggacgttaccctgatcttggcgcgtaaaaacctatcacacggccaaaatctgttacactgtttgtgggccctgagagtatttgcgagttctgtgtccatgggggccatgctgggtatcaatggcgccatggagttgctcttcaaggttatcactccatacacacgaaagcgaactcaggccattcgtgctgccacagaagtgctcgctgctctccttaaatctaaaagcaacggtagaagggccgtaaaccgcggttatgtcacatccttgctgggtttgcaccaggattggcacagtcacgacacagcaaatgcctacgtgcagatacggaggggcttgcttctgtgtttgagacatatagcagcactcaggtccggacgtgaagcatttctcgctgcccaggggatggagatcctgttttcaactacccagaactgtctcgacgacaaatccatggaacccgttatttctgtcgtgctacagatactcaggcaatgctacccgacatcccccttacccctcgtgacggcttccagcgcatatgcctttcccgtacccggctgcattacgacggagccaccccatgacctcccagaagaggacttcgaggacgatggagacgacgaggttgacaaagattcagacacagaagacggcaaggtcgaggacgacgacctggaaacagacgtcaataagctgtcatctaaaccaggcttagaccggccggaggaggaactgatgcaatacgaggtgatgtgtctggaattgtcatactcattcgaggaattgcagagtaagctgggcgatgacctgaatagtgagaagacccaatatgccaaccaccatcacattcctgcagctgccagctccaaacagcattgctatagcaaggatcagtcatcctgtggtcaggagcgcgagtacgcagttcagacttcattactctgtcgagtgaaaactggcagatccacagttcacttaggatccaagaagaacccgggagtaaacctgtaccaaaacgtccaatcaaatagtctgagaagagacagtagcgaaagtgagatccctgacatccaagcatcaccgaaggcggatgcttgggacgttgacgccatattttgccctaggatgtccgccagcttcagtaactctaccaggaccagggaggtggtcaaagtaatcgacaaactattacaaacccacctgaagagggtgccatttcacgacccctatctgtatatggccaaggctcggaggacgagctcagtggtggattttaaaatgatggctttcccagatgtgtggggccactgtcccccccccacaacgcaacccatgcttgagaggaaatgtggcgtgcagagaattaggattttcgaagatatccggcgtttaatacaaccatccgacgtcataaacaaggtcgtgttttctctcgatgagccctggcctctgcaggacaatgccagcaattgcctgcgatttttttccaagtttgagagtggaaatctacgcaaggccatccaagtgagggagttcgagtacgatctgctcgttaatgccgacgtcaacagcactcagcatcagcagtggttttacttcaaagtgtctgggatgcaagctgctataccatatcattttaacattatcaactgtgaaaagccgaacagccagttcaattacggcatgcagccgactctctactcagtgaaagaggcactgctggggaagcctacctggatccgtaccggacatgaaatttgttattataagaaccactatagacagagcactgccgtggcaggcggggccagcggaaagtgctactacactctgacttttgccgttaccttccctcactctgaggatgtatgctatcttgcttatcactacccttatacatatacagctctgatgacccatctggacatccttgagaaatcagtgaacctcaaagaggtgtacttccgacaggatgtattatgtcagactctgggtggtaatccctgtcctttagtcactataactgctatgcccgaaagcaactctgatgagcacttagagcagttccggcacaggccttatcaggtcatcaccgctagagtgcatccaggcgagtccaacgctagctgggtgatgaagggcacactcgagtttctggtgagtagcgatcctgtggcgaggctgttgcgcgagaatttcatatttaaaatcatacccatgcttaaccctgacggtgttataaatgggaatcatagatgttccctgtctggagaggacttgaatcgccagtggctctcacccagcgcccatttgcagcccactatttaccacgccaagggtttgctttaccacctcagcagtatcggtcgctcgccagtagtcttctgcgatttccatggtcacagtcagaagaagaatgtcttcttatatggctgtagtattaaggaaactttgtggcaagccgcatgtaccgtaggaacgagtacaatcctggaggaggtgaattataggacactgcctaaaattttagataagttggctccagcattcaccatgagttcttgctcgttcctggtggagaaatcgcgagcctctactgcacgcgtggtggtgtggagagaaatgggcgtgtcccgctcttacaccatggagtcctcctactgcggttgtaatcaggggccctaccaatgcacgcagcgcttgcttgaacggacgaaaaacgaacgtgcccaccccgttgatgggcttcaaggactgcagtttgggacacgagaactagaggaaatgggagccatgttctgtctgggcctgctgatcctagaactcaagagcgcctcctgcagtcaccaactcctggcacaggccgccactctgctcagcgctgaagaagacgcactggaccaacacctgcagcgactgaagtccagcaatttcctgcccaaacacatttggttcgcttaccacttctttgcgataaccaacttcttcaagatgaatctgttgctccacgtgtctccctag

SEQ ID NO: 16446 - DNA, 738 bp, synthetic construct
  source 1..738: mol_type = other DNA; note = Synthetic coding sequence
atggcggctgcgcctcctagttactgttttgtcgcattcccaccgcgggcaaaagatggcctggttgttttcggaaagaattcagcccgcccccgggacgaggtgcaggaagttgtgtatttttctgcagccgaccatgagcctgaatcaaaggtagagtgcacatacatcagcattgaccaggtcccacgaacctacgctataatgatctcgcggcccgcgtggttgtggggagccgagatgggagcgaatgagcatggtgtatgcatcgctaacgaggccatcaatacccgagagcccgcagcagaaatcgaggccctactgggaatggatcttgtaaggctgggtctggagaggggtgaaactgccaaggaggcactcgacgtgatcgtgtctctccttgaagaacatggccagggaggcaattatttcgaggatgcgaactcttgtcatagcttccagtcggcatatctcatcgttgacagggatgaggcctgggttctggaaactattgggaaatactgggcagcagagaaagtgacagagggagtgagatgcatctgttctcagctgagtctgacgaccaaaatggacgccgagcacccggaactccggtcgtacgcccagtcccagggctggtggacaggagaaggagaattcaatttttctgaagtttttagtcccgtggaggaccacctagattgcggagcagggaaagacagcctggaaaaacagtag

SEQ ID NO: 16447 - DNA, 99 bp, synthetic construct
  source 1..99: mol_type = other DNA; note = Synthetic coding sequence
atgtcggagcagggagatttaaaccaggcgatcgccgaggaaggaggaaccgaacaggaaacagcaacccctgaaaacgggatcgtcaagagtgagtag

SEQ ID NO: 16448 - DNA, 132 bp, synthetic construct
  source 1..132: mol_type = other DNA; note = Synthetic coding sequence
tgagtacttgggagcccgaaaccagaggagatccctctgacttggatccagcccggtactaccgtgcttaactgttcacatgatttcctgtccgaatccctaatcatcatcaggcgaatggccattttctag

SEQ ID NO: 16449 - DNA, 339 bp, synthetic construct
  source 1..339: mol_type = other DNA; note = Synthetic coding sequence
atgtttgctaagcttaagaagaagattgctgaagaaacagctgtcgcccagagaccggggggagccacacgcatccctaggtccgtctcaaaggaaagtgtcgcatccatgggggccgacagcggtgacgattttgccagcgatgggtctagttcgcgcgaggacctgagtagccaactcctgaggcggaacgagcagattcgtaagctagaagcccgcctgagtgactacgcagagcaggtgagaaacctgcagaagattaaagaaaagcttgagattgctctggaaaagcaccaggattcatcaatgaggaagttccaggaacaaaatgagacctag

SEQ ID NO: 16450 - DNA, 579 bp, synthetic construct
  source 1..579: mol_type = other DNA; note = Synthetic coding sequence
atgggaaagggatgcaaagtggttgtgtgtggcctcttgtccgtgggtaaaacagccatcttagaacagctgctgtacggcaaccacaccatagggatggaggactgcgaaactatggaggatgtgtacatggcctcagtcgagacggataggggtgtgaaggagcagttacacctatacgatacccggggactccaggaaggggttgaacttcctaagcactacttttcttttgctgatggattcgttttggtatactctgtaaacaacctggagagcttccagagggtggaactgcttaagaaggagatcgacaagttcaaagataaaaaggaagttgcgattgtggtgttaggcaacaagattgatttgtctgaacaacggcaagtggatgccgaagtcgctcaacagtgggctaaaagcgaaaaggttcggctttgggaggtgacagttactgaccgcaagacactcattgagccttttactctcctcgcaagtaagttatcccaaccacagtcaaagtcttcattccctctccctggaagaaaaaacaaaggcaactctaattccgaaaactag

SEQ ID NO: 16451 - DNA, 1458 bp, synthetic construct
  source 1..1458: mol_type = other DNA; note = Synthetic coding sequence
atggcccctcgtcttcagctggaaaaagccgcctggcgctgggcggagacagttagacctgaagaggtctcccaggagcatattgagactgcctatcggatttggctggagccttgcatcagaggggtgtgtagaagaaattgcaaaggaaatccaaattgtttggtgggaatcggagaacatatctggcttggagaaatcgacgagaattcattccataacatcgacgatccaaattgtgagcgtagaaagaagaattccttcgtgggcctcacaaacttaggggccacatgctacgtaaacactttcctgcaggtatggttcctgaaccttgagcttaggcaggcactgtatctgtgcccttcgacatgtagcgactacatgctgggcgatggaatacaggaagaaaaggactacgagccccagacgatctgtgaacacctccaatacttgtttgccctgctacagaactcaaatcgtagatacattgatccttctggatttgtgaaagctctcgggctggataccggccagcagcaggacgctcaggaattctcgaaacttttcatgtccttacttgaggacacactctctaaacaaaagaaccccgatgtaagaaacatcgtacagcagcagttttgcggggagtacgcgtacgtgaccgtttgcaaccagtgtgggcgggagtcaaagcttctatccaagttttatgagctggaactcaatatccagggtcacaagcagcttacagactgcataagcgagtttctgaaagaggagaagctcgaaggggataatagatatttctgcgagaattgccagtcaaagcagaacgcaacacgtaagatccggctgctgtccctcccatgtactctcaacctccagcttatgaggttcgtctttgataggcagacagggcacaagaagaagcttaacacctacataggcttttctgagatcctcgacatggaaccctacgttgagcacaagggaggctcatacgtctacgagctttctgccgtcctcattcaccggggcgtaagtgcttactctggccactacatcgcccacgtgaaagatcctcagtctggcgaatggtataaatttaacgatgaggatattgagaagatggagggaaagaagttgcagctgggtatcgaagaagacctggcagagccaagtaaatcccagacccgcaaacccaagtgtggtaagggcactcactgttcacggaatgcgtacatgctggtctaccgcttacaaacgcaggaaaaacccaatacaacggtccaggttcccgcctttctccaggagcttgttgacagagacaatagtaagttcgaagagtggtgtattgagatggccgagatgagaaagcagagcgtcgacaaaggcaaagccaaacacgaggaagttaaggagctgtatcagcgcctccccgccggtgccggtttatag

SEQ ID NO: 16452 - DNA, 1119 bp, synthetic construct
  source 1..1119: mol_type = other DNA; note = Synthetic coding sequence
atggacgtattatcccctctgtcattcatcaaggtgagtcacgtgcgcatgcaagggattctgctgctagtattcgcaaaatatcagcatctcccttatatccaaattctcagcacaaagagcacacctacaggtctgttcggatattgggggaataaaggtggagtgaacatatgcctgaaactatatggatattatgtgtctattatcaactgccatctgccgccacatattagtaacaattaccagcggttggaacacttcgacagaatcttggaaatgcaaaattgtgagggccgcgacattcctaacatcttagatcacgacttgataatctggttcggggatatgaattttcgtattgaagacttcgggctgcactttgtgcgggaaagcatcaagaacagatgctatggtggcctgtgggagaaggatcagctgagtatcgcaaagaagcatgaccctctcttgcgcgagttccaggaaggccggcttctgttccctcctacatacaagtttgatcggaattcaaatgactacgataccagcgaaaagaagcgaaaaccagcatggacagatagaatcctgtggaggctgaagcggcagccatgcgccggaccagacaccccaattccgcccgcaagccacttttccctgtccctccgggggtattcatctcacatgacttacggcatttctgatcacaagccggtgagcggaacttttgacctggaattgaagcccctggtgagcgcgccactcatagtcctcatgcccgaggatttatggacagtggagaacgacatgatggtgagttactcctcaaccagtgactttccttcgtcaccgtgggattggattggcctgtataaagtggggttaagagacgtaaatgattatgtgtcctacgcctgggtaggcgacagcaaggtgagctgtagtgataatttgaaccaggtgtatattgatatttcaaatatccccacaacagaggacgaattcctcctgtgctattacagtaacagtttgcgttctgtggttgggatcagccgcccctttcaaatccccccaggctcactgagggaggaccccctaggcgaggctcaacctcagatttag

SEQ ID NO: 16453 - DNA, 1548 bp, synthetic construct
  source 1..1548: mol_type = other DNA; note = Synthetic coding sequence
atgtcagaaggcgagtcgcagacatcagtgagccctcccgtcacttccaccaccagcgccgccagccctgaagaagaggaagaatctgaagatgagtcggagattctggaagaatccccttgcggcaggtggcagaagcgacgagaagaggtaaaccagagaaacgtcccagggattgactccgcctacctggcaatggataccgaagagggggttgaagttgtctggaatgaggtccaattctcagagagaaaaaactacaagctccaggaagagaaggtgcgagctgtgtttgataatctgattcagcttgagcacctgaatattgtcaagtttcataagtactgggccgatatcaaggagaacaaggcgcgggtcatcttcatcacagaatatatgtcaagcggctctctgaaacaattcctgaagaaaacgaaaaagaaccacaaaaccatgaacgaaaaggcgtggaaaaggtggtgcacacaaatcctgagcgctttgagctacctgcactcttgtgatccccctatcatccacggaaatcttacctgtgatactattttcattcagcataacgggctaataaagattgggtctgttgccccagatacaatcaacaatcatgtgaaaacttgcagagaggaacaaaagaacctgcactttttcgcgccagaatacggtgaggttaccaacgtgacgactgccgtggacatctactcatttggaatgtgcgccctggaaatggccgtattagagatacagggcaacggagaaagctcgtacgttcctcaggaggctatatcgtctgccatccaactgttggaggacccactgcagcgggaattcattcagaagtgtctgcagagcgaacctgcacggcggcctacagcgagagagttactgtttcacccagccttgttcgaggttccatccttgaaattgctggctgcacactgtatcgtaggccatcagcacatgatccccgaaaacgctttggaggaaattactaagaatatggacactagcgctgtcctagccgagatccccgctggccccggccgtgaaccagttcaaaccctgtactcccaatcaccagccctggaactcgacaagttcctggaagacgtccgaaatggtatctatccgctgaccgcgtttggtctacccagaccacagcagccccagcaggaggaggttacaagccctgttgtgcctccaagtgttaagaccccaaccccagaaccggctgaggtggagacacgcaaggttgtcctgatgcagtgtaacattgaaagcgtggaagaaggagtgaagcaccacttgaccctgttgttgaagctcgaggacaagttgaatcgacaccttagttgcgacttgatgcctaatgagaatatccctgagctggcagccgagctcgttcaattaggtttcatctccgaagccgaccagagtagactgacaagcttgctggaggaaaccctgaataaatttaactttgcccgcaatagtactttgaatagtgccgccgtgactgtatcaagctag

SEQ ID NO: 16454 - DNA, 435 bp, synthetic construct
  source 1..435: mol_type = other DNA; note = Synthetic coding sequence
atgtcgtcacctctggcgtcattgtcaaagacccgcaaggtcccattgccttcagaaccgatgaacccaggccggagaggtatccgtatttacggggacgaggacgaggtagacatgctgagcgacggctgtggcagtgaggaaaaaatcagcgtgccctcctgctacggcggcattggtgcaccagtttccaggcaagtgcccgcatctcatgattccgagcttatggcattcatgacccgcaagctgtgggatttggagcagcaggtaaaagcacagaccgacgagatcctcagcaaagaccagaaaatcgccgcgctcgaggacctggtccagacactgaggcctcacccagctgaagctaccctccagcggcaggaggaactcgaaaccatgtgcgtgcagttacagcggcaggtgcgagagatggaatag

SEQ ID NO: 16455 - DNA, 1047 bp, synthetic construct
  source 1..1047: mol_type = other DNA; note = Synthetic coding sequence
atgcccgcccctccatgcgctagctgccacgctgcaagagctgctctgcgacggcccttgtcaggacaggcgctctgcggcgcttgcttttgtgctgcctttgaagcagaggtgttgcatacagtcctggcaggaagattgcttcctcctggcgctgttgtggctgtgggagcgagcggcggaaaggactctactgtgctagctcacgtcctccgcgcgctagcgcctcggcttggtattagtttgcagcttgtcgctgtggacgaaggcataggaggatatagggatgccgcgttggcagctgtccgacggcaggccgctaggtgggagctgccactgacagtcgtggcttatgaagacctctttggaggatggacgatggacgctgtcgcccgctcgactgcgggctccgggcgctctcgaagctgctgtactttctgcggcgtgctgaggcgccgagccctagaggagggggcacgcagagtgggggcgacgcacatcgtcaccggacataatgcagatgatatggccgagaccgtgctgatgaatttccttcggggtgacgcaggtcgactagcgcggggcggtggtctcggatcccctggggaggggggggcactccctcgatgtaggcctcttcagtttgcaagtcagaaagaggttgtgctctatgcccattttcggagactggattacttcagcgaggaatgcgtgtatgcccccgaagcctttcgaggtcatgcgagagatctcctcaagcggctcgaggccgccaggcctagcgctgtactggacctcgtccattctgctgagcgtctcgcactggctccagccgcacggccccccaggccaggcgcctgctcccggtgcggtgctctcgcaagccgcgcgctctgccaggcctgcgccctcctggacggtctcaaccggggccggccgagactggcgatagggaagggtaggcggggcctcgacgaggaggcgacccccgggacccctggcgatccagcaagaccccctgcttctaaagccgtaccgaccttttag

SEQ ID NO: 16456 - DNA, 321 bp, synthetic construct
  source 1..321: mol_type = other DNA; note = Synthetic coding sequence
atgccagaggatcaggtgggaaaactcgaagcaaccgaaaatacaatctccgcaatggcagccgcggcagctgagcaacagcaattttacctactcttgggcaatctgttgtcaccagacaatgtggtgaggaaacaagccgaagagacctatgagaacattcctggccagagcaagatcaccttcctgctccaggccattcggaacactactgccgctgaggaagcaaggcagatggctgctgtcctgcttaggaggctcctcagctccgcatttgacgaggtatacccagcattgccatctgacgtccaaacggcttag

SEQ ID NO: 16457 - DNA, 198 bp, synthetic construct
  source 1..198: mol_type = other DNA; note = Synthetic coding sequence
atggagctcagatgtggcggactgctcttctcttcccgtttcgactccggcaatctggcgcatgtggagaaggttgagagccttagctccgacggagagggagtggggggaggggccagcgctctgacctccggtattgctagctctccggactatgaatttaacgtgtggaccagaccagactgcgcagaaacttag

SEQ ID NO: 16458 - DNA, 1371 bp, synthetic construct
  source 1..1371: mol_type = other DNA; note = Synthetic coding sequence
atggctgactccttggaatccacacctctgcctagtcctgaagatagactggccaagctgcatcctagcaaggaattgctggagtattaccaaaaaaagatggcggagtgtgaagcagagaatgaggatttgctgaagaagctcgaattgtacaaggaagcctgtgagggacagcataagttggagtgcgacctgcagcagagggaagaggaaatcgccgaactgcagaaagccctctctgacatgcaggtgtgcttgtttcaagaacgcgaacatgtattgaggctatactccgagaacgataggttgaggatcagagagctggaggacaagaaaaagattcaaaacctgttggctctggtaggtacagatgcaggcgaggtgacctatttctgtaaggagccaccccacaaagtgacgatactgcagaagacgatacaggccgttggcgagtgtgagcagtctgagagctctgcattcaaggcagaccccaaaatttctaagagacggccgtctagggaaaggaaggagtcctccgagcattaccagcgggacatacagaccctcatcctgcaggtggaggctctccaggcccagctcggtgagcagactaaattgagtcgtgaacagatcgagggcttgatcgaagatcggcgaatacatctggaggaaattcaggtccaacatcaacgaaaccagaataaaatcaaagaactgacaaaaaacctgcaccatacccaagagttactgtatgagtcaaccaaagacttcctacagcttaggagcgagaaccagaacaaagagaaatcgtggatgctcgaaaaggacaacctcatgagtaagatcaagcagtatagggtgcaatgcaagaaaaaagaggacaaaattggtaaggtcctccctgtcatgcacgagagccaccacgcgcagagtgagtacattaaatccctcaaggacaagcttgtgcaggagaaaaagctgtctaacatgtaccaggaacaatgtattagcttggaagaggagttggcccgcatcagagaggaagagggcatgcggcgggagatcttcaaggacagaaccaacaaaatgggaaagaggctgcagattatgacaaagcgatatgaagcgttagagcgccggcggatcttagaggtggagggctttaaaactgatataaaggttttgcgccaaaagcttaaggacctggaacaaatgctttataaagctacagtgaacgcgcgggccaaccaggacttggccttactgtgcgaagtgagagactcaaacagacgtgcgcataagatccagggagagctcaagaatctgaagagtaaagtgttcggcctggaaaacgaactgcggctctgttag

SEQ ID NO: 16459 - DNA, 1275 bp, synthetic construct
  source 1..1275: mol_type = other DNA; note = Synthetic coding sequence
atggaccagccgtcaggtagaagtttcatgcaggttctctgcgaaaaatacagtccggagaactttccctatcgccggggtccaggcatgggggttcacgttccggctactccccaagggtctcctatgaaggaccggctcaacttgccaagcgtgttggttctcaacagttgcggaatcacttgcgcgggagacgaaaaggagatcgccgccttttgcgcccacgtgtctgaattggacttaagtgacaataaactggaagactggcatgaggtcagcaagattgttagtaacgttccacagctggagtttttgaacttgtcttctaaccctctgaatctctcggtcctggagaggacatgtgccggatccttctccggggtgaggaaactggtgctgaataactctaaagcgtcctgggaaaccgttcatatgattctacaggaactcccagacctcgaggagttgtttctgtgcctgaacgactacgaaacagtctcttgcccctccatatgctgtcattctttgaaactactgcacataaccgacaacaacctgcaggattggactgagatcaggaaacttggggtcatgtttccctctctggatactctcgtgctcgcgaacaatcatctcaatgccattgaggaaccagacgacagtttggcccgcctgtttcctaacttgaggtctattagcctgcataaatcaggactgcagagctgggaagacatcgacaagcttaacagcttccctaagctggaggaggtgagacttcttggcatcccgctgcttcagccatatactacagaagagaggcgaaaattggtaattgctcgattgccctctgtgagtaaactgaatggttccgtggtgaccgatggagagagagaagattcagagcgtttttttatcagatactatgtcgatgtgccccaggaagaggtgccctttcggtaccatgagctgattacaaagtacgggaaactggaaccactggcagaggtggatcttaggcctcagtcctccgctaaggtggaggttcactttaacgatcaggtggaggagatgagcattcgtctggaccaaaccgtggcagagctgaagaaacaattgaaaaccctcgttcaacttcctacttccaacatgttactttattatttcgatcacgaggccccctttggccccgaagagatgaagtattcctctagagcattacattcctttggcattcgagatggtgacaaaatctatgtggaatccaaaactaagtag

SEQ ID NO: 16460 - DNA, 264 bp, synthetic construct
  source 1..264: mol_type = other DNA; note = Synthetic coding sequence
atgtcaatttcctcggacgaagtgaattttctagtgtatagatatctgcaggaatctggcttcagccactcagcctttaccttcgggattgagagccatatttctcagagcaatatcaatggcgccctcgtccctcccgccgcactgatcagtataattcagaaaggtctgcaatacgtcgaggccgaggtttccataaacgaagacggcaccctctttgacgggaggcccatagaatctctgtctctcattgatgccgtttag

SEQ ID NO: 16461 - DNA, 360 bp, synthetic construct
  source 1..360: mol_type = other DNA; note = Synthetic coding sequence
atggtacggacaaaaacatggactctgaagaagcattttgtaggctaccctaccaattcagatttcgagctgaaaaccgccgagctccctcctctgaagaatggcgaggtgctgttggaggccttgtttctaacggttgatccctacatgcgggtcgtcgaatccaagaatgtggccctgccaaagggcaccatcgtgcttgcctcgccagggtggacaacccactcaatatctgatgggaaggacctagagaagctgctgactgagtggccagacaccatccccctgtcgctagcacttgggaccgtggggatgccaggcctgacagcttattttggattgttagagatctgtggatag

SEQ ID NO: 16462 - DNA, 23907 bp, synthetic construct
  source 1..23907: mol_type = other DNA; note = Synthetic coding sequence
atggatcagccacagttctccggcgccccaagatttctcacccgtcccaaggcattcgtggtttccgtcggcaaagacgcaacactgagctgtcagatcgtaggcaacccaactcctcaggtatcatgggagaaagaccagcagcccgtcgccgccggggcaagattccggctggcccaggacggggacctgtatcgacttacgattttggacctggcgctgggagatagtggccagtacgtatgtcgggcccgcaacgctataggggaagcatttgcggccgtgggcctacaggtggatgcggaagctgcttgcgcagaacaagcccctcacttccttcttcgtccgacgtccatcagagtgcgcgagggcagtgaagctacatttagatgtcgcgtaggggggtccccccgccccgccgtctcctggtctaaggacggtagaagactgggagagccggacggcccaagagtccgggtggaagagttgggggaggcgagtgcactgcgcataagggccgcccgaccaagggacggggggacgtacgaagttcgggcagagaaccccctgggagccgcgtcagcggccgcagcactggtagtggatagtgatgcagccgacacagcatccaggccgggcacctccacggctgccttactggcacatcttcagaggaggcgtgaagcaatgcgggctgagggggcccctgcatctcctccaagtacgggcacgaggacctgcaccgtgactgagggtaaacatgcaagactttcttgttacgtgaccggggaaccaaagccagagacggtttggaaaaaagatggacaactggttaccgaggggcgacgccatgtcgtgtatgaggatgcccaggaaaacttcgtgttaaaaatcctgttctgcaagcaatctgaccgaggattatacacgtgtactgccagcaacttggtgggacagacatattcctccgtcctcgtcgttgtccgagaacccgccgtgcctttcaaaaaacgtctgcaggatttggaggtccgggagaaggaatcagctactttcctgtgcgaggtgccacagccttccacagaggccgcgtggtttaaagaggaaacccgactgtgggcaagcgccaagtatggtatcgaggaggagggaaccgagaggagactgaccgtccgaaatgtcagcgcagatgacgatgccgtctatatttgcgagaccccagagggcagccgaacagttgcagaactggctgttcaggggaatctcctccggaaactaccccgaaaaacagctgtacgagtgggagacaccgccatgttttgcgtcgaactcgcggtgccagtgggtcctgtacactggttaagaaatcaggaagaagttgtcgcagggggtcgcgtcgctatttccgccgagggcactcgtcacaccctgacaatctctcaatgttgtttggaagacgtaggacaggtggccttcatggctggcgactgccaaacctctacccaattctgcgtttcagcccctcgcaaaccacctctgcaaccacccgttgacccagttgtcaaagcacgtatggaatcatctgtgatcctctcctggtccccccccccacacggagaaagacctgtgaccatcgacggctacctcgtcgaaaagaaaaagttgggcacttacacatggatcagatgtcacgaagcagaatgggtagcaacgcccgaactgaccgtggcggatgtggccgaagagggcaacttccagtttcgagtgtctgccttgaatagctttgggcagtctccttatctcgagttccctggcacagtgcacctggccccaaagttggctgtaagaacacccttgaaagcagttcaagcggtcgagggcggagaggttacattcagtgtggacctcacggtggcttctgccggcgagtggtttcttgatggacaagccctcaaggcctcctccgtgtacgagatccactgcgaccgcaccagacatacacttaccatccgtgaggtacctgccagcctgcatggggcccagctgaagttcgtagccaacggcatcgagtcatctattcgcatggaggtgagggcagcccccggcctaacagcaaataagccaccggccgccgccgccagagaggtgctggcccgtctgcacgaggaagcccagctgttagccgagcttagcgatcaggctgctgctgttacatggctgaaagatgggcggacactgtctcccggcccgaagtacgaggtgcaggcaagcgcggggagacgcgtgctgcttgtccgggacgtggcccgcgacgacgcagggctatacgagtgcgtgtctcgaggaggaaggatcgcataccaactctccgtgcagggattagctcgctttctgcataaggacatggccggatcctgcgtggatgcagtcgccggcgggccagcgcaattcgagtgtgaaacaagtgaggcacacgttcatgtgcactggtacaaagatggtatggagcttggacactccggggagaggtttctacaggaagatgtgggtacgaggcaccgactggtggccgctacagtgacaagacaggatgaaggcacgtatagctgcagagtgggagaggacagcgtcgacttccgcttgagagtgtcggaacccaaagtcgtttttgctaaagagcagcttgcccgtcgaaaattacaagctgaagccggtgcctccgcaactctgagctgtgaagttgcacaggcacaaaccgaagtgacctggtataaagacggcaaaaagctgtcctcatccagcaaggtgtgtatggaggcaacagggtgtacccggcgcttagtggtgcagcaggccggacaggctgatgctggcgaatactcttgcgaagcgggagggcagcggctctcttttcaccttgacgtcaaagaacctaaagtcgtttttgcgaaggatcaggtggcacattccgaggttcaggccgaagcgggggcgagcgccactctctcatgtgaggtggcccaggcccagacggaggtcatgtggtacaaggatgggaagaagctgtcaagtagtcttaaagttcacgttgaagccaagggctgtagaagaagactggtcgtccagcaggccggtaaaacagacgccggcgactattcttgcgaggctcggggacaaagagtgtcttttcgtctgcacattaccgagcccaaaatgatgttcgccaaggagcagtccgtgcacaacgaagtgcaagccgaggctggcgcgagcgctatgctttcatgcgaagtggcccaggcccagaccgaggtcacgtggtacaaggacgggaagaaattgtcttctagttccaaggttgggatggaggtgaaaggctgtacacgtcggctcgtgttgccacaggcaggcaaagctgatgctggggaatattcctgcgaagcaggggggcagagggttagcttccatctgcatattactgaacccaaaggagttttcgccaaggagcagagcgttcataacgaggtccaggccgaagccgggaccactgccatgctcagttgtgaagtggcacagcctcagaccgaggtgacttggtacaaagacgggaaaaagctgagtagctcgtctaaagtgagaatggaagtcaagggctgtactagacgactggttgtgcagcaggtcggcaaagccgacgcgggtgagtactcctgcgaggccggcgggcagagggtgagcttccagttacatataactgagccaaaggctgtgttcgcgaaggaacagctggtgcataacgaggttcggactgaagcaggcgctagcgcgacattgtcctgtgaggtggctcaggcccagaccgaagtgacttggtacaaggatggaaaaaaactatcatcgtcctccaaggtgcgtatcgaagcggcagggtgtatgcggcaactggtcgttcagcaggcagggcaggccgacgccggagaatacacgtgtgaggccgggggccagcgtctgtcatttcacttagacgtcagcgagccaaaagcagtgtttgccaaggagcagcttgcccacagaaaagtccaggccgaggccggggcaattgcgactctgtcttgcgaggttgcacaagcccagaccgaagtgacttggtacaaagacgggaaaaagctgagcagttccagtaaagttagaatggaggcagtgggatgcacccgacgcctagtcgtgcagcaggcatgtcaggccgacacaggagaatacagctgcgaggcaggcggccaaaggctctcgttcagcctcgacgtcgccgagcccaaggtggtgtttgcgaaggagcagcctgtgcatagagaagttcaggcccaggctggcgcctccactacactgagctgcgaagtagcacaggcccaaacagaagtgatgtggtataaggacggcaaaaagcttagtttttctagtaaggtgcggatggaggccgtgggttgtacaaggagactggtagtccaacaagcaggacaggctgtggccggggagtattcgtgcgaagccggctcacagaggctgagctttcatctccacgtggcagagcccaaggctgtattcgccaaggagcaaccagcgagtagagaagtgcaggccgaggccgggacgagcgctaccctatcttgtgaggtcgctcaagctcagactgaagtaacttggtacaaagatggaaagaagctatcctcgtctagcaaggtgcggatggaagctgtgggctgtacccgtcgcctagtcgtgcaggaggcaggacaagcagatgcgggcgagtactcttgcaaggctggcgaccagagactgtcattccacttacacgtggcagagccaaaggtggtcttcgcgaaggaacagcctgcccatcgcgaggtccaggccgaggctggcgcctcggctacactgagctgtgaggttgcgcaggcccagactgaagttacctggtacaaggacggcaagaaattgtcttcctcctccaaagtcagggtggaggcagttggctgtacccggagactcgttgtccagcaggcggggcaggctgaagctggggagtacagctgcgaggctggcggccagcagctgagttttagactgcaggtcgcagagttagaacctcagatctccgaacgcccctgtcggagggaaccactcgtggtgaaggaacatgaggatatcattctcactgcaacattagctaccccgtccgcagcgacagttacttggttaaaggacggggtggaaatccgaaggagcaagcgccatgagactgcctcccagggagatactcataccttaaccgtgcatggtgcccaagtgctagacagcgccatatatagctgccgcgttggagcagaaggccaggacttcccggtgcaggtggaggaagtcgcggcaaaattctgtaggttgcttgaacctgtgtgcggggaattaggaggcactgtaacccttgcctgtgagctcagcccagcctgtgccgaggtcgtttggcggtgtggtaatacccaacttagagtgggaaaacggttccagatggtcgccgagggacctgtacggtcgttgaccgtgctagggctgagagcggaagatgcaggggagtacgtgtgtgagagcagagacgatcacacaagcgctcagctgacggtctctgtgccacgggtggtgaaattcatgtcaggactgtccactgtggtcgcagaggaagggggtgaggcaacattccaatgtgtggtctctccgtcagatgtggctgtcgtttggtttagggacggggctctactccagccttctgagaagttcgcaatctcacagtctggagcgtcccatagcctgactatttcggacttagtcctggaggacgcagggcagattactgttgaagctgagggtgctagctcttctgccgccttaagggtaagagaggctccggtgctgttcaagaagaaactagaacctcagacggtggaagaaagatcaagtgtgaccctggaagtagagttaacccgcccatggcccgaactaagatggacccggaatgcgaccgccctggcccccgggaagaatgttgagattcacgctgaaggtgcacgccacaggctggtgttgcacaatgtgggattcgctgacagggggttttttggttgcgagacacccgacgacaagacccaggcaaagctgacagtggagatgaggcaggtgcggctggtcagagggctgcaagcagtcgaagccagagagcagggaacggccaccatggaagttcagttgtcgcatgcagatgtcgacggttcctggaccagagacggtctgcggtttcaacaggggcctacgtgtcatctagccgtgcgaggccctatgcatacactcaccctgagtgggctcaggcctgaggacagcggccttatggtatttaaagccgaaggcgtccacacttccgcgaggctggtggtaaccgagctgcctgtgagttttagccgcccccttcaggacgtggtcacgacagagaaggaaaaggtgaccttagagtgcgagctcagccggcctaatgttgacgtaaggtggctgaaagacggtgttgaactgagagccggaaaaactatggcaattgccgcacagggggcttgtagaagtttaaccatttacaggtgtgagttcgccgatcagggagtctatgtctgcgatgctcacgatgcccaatccagcgcctctgtgaaagtgcagggcagaacctacacgctaatttacaggagggtattggccgaggatgccggcgagatccagttcgttgcagagaacgcagagtctcgggcgcagctgagggtcaaggaactccccgtgaccctggttcggccactgagggataagatagcaatggagaagcatagaggggtcttggagtgtcaggtctctcgagcaagtgctcaagtgcgttggttcaaaggttctcaggaactgcaaccagggcctaagtatgaattagtaagcgatggactgtatcggaaactgattatatccgacgttcacgccgaagatgaggatacatacacctgcgatgctggcgacgtaaaaacttccgcgcagttctttgtggaggaacaatccatcacaatagtcaggggcttgcaggatgtcacggtgatggaaccagcacctgcgtggtttgagtgcgaaacctcaatccctagcgtaagaccccctaaatggctgttgggcaaaaccgttctccaggccgggggtaatgttggtcttgagcaggaaggcacggtacatcggctaatgcttaggagaacttgttccacaatgactggccctgtgcacttcactgtggggaagtctcggtcatccgccagactggtggttagcgacatcccggtcgtgctgacacgcccactggaacccaaaactggcagagagttacagtccgttgtgctgtcatgtgactttaggcctgccccaaaagccgtgcagtggtacaaggatgacaccccactatctccttccgagaaatttaagatgtctctcgaagggcagatggccgagctgcggatccttagactcatgcctgcagatgccggggtttataggtgtcaagccggctcagcccatagctcaacagaggtcaccgtagaagccagagaagtgaccgttacaggtccactgcaggacgccgaagccacagaagagggctgggcgtcattttcctgcgagcttagccacgaggacgaggaggtggaatggtctctcaatggtatgcccctgtataacgattctttccacgaaatttctcacaaaggccgcaggcacacattagtgctgaaaagcatacaacgggccgacgctggcattgtccgtgcaagctcgcttaaggtctccactagcgcgcgccttgaggttagagtcaagcctgttgtttttctaaaggcccttgatgacctctccgccgaggaacgaggaacactggccttacaatgtgaggtgagcgatcctgaagcgcacgttgtttggaggaaggatggagtgcagctaggtcctagcgacaagtacgacttcctccacacagccggaacccgcggactggtggttcacgacgtgtctcccgaggacgccgggctgtatacttgccacgtcggcagcgaggagacacgggcaagagtgcgcgtccacgacctacacgttggaataaccaagcgcctgaaaaccatggaagttctggagggggagtcctgcagctttgagtgcgtcctgtcacacgagagcgcgtcagatcctgcgatgtggacggtcggagggaagactgtcggaagctcatccaggtttcaggctacccggcaaggaagaaagtatatcctggtcgtgcgagaggccgcaccgtctgacgctggggaagttgtgtttagtgttcgggggctgaccagcaaggcaagcctgattgtgcgggaaaggcctgcagcgatcatcaaacccctggaggatcagtgggtggcacctggggaggatgtggaactgcgatgtgaactgtcacgggccggaaccccggtccattggctaaaagatagaaaagccatccgcaagtcacaaaagtacgatgtggtttgcgagggcacaatggccatgctggtcattaggggagcttcactgaaagatgccggcgagtatacatgcgaagttgaagcctctaaatctactgcatctctgcatgtggaggagaaggctaactgcttcacagaggagcttaccaatctccaggttgaggagaaggggactgccgtcttcacctgtaaaaccgagcatcccgcggctaccgtgacgtggagaaagggtctattggagctccgagccagcggtaaacatcaacccagccaagagggtttaaccctgagattaaccatctccgccctggaaaaagcagatagtgacacatacacctgcgacattgggcaggctcagtcacgcgcccagttgctggtgcaggggagacgtgtgcatattatcgaagacctcgaagacgtggatgttcaagaaggaagcagcgccacctttagatgccgtatttcacccgcaaactacgagccggtgcattggtttctcgataaaacccctctccatgccaacgagctgaacgaaatcgacgcccagcctggaggctaccacgttctgactttaaggcagctcgctctcaaggattccggcaccatttattttgaggcaggcgaccaacgggctagtgcagcacttagagtgacagaaaaaccatcagtgttttctagggagcttacagatgctacaataacagagggtgaagatctaactctagtctgcgaaacgagtacatgtgacatccccgtctgctggacgaaggacggcaagacacttcgggggtctgccagatgccagttgagccacgaaggacaccgcgctcagctgctgatcacaggagccactcttcaggatagtggacgctataaatgtgaggctggcggtgcttgctctagctcgatagtacgtgtgcatgctcgaccagtcagatttcaggaggccttgaaggatttggaggtgctcgaaggaggagccgccactttgaggtgtgtgctaagctccgttgccgcccccgtcaagtggtgttacggcaataacgttctccggcctggcgacaaatactctcttcgccaggagggtgccatgctggagctggtcgtgcggaatttgagaccccaggactctggccgctacagttgcagcttcggagatcagaccaccagtgccacactgactgtgaccgcgctgccagctcagttcattggaaagcttagaaataaggaagccactgagggggcaaccgctactctccggtgcgaactctccaaagcagccccggtcgagtggaggaaaggatcagagacactccgcgacggagatagatactgtcttcggcaggacggggccatgtgcgaactccagatccgagggcttgccatggtggatgcagcagaatacagttgcgtgtgtggcgaagaaagaacctcagcttccttgaccataagaccgatgcctgcacactttatcggtagacttaggcaccaggagtctattgagggcgctactgccactttgagatgcgagctaagcaaggccgctcccgtcgagtggcggaaaggacgcgagtctctgagagatggcgatcggcactctcttaggcaggacggagccgtctgcgagttacagatttgtggactcgcagttgctgatgcaggagaatacagttgcgtgtgtggggaggagaggacctctgccactctgactgttaaagccttgccagctaagttcacagaagggttgcgtaacgaggaggctgtggagggggccactgccatgttgtggtgtgaactttccaaggtcgccccagtagaatggcggaagggcccagagaacctgcgggacggggatcggtacattttgcggcaggaggggaccagatgcgagctgcagatctgtggcctggctatggctgatgctggggagtacctttgtgtctgcggccaagagcggacgtctgccaccctcactatccgtgccctccctgcgcgcttcattgaagatgtgaagaaccaggaggcacgagaaggcgcaacagctgtgttgcagtgcgagctcaacagcgcagcacccgtagaatggcgcaagggatccgaaaccttaagggacggagatcgctacagcttaagacaggacgggaccaaatgcgagctgcagatcaggggattagccatggctgacaccggagaatacagctgtgtgtgcgggcaggagagaacttcggcaatgcttaccgtccgcgctctcccaattaagtttacagaaggtctaagaaatgaggaggcaactgagggagcgacagctgttctgagatgcgaattatccaaaatggctccggtggaatggtggaaaggccacgaaaccctgagagacggtgacaggcattctctccggcaagacggcgcaagatgcgagctgcagataagggggctggttgctgaggacgctggtgagtacctttgcatgtgtggcaaagaaaggaccagtgccatgctgacagtcagagctatgccttcaaagttcattgaagggctcaggaatgaggaagccaccgagggggacacagccaccttatggtgcgagttaagcaaagcagccccggtggagtggaggaagggacatgaaacactcagggatggagatcggcactctctccggcaagacggctctagatgtgaactacagatcagaggacttgcggtggttgatgctggggagtacagctgcgtgtgcggtcaggaacgaacgtcagcgaccctgaccgtgagggcgcttccagccagattcatagaggacgtgaagaatcaggaagcgagggaaggggcaactgccgtcctgcaatgcgagctgagcaaggctgctcccgtcgagtggaggaaaggttctgagaccctccgcggaggcgatcggtattcacttcgccaggacggtacaaggtgcgagctgcagattcacgggctgtcagtggcagacacaggagagtacagttgcgtgtgcggacaggagcggacctctgctactctaactgtcagagccccccagcccgtcttccgggaacccctccaatctctccaagccgaggaaggtagcactgctactcttcaatgcgaactttcagagcctacggccaccgtggtatggtcaaagggcggactacaactccaggcaaatggccgccgcgaaccgagactccagggttgcacagcggaattagttctccaggacctccaaagggaggatactggcgaatacacctgcacgtgtggatcgcaggctacaagcgccaccctgaccgtgaccgccgcccctgtgaggtttctgcgggagttacagcaccaggaagtcgatgaagggggcacagctcacctctgttgtgaactgagccgggcgggggccagcgtggagtggaggaagggcagccttcagctctttccttgcgcgaaatatcaaatggttcaggatggagcagcagccgaactcctggttagaggcgttgaacaggaggatgcgggggattacacatgcgacacgggtcacacccagtcaatggcaagtttaagcgtacgcgtgccccgacccaagttcaagacccggttgcagagcttggagcaggaaaccggcgacattgctaggctgtgttgccagctctcagatgcggagtctggagctgtcgtgcagtggctaaaggagggggtagagctgcacgcaggcccaaaatacgagatgcgctcccagggcgccacacgggagctcctgatccatcagttagaggccaaggatacaggcgagtatgcttgcgtgacaggcggtcaaaagacagccgctagtctgcgagtgaccgagcctgaagtgacaatagtgagggggctggtagacgcagaagtcactgccgatgaagatgtcgaattcagctgtgaggtgtctcgggccggcgcaacaggagtacaatggtgtttgcaggggctgcccttgcagtcgaacgaggtgacagaagttgctgttagggacgggcggatccatacactgagacttaaaggcgtaacaccagaggacgccggtaccgtgtcctttcacctaggaaaccacgcctcatccgctcagctcaccgtgcgggctcccgaagtgaccatccttgagcctctgcaagatgtccagttatcagagggccaagatgcctcatttcagtgcagactctcaagggctagcggtcaggaggccaggtgggcgctgggcggcgtgccgctgcaggctaacgaaatgaacgacattacagtggaacagggtacactccacctgctgaccttgcacaaggtgaccctggaggacgcaggcacagtgagcttccacgtaggcacttgcagttccgaagcacagttaaaggttactgctaagaataccgttgtcaggggtctggagaacgtcgaggctcttgaaggaggggaagcgctgtttgaatgccagctgagccaaccggaggtggccgcccacacttggctgctcgatgatgagcccgtgcatacgtctgaaaacgcagaggtggtgttttttgaaaacggactgaggcatctgcttctcctaaagaacctgcggccacaggactcctgccgagtgacctttctagctggcgacatggttacatcagctttcctgaccgtacgcgggtggaggttagagatcctcgaaccgttgaaaaacgctgccgtgagggctggagctcaggcctgcttcacctgtactctttcggaggcagtgcctgtgggcgaagcctcttggtacattaacggggctgccgtgcagccagacgacagtgattggaccgtgacagccgatgggtcccaccatgccctgttgttaagatctgcccagcctcaccacgcaggcgaggtgaccttcgcatgtagagacgccgtggctagcgccagacttacagtcctggggctccccgatccaccagaggatgccgaggtggtggccaggagtagccacacagttaccctttcgtgggcagctcccatgagtgatggcgggggtggactctgtggttacagagtcgaggtgaaggaaggcgccacaggtcaatggcgactttgtcatgagctggtccccggccctgaatgcgtcgtggacggattagctcccggtgaaacataccggtttcgggtcgctgccgtgggacctgtgggcgctggagaaccagtgcaccttccacagaccgtgcgtttggccgagcctcctaagccggtgcccccacaaccgtccgcaccagaatccaggcaggtcgccgccggggaggacgtgtcccttgaattggaggtcgtcgctgaggccggggaggtaatttggcataaaggcatggagcgaatccagcccgggggccgattcgaagtggtatcccagggaagacagcagatgctcgtcatcaaggggttcacagccgaggatcagggggagtaccactgcggtctggcccagggaagcatttgccctgcagcggccacattccaggtcgctctttctcccgcctcagtcgatgaagccccccagccgtctctgcccccagaggccgctcaggaaggtgatttgcacctgctatgggaagctctcgcacgaaaacggaggatgagcagagagcctacactagactcaatcagtgagctgccggaggaggatggccgcagtcagcgcttacctcaggaggcagaggaagtcgcccccgacctgtccgaaggctactccaccgccgatgaactggcgagaacaggcgacgcagacttatcacatacctcttccgacgacgagtcgcgcgccggaacgccatcacttgttacctatctgaaaaaggccggaagaccggggacttctccactggcttcaaaggtgggcgccccagcagctccgtctgtaaagccacagcaacagcaagaaccacttgccgccgtccgtcctccgctgggcgacctcagcacaaaggatcttggggacccatccatggataaggccgctgtcaaaattcaggccgcgtttaaaggatataaagtgcggaaagaaatgaaacagcaggagggacccatgttcagtcataccttcggtgatactgaggctcaggtcggcgacgcactgcggttagaatgcgtagttgcttcaaaggctgatgtgcgagcacggtggcttaaggatggggtcgaactcaccgatggccgacaccatcatatagatcagctgggagatgggacttgttcactgctgatcaccgggcttgaccgtgctgacgcgggctgctatacttgccaagtgagcaacaaatttgggcaggtgacacatagcgcctgcgtagtggtttctggcagcgaaagtgaagcagagagcagtagcggaggcgagcttgatgatgccttcaggcgtgcggccagacggctgcaccgcctcttcaggaccaaatctccagctgaagtgtccgacgaggagctgtttttgtccgcagatgagggtcctgccgagcctgaggagccggctgattggcaaacctatcgagaagatgagcacttcatctgtatcagatttgaggcccttacggaggcgagacaggcagtgacacgcttccaggagatgtttgctaccctcggtattggtgtggagatcaagctggtggaacagggccctcgaagggtggagatgtgtatctcaaaagaaactccagctcccgttgtccccccagaacccttgccttcattgttgaccagcgatgccgcccctgtgttcttgacggagctgcagaaccaagaggttcaggatggctacccagtcagcttcgattgcgtggtgactggccagcctatgccaagtgtgaggtggtttaaggacggcaagcttctggaagaagacgatcattatatgattaatgaagaccaacaaggcggtcaccagttgattatcacagctgttgtgccagcagacatgggggtatataggtgcctggccgagaacagcatgggggtgagctcaaccaaggctgagcttcgtgtagacttaacaagtaccgactacgatacagctgcagatgctactgaaagtagcagttatttcagcgcacaagggtacctctcatctagggaacaggaagggaccgaatctaccacggatgaaggccaactaccacaggtggtggaggagctgagggacctccaagtggccccagggaccagacttgccaagtttcagctaaaggtgaaaggttatccagctccacgcctgtattggtttaaggacggccagccactgactgctagcgcccatatccgcatgacagataaaaagatattgcatactctcgagatcatttcggtcacacgcgaagattccggtcagtatgctgcctacatcagcaacgcaatgggcgcggcttactcctctgcgcgcctactggtgcgtggtccggatgagcccgaggagaagcccgcatcagatgttcacgaacagttggtgcctcctagaatgctggagcggttcacccctaagaaggtgaaaaaaggctcctcaatcactttctccgtgaaggtggagggtcgtcctgtacctaccgtgcattggctccgcgaagaagccgaacgcggcgtcttgtggatcggcccagacactcccggatacactgtcgcttcctctgcgcagcagcatagcctggtgttactcgacgtcggtaggcagcaccagggtacatatacttgcatcgcatcaaatgctgccgggcaggcactgtgtagtgcctcattgcacgtaagcggtctgcccaaagtggaggaacaggaaaaagtcaaagaagcgttgatatccactttcctgcagggtacaacacaagctataagtgcccaaggcctggaaacggccagttttgccgaccttggcgggcagaggaaagaggagccactcgccgctaaagaagccttgggtcatttgtccctggcagaggtgggtactgaggagttcctacagaagctgacgtctcagatcacagagatggtctctgccaagattacacaggcgaagctgcaggtacccgggggtgattcagacgaggatagcaaaacccctagcgctagtcctcgccatggccggtccaggccatcaagttctatacaggaatcgagttccgaaagcgaggacggtgacgccaggggcgagatctttgatatatacgtagtgacagcagattacctacctctcggcgccgaacaagacgctatcacactgcgcgagggacagtacgttgaagtgctcgatgccgcccacccgctgcgatggctcgtcagaactaagccgactaagtctagcccttccaggcagggctgggtgtccccggcgtaccttgatagacgcctgaaactctctccagagtggggagccgctgaagccccagagttccctggggaggctgtgtcggaagatgagtacaaggccagactttcttccgtgatccaggaattactaagcagcgagcaagcatttgtcgaagagttgcagtttctgcagtcgcaccatctccagcatctcgagagatgcccccacgtgcctatcgctgtggccgggcagaaagctgttatttttcgaaatgttcgggatatcggcaggtttcactcgtccttcctacaggagcttcagcagtgtgatacagatgacgatgttgccatgtgcttcatcaagaaccaggctgcctttgagcagtacctcgagttcctcgttggtagggtgcaagccgagtccgttgtagtgtccacagctattcaggagttctacaaaaagtacgcggaagaagcattactcgccggagatccaagtcagccaccgcctccccctctgcagcattacctggagcagcctgtggaacgcgtgcaacgataccaagctctgttaaaggaactgattagaaataaggctaggaataggcaaaattgtgccttgttggagcaggcctatgctgttgtgtcagccctcccacagcgagccgaaaataaactccatgtgagcttaatggagaattaccccggaacactgcaggccctgggagaacccattaggcagggacacttcattgtctgggaaggagcccctggagcccgcatgccatggaaaggacacaaccgtcacgtgttcttgttcagaaatcatctggtcatatgcaagccccgtcgggacagccgaaccgacaccgtgtcatacgtcttcagaaacatgatgaagctctcaagcatagatctgaatgatcaggtggagggggatgacagagcgttcgaagtctggcaggagagagaagattctgttcggaaatatctactccaggctcgcacagcaatcattaagtctagctgggtcaaggagatttgcggcatccaacagaggctagcgctgcctgtgtggcgtcctccagacttcgaggaagaactggctgattgtaccgctgagctcggggagacggtcaaactggcttgcagagtcacaggcaccccaaagcccgtgatctcctggtacaaagacggtaaggccgtgcaagttgatccccatcacattctgatcgaagacccagacggatcctgtgcccttatcctggatagtctgacgggcgtggactcgggccagtatatgtgtttcgcagccagtgccgctgggaactgttccaccctcggcaaaatcctggtccaggtcccacctcgcttcgttaataaagtccgtgcgtctccgtttgtcgagggcgaagatgctcagttcacatgtaccatagaaggtgctccatatccccagatccgttggtataaagatggcgccttactcactactgggaacaagtttcagacactgtccgaacctcggagcggactgctagtcctggtgattagggcggcgtctaaggaagatctggggctgtacgagtgcgaattagtcaaccggctggggagtgctagggcctcagcggagctgcggattcaaagccccatgctgcaggctcaggaacagtgccatcgagagcaactggtcgcagccgtggaggacacaacactggaacgcgctgatcaggaggtaacatccgtcctgaagaggctgctcgggcctaaagccccaggcccctcaaccggggatctcacggggcccggaccctgtcctaggggagcgccagctctccaggaaactggctcacagcctccagtcaccggaactagcgaggcgccggccgtgccaccccgagtaccacagcccctgctacacgaaggccccgaacaggaaccggaggccatcgctcgagctcaagaatggactgtccctataaggatggagggtgctgcctggcccggcgccgggaccggggaattactctgggatgtacacagccacgtcgtccgggagaccacacagagaacgtacacgtaccaggccatcgacacacacaccgcacgccctccatcaatgcaggtgactatcgaagacgtgcaagctcagaccggcgggacagctcagttcgaggctattatcgagggtgatccccagccttctgttacttggtacaaggattccgtgcagttggtggacagcacccggctgtcacagcagcaggaaggaaccacctattcccttgtgctgcgccatgtagcaagcaaggatgcgggagtctacacgtgtctcgcgcagaatacgggcggccaggtgctgtgtaaagccgagctgctggtgctggggggagacaatgagccggattccgagaagcagagccatagacgcaaactgcactcgttctatgaagtgaaagaggagataggccggggcgtgtttggtttcgtaaagagggtccaacacaaggggaacaagattctgtgtgcagctaagtttattcccttgcgctctagaacccgggcacaggcctatagagaacgggacatcttggctgccctctcccatccactggtaacaggactgctcgaccaatttgagacacgaaagacgttgattcttatcctggaactgtgttctagcgaggagctcctggacaggctgtaccgcaagggagtcgtaactgaagccgaggtgaaggtgtatatccaacagctggttgaggggctccactacctccatagccatggcgttctgcacctcgacatcaaaccctcaaacatcctcatggtccatccagcgcgagaagacatcaagatttgtgattttgggttcgcacagaacatcactcctgccgaactgcagttttcacaatatggttcccccgaattcgtgtcgcctgaaatcatccaacagaacccagtttctgaggccagcgacatttgggcaatgggcgtaattagttacctttctctcacctgtagcagtccgttcgccggcgagtctgacagagccacattgttgaatgtgctggaaggaagagtgagctggagttctcctatggcagctcatttgagcgaagacgcaaaagactttataaaagccactctgcaacgagccccacaggcacgccctagcgctgcccagtgcttaagtcacccgtggttccttaagtccatgcctgccgaggaagcgcattttatcaacacgaagcagctgaaatttttactggccaggtctaggtggcaacggagtcttatgtcctacaagtcaatcctggttatgagatccatacccgaactgctgagaggaccgcccgacagcccaagtctcggtgtggccaggcacctgtgccgcgacactggaggatctagttccagctcttcttcctcagacaatgaactggccccattcgcacgggccaagtctcttcctccctcccccgtgacccactcccctctcctgcacccaagaggattcctgagaccatcagcctcactccctgaggaagcagaggcaagcgaaagaagcacggaagcgccagcccccccagcttcgcctgaaggtgccggacctcccgccgcccagggatgcgtgcctcgccattccgtgatacgatctttgttttatcaccaggcaggggagtcgcccgagcacggtgccctggccccaggatctcggcgccatcccgcccggcggcgccatctcctgaaaggaggttatattgctggagccctcccggggctgagagaaccgctaatggagcaccgggtattagaggaggaagcggctcgtgaggagcaagcaacgctcctcgctaaagcgccatcatttgaaacagcattacgcctgcccgcttccggtacacacttggccccgggccactcacatagtctagaacatgacagcccatctacccctaggccaagttccgaggcatgtggggaagctcagcgcttgccgtcggcaccttctggcggcgcaccaatccgggatatggggcacccccagggatcgaagcagctcccatccactggtgggcaccccggtacagcacagcccgagaggccctcaccggactcgccgtggggccaacctgcacccttctgtcaccctaagcagggaagcgcaccccaggagggttgcagcccccaccctgctgtggctccttgccctcctggcagctttccaccgggctcctgtaaggaagcccccctggtcccatcctcaccgtttctagggcagcctcaggcgccacccgcccccgctaaggctagtccgcctcttgactcaaagatgggccctggggacatctcacttcccggccgccccaagcctgggccctgctcaagccccggctccgcctcccaagcttcatctagccaggtctcgagtcttcgcgtcggatccagccaggtaggcacagagcctggaccctctctggatgcagagggctggactcaagaggcagaggacctgagcgactctactccgaccctccagagaccacaggagcaggcgactatgaggaaattttctctgggcggtcgaggcggctacgccggagtggccggttatggcacatttgcatttggcggtgatgctggcgggatgctggggcagggtcccatgtgggctaggatcgcttgggcggtatcacaaagcgaagaagaggaacaagaagaagccagagcagaaagccagtccgaagagcagcaggaagccagagccgagagtcctcttccacaagtttcggctcgacctgtccccgaggtcggccgcgcccctacccggtcctccccagagcccaccccttgggaagatattggccaggtgtctctggtgcagattagggacctttcaggagatgcagaagccgccgatacaatttccctagacatatccgaagtggatcctgcatacctgaacctctctgatctttatgacattaaatatcttcccttcgaattcatgatcttccgaaaagttcctaaatctgctcagcccgagcccccttctcccatggccgaggaagagctggcggagtttcccgaacccacctggccttggcccggcgagctcggaccacacgctggacttgaaatcacagaagagtccgaggatgtcgacgcactgctggccgaagccgcggtgggccgcaaacgaaagtggtctagccccagcagatcattgtttcatttccctgggaggcacctgcccttggacgaacccgccgaactcggcttacgcgaacgcgtcaaagcaagtgttgaacacatttcccgaatcctgaagggccggccagaaggattggagaaagagggcccaccgaggaagaaacccggcttggcctcctttcggctttctggcctgaagtcttgggacagggcacccacttttctccgagagctcagtgacgaaacagtggttcttggacaatctgtgacactggcttgtcaagtatctgcccagcccgccgcacaggctacgtggagcaaagacggcgccccactggaatccagttccagagtcctgattagcgccacacttaaaaattttcaactgttgactatcctcgtcgtggtcgccgaagaccttggggtctatacctgcagcgttagcaacgccctcggtacagtgactaccactggcgttctacgaaaagccgaacgtcccagtagctcaccctgccctgacatcggcgaggtatacgcagacggggtgctgcttgtgtggaaaccagtggaaagttacggcccagtgacctacatagtgcagtgtagcttagaaggtggtagctggaccacactggcgtccgatatatttgactgctgttatctcacgtctaagctaagcagaggcggaacttatacattcaggacagcttgcgtgtctaaggccggaatgggaccctattcatccccttcagagcaggtgctccttggggggccttctcatctggccagtgaggaggaaagccaaggccggagcgcccagccgttaccgtccacaaagacattcgccttccagacacagattcagaggggcaggttctccgttgtccgacaatgctgggagaaggcctcaggtcgagcccttgctgccaagatcatcccttaccatcctaaagacaaaaccgctgtcctacgtgaatatgaggccttgaaagggctgaggcacccccatctcgcacagctccatgccgcctatctgagcccgagacacctggtccttatattagaactctgttctggccccgagctgttgccgtgcctggcggagagagccagctacagtgagtcggaagtgaaggactacctctggcaaatgctttccgccactcagtaccttcacaatcagcacatcctgcatctggaccttaggagcgagaatatgattatcaccgagtataatttgctgaaggtggtagacttgggtaatgcacagtctctgtcacaggaaaaagtgctcccctccgataagtttaaagactacttagaaaccatggctcctgaactgctggagggtcagggcgccgtgcctcagacggacatatgggcgatcggggtcacagctttcatcatgctctccgccgaatatcctgtgagttccgagggtgctcgcgacttacagcgcggtctcaggaagggcctggttaggctctctcgttgttatgctggcctatctggcggagccgtggccttcctcaggagcacgctctgcgcccaaccctgggggaggccctgcgcttcctcctgcctacagtgcccatggctgacggaagagggacccgcctgttcccgcccggcccccgtgactttccccactgccagattaagagtattcgtgcgtaaccgagaaaagcggcgagctcttctgtacaaacgccacaacctcgcacaagtgcgctag

SEQ ID NO: 16463 - DNA, 750 bp, synthetic construct
  source 1..750: mol_type = other DNA; note = Synthetic coding sequence
atgacagaggactcccagagaaactttcggtccgtgtactacgaaaaggtgggctttagaggagtcgaagagaagaagtccctggagatccttctgaaagacgataggctcgatactgaaaaattgtgtactttctcacaacgcttccccctcccatccatgtacagagcactcgtctggaaggtgctgttgggcatcttgccgccgcaccacgaatcccacgccaaggttatgatgtaccgaaaggagcagtacttggatgtcttacacgcattaaaggtggtcagattcgttagcgacgctacaccccaggcggaggtatatctgaggatgtaccagctggagtcaggcaaactcccaaggtctccttctttccctctcgagccagacgacgaagtttttctggcgatcgcaaaagcaatggaagaaatggtggaagactccgtagactgttactggatcacccgaaggttcgttaaccaactgaatactaagtacagagactccctcccacagctccctaaggcctttgaacagtacctgaacttggaggatggacgcttgcttacacacctgagaatgtgttctgccgcccccaagctaccctacgacctgtggtttaaacggtgttttgccggctgtttaccagagagcagcttgcagagggtgtgggacaaggtggtgtctgggagctgcaagatcctggtttttgtggctgtcgagatcttactgacattcaagatcaagtag

SEQ ID NO: 16464 - DNA, 417 bp, synthetic construct
  source 1..417: mol_type = other DNA; note = Synthetic coding sequence
atgtcctccttgggggcctcttttgtgcagattaagtttgacgacctccagttcttcgaaaactgcggcggcggtagctttggcagtgtttacagagcaaaatggatttcacaggacaaggaggtggccgtgaaaaagctgctcaagatcgaaaaagaagcggaaattctctctgtgctgtcccatagaaacatcatccaattttatggcgtaatcttagagcctcctaattatggaattgtgacagagtatgcaagtctgggctcactatacgactatattaacagcaacagaagcgaggaaatggacatggaccacattatgacctgggcgaccgatgtcgccaagggcatgcactatctccacatggaggcccctgtgaaagtcattcacagggacctcaagtctcgcaattag

SEQ ID NO: 16465 - DNA, 1122 bp, synthetic construct
  source 1..1122: mol_type = other DNA; note = Synthetic coding sequence
atggcgtcctcatccgttcctccggccacagtgagtgccgccaccgctgggcccggcccagggtttgggttcgccagtaagacaaagaagaaacatttcgtccagcagaaggtgaaggtgtttcgcgctgcagaccctctggtgggcgtatttttgtggggcgtggcacattcaataaacgagctgtcccaggttcccccacctgtcatgctgttacctgatgacttcaaggccagctccaaaatcaaggtgaacaaccacctttttcaccgggagaatctgccatcccattttaaatttaaagaatattgccctcaggtgttccggaaccttcgagatcgattcggcatagacgatcaggactatctctacattgtgaagtgtcatggcaacaccttgcttccacagttcctaggaatgtaccgagtgagcgtcgacaacgaagactcctacatgctggtaatgagaaacatgtttagccaccgccttcctgtacatcgaaagtacgacctgaaagggagcctggtcagccgcgaggcgtccgataaagagaaggtaaaggagcttccaaccctgaaggacatggattttctcaataaaaaccagaaagtgtacatcggagaagaggagaagaagatctttcttgaaaaacttaagcgcgatgtcgaattcctggtgcagctaaagatcatggattattctttgctgctggggatacatgacattatccgaggctctgaacctgaagaggaagcgccagtccgcgaggatgaatcggaggttgatggcgattgtagcctgaccggtcctcccgccttggtgggttcctatggtactagcccagaagggattggggggtatatccacagccacaggcccttgggacctggggaattcgagagtttcattgatgtatacgctatccgttccgctgaaggggctccccagaaagaggtatactttatgggtctcattgatatccttactcagtacgatgctaagaagaaggctgctcacgcagcaaagacagtgaaacatggggctggcgctgaaatctccacagttcacccagaacagtacgctaagaggttcctggatttcattacaaatatcttcgcttag

SEQ ID NO: 16466 - DNA, 549 bp, synthetic construct
  source 1..549: mol_type = other DNA; note = Synthetic coding sequence
atggaggagatcccagcccaggaggccgcaggcagccctagagtacagtttcaatccctcgaaacccagagcgagtgccttagcccagagccacaatttgttcaggataccgacatggagcagggactgaccgggggcttcccgatcagcaaaccagatgggatcagccaactggagcaggatctgcaggtgttcgacctggaaactaagacccgagaagtgcttcgagatgactgttcagatggagagacgcgggaggagaacaagctcctgataccaaagcagaagatcagtgaagaagtacattcatataaagtgagagtgggacgactaaagcacgacattacacaggtgcccgaaaccagggaagtgtataaatctgaggatcgcttagagcggctccaagaaattctgaggaaatttttatacctggagcgggaattccgccagattactatcagcaaagaaacttttacttccgagaaaaacaatgagtgccacgaaccagagaagtcattctctttggactccaccattgacgccgactag

SEQ ID NO: 16467 - DNA, 2253 bp, synthetic construct
  source 1..2253: mol_type = other DNA; note = Synthetic coding sequence
atgagtcttggaaaggcgtacggtgtagaatcacatgtcttatcgccggccgagaccaagacactttatcctctcatgaacgtggatgacctgtatggtactttgtacgtcccgcacgacggcaccatggacccggccgggacttgcaccacacttgcacgcgcagccagcgcaagaggcgctcaggtgatagaaaactgccctgttactggcatcagagtttggactgatgacttcggcgtgagacgcgtagccggtgtcgaaactcagcatggctccattcaaaccccctgtgtcgtgaactgtgccggcgtttgggcatccgctgtgggaaggatggctggcgtaaaagtgccgctggtggcaatgcaccatgcttatgtggtcacggagcggattgaaggcattcagaacatgcctaacgttcgcgatcacgacgcctccgtttatttacgactccagggtgacgctctgtcagttggcggctacgaggccaatcctatcttctgggaagaagtatctgataaatttgcattcggattgtttgacttggactgggaggtgttcacccagcacatagagggggccatcaatagggtccccgtgctggagaaaacgggaataaagagtacagtttgtggccccgaatccttcacacctgaccataagccactcatgggagaggcacccgagctccgggggtttttcctgggctgcggtttcaattccgccggaatgatgctgggaggaggttgcggccaggagctggctcactggatcatacacggacgtccggaaaaggatatgcatggctatgatattcggcggttccaccactcgctgactgaccatccgaggtggatcagagaaaggagccacgagtcctacgccaagaattattccgttgtgtttcctcacgacgagcccctggctggacgaaatatgcgcagagatcccctccacgaggagctgctggggcagggatgcgtttttcaggagcgccacggctgggaaaggccagggtggtttcatcccaggggccccgctcctgtgctggagtacgattactacggcgcctatggctccagggcacacgaggactacgcctacaggcggctgctggctgacgagtatacctttgcattccccccccaccacgacaccattaagaaggagtgtctggcctgcagaggtgcagccgcagtttttgacatgagttattttgggaaattttacctggtcggcttggatgcaagaaaggccgctgattggcttttcagcgcggatgttagcagacctcccggatctacagtgtacacctgcatgctgaaccaccgaggtgggacagagagcgatctcacagttagccgtcttgctccgagccatcaggcgtcccctcttgcccctgctttcgagggggacggctattatctggcgatggggggcgccgtggctcagcacaactggtcccatatcactaccgtgctgcaggatcagaaatcacagtgtcaactcatcgactcgagcgaggacctgggaatgatctccatccagggccctgctagcagggcgatcctgcaggaggtgctagacgcagatctctctaacgaagcatttccattttcgacacacaagttgttgcgagcagccggacatctcgtgagggcaatgagacttagcttcgtgggggaactcggttgggagctgcacatcccaaaagctagttgcgtgcccgtgtatagagccgtaatggccgcgggggccaaacacgggttaatcaacgccggttacagagcgatagactccctgagtatcgagaagggctacaggcattggcacgccgatctccgtcctgatgattccccgttagaagctggattggccttcacttgtaaactgaaatctcccgtcccttttctaggtcgagaggccctggagcagcagcgggcagcaggactccgccgccgtcttgtgtgctttactatggaagacaaggtccctatgttcggcttagaggccatttggcgaaacggtcaggtggtgggtcacgtgcggagagccgactttggctttgccatcgacaaaactatagcgtacggctatatacatgacccgtccgggggacctgtgagcctggactttgtgaagagtggcgactacgcgctggagcgtatgggagtcacctatggcgctcaggctcacctgaaaagccccttcgatccaaacaacaagcgagttaaaggcatttactag

SEQ ID NO: 16468 - DNA, 459 bp, synthetic construct
  source 1..459: mol_type = other DNA; note = Synthetic coding sequence
atgtctgttacatatgacgatagcgtcggagttgaggtttcctcagattccttctgggaggtgggcaattataagagaaccgtaaagagaattgacgatggacatcgtctgtgcagcgatctgatgaactgtctccacgaacgagcgcgtatcgaaaaggcctatgctcagcaactgacagaatgggcaaggcgctggaggcagttagtggaaaagggaccccagtacggaaccgtagagaaggcttggatggcctttatgtcagaagctgagcgagtgtccgagttacacctggaagtcaaagcttcgcttatgaacgatgatttcgaaaaaatcaagaattggcagaaggaggcgttccataaacagatgatgggggggttcaaggaaaccaaagaggccgaagacggttttagaaaagctcagaaaccttgggccaagaaactgaaggaggtgtag

SEQ ID NO: 16469 - DNA, 1620 bp, synthetic construct
  source 1..1620: mol_type = other DNA; note = Synthetic coding sequence
atggctacaagcgcacccctcaggagtctggaagaggaggtgacatgctcaatctgcctggactaccttcgcgacccagtaacgatcgactgtgggcacgtgttctgcaggtcttgcaccacagacgttcggcccatatctggatcaagacctgtatgtcccttgtgtaagaaacctttcaaaaaagagaatatcaggcccgtatggcagctcgccagtctggtcgagaacattgaaagactgaaggtcgataagggcagacagccaggcgaggtgacacgggagcagcaggatgcgaagctatgtgagcggcatcgggaaaaactgcattattattgcgaggacgatgggaaactcctgtgcgtgatgtgccgggagagtcgagagcaccgcccccacacagccgttctcatggagaaagcagcacaaccgcatagagagaaaatacttaatcatcttagtactctgcggagagacagagacaaaattcaaggcttccaggctaaaggggaagccgatattctggctgcactgaaaaaactgcaagaccagcgacagtatatcgtagctgaattcgaacaggggcaccaattcctgcgcgagcgcgaggagcacctcctggaacaactggcaaagctggaacaagaactgactgagggacgagagaagttcaaatcacggggcgttggcgagctcgcaagacttgccctggtgatttcagaactggagggcaaggctcagcagcccgccgcggaattgatgcaggatacaagggattttctcaatcgctacccgagaaagaagttctgggtgggcaaaccaattgctagggttgttaaaaaaaaaacaggtgagttcagcgacaagctgctttccttacagagaggccttcgcgaatttcagggcaaattgcttcgtgacttggagtacaagacagtgtctgtgacattggatcctcaatcagctagcggctatctgcaattgtcagaggactggaaatgcgtaacttacacgtctctgtacaagagcgcctatctgcatccccagcagttcgattgcgagcccggggttctagggagcaagggcttcacgtggggcaaggtgtattgggaggttgaggtggagagagaaggatggtcagaggatgaggaagagggagatgaagaggaggaaggcgaagaggaagaagaggaggaggaagctggatatggcgatggatacgacgattgggaaaccgatgaagacgaagaatcgcttggcgacgaggaagaggaggaagaagaagaagaggaagaggtgttggagagctgtatggtcggtgtggccagagactccgttaaaagaaagggagacctgtctctgaggcctgaggatggggtctgggccctgaggttgagctcttccggaatttgggccaataccagccctgaggccgagcttttccccgccctcaggccccgcagggtcgggattgctcttgattatgagggcgggacagtaactttcacgaatgccgagagccaagagttgatctatacgttcacggcaaccttcacaagaaggctggtgccttttctgtggctgaaatggcctgggacccggttgcttctgcgaccatag

SEQ ID NO: 16470 - DNA, 1266 bp, synthetic construct
  source 1..1266: mol_type = other DNA; note = Synthetic coding sequence
atgatggaagacaataagcagctggcgctcaggatcgatggggccgtgcagtccgcttctcaagaggttacaaatctaagagccgagctaacggctacaaaccggcgcctggctgaactctccggagggggcggacccgggcctggaccaggcgcggctgctagcgctagcgctgcaggtgattctgctgctacaaacatggaaaatcctcagcttggagcgcaggtccttctgcgcgaggaggtctctaggctgcaggaggaggtgcacctgctgagacagatgaaggaaatgctcgcaaaagacttggaagagtcccagggcgggaaatcctcagaagttctttcagccactgagctgagggtgcagcttgcccagaaagagcaggagctggcaagagctaaagaagctctccaggcaatgaaggcagatcgcaaacggctgaaaggtgagaagacagacctagtttcacagatgcagcagctgtatgccaccctagaatctagggaagaacaattgagggatttcatacgcaattacgagcagcatcgaaaagagagcgaggatgctgttaaggcactggcgaaggaaaaagacctcttggagagggagaagtgggagctgcgcaggcaagctaaagaggccaccgaccacgcaacggccttgagaagccagctggatctaaaagacaatcggatgaaggagctggaagccgagctcgctatggcaaaacagagtctggcgacattgactaaagacgtccctaaacgccattctctggcaatgcccggcgagactgtgctgaatggaaaccaggaatgggtggttcaggccgacctgccactcacggccgccattagacagtcacaacagacactgtatcattcacatccaccgcatcccgccgatcgacaggccgtccgcgtgtccccttgccactcaagacagcctagcgtgatctccgatgctagtgctgccgagggcgaccgaagttcaacgcctagtgacatcaattcccccagacaccggactcacagtctttgcaacggcgattcaccaggacccgtgcagaagaatcttcataaccctatcgtacaatcccttgaggatctggaggaccaaaaacggaagaaaaagaaagagaaaatgggatttgggagcatctcaagagtgtttgcacgagggaagcagaggaagagcttggaccctggtttatttgatggaacagctcctgattattatatcgaagaggacgcagattggtag

SEQ ID NO: 16471 - DNA, 492 bp, synthetic construct
  source 1..492: mol_type = other DNA; note = Synthetic coding sequence
atggtaggcggtgggggagtcgggggcgggctcctggaaaatgcaaacccattaatttaccagcggtctggggagagacccgtgaccgcaggagaggaagacgaacaggtgcctgattcaatcgatgcacgtgagatctttgacttgattcgatcgataaacgacccggaacacccactcacactggaagagctgaacgtggtagaacaggtccgggtacaggtgtctgatcccgagtcgacagtggccgtggctttcaccccaaccatcccccactgctctatggccacattaatcggtctgagcatcaaagtcaagctgcttcgttcactgccccagagattcaagatggatgtgcatatcaccccagggacacacgcaagcgaacacgcagtaaacaaacagctcgctgacaaggaacgggtcgctgccgccttagagaatactcacctcttagaagtggtcaatcagtgtctcagcgccagaagctag

SEQ ID NO: 16472 - DNA, 207 bp, synthetic construct
  source 1..207: mol_type = other DNA; note = Synthetic coding sequence
atgtcaatctcgagcgatgaggtgaacttcttggtgtatcgatacctccaggagagcgggttctctcactctgcatttaccttcggaatcgagtcacatatcagccagagcaatattaacggggctctcgtaccaccagcggccctgataagcataatccagaaagggttgcagtacgttgaggctgaggtttccattaacgagtag

SEQ ID NO: 16473 - DNA, 534 bp, synthetic construct
  source 1..534: mol_type = other DNA; note = Synthetic coding sequence
atgtctagcaatgaatgcttcaagtgcggacgctccgggcattgggcccgggagtgccccactggaggtggacgcggccggggcatgcgtagtcgggggaggggcggatttacgtctgacagggggtttcagttcgtaagtagtagcttaccagatatttgttatcgctgtggggaatcggggcacctggccaaagactgtgatctgcaggaggacgcctgctataactgcggacgcggtggccatatcgcaaaagattgtaaggagcccaaacgggagagagaacaatgttgctacaactgcgggaaacccggccatctggcgagggattgcgatcatgctgacgaacagaagtgctacagttgcggtgagtttggccatatccagaaagattgcaccaaggtcaaatgctacagatgcggcgaaaccggccacgtggccataaactgcagtaagacctcagaggtgaattgttatcgttgtggggagtccggccatttagcacgggaatgcactatcgaggcaactgcttag

SEQ ID NO: 16474 - DNA, 429 bp, synthetic construct
  source 1..429: mol_type = other DNA; note = Synthetic coding sequence
atgacgcagctgcggcaagtccttgaatcccgcctccagagaccactgcccgaagacttggcacgtctttggcccgtggtaattctctgtcagctcgctaaccagctaaggcctcgctccgtgccattcatccatgtgccgagccccgccgtgccaaagctctccgcgttaaaggccagaaagaacgttgagagctttctggaggcgtgtcgcaagatgggcgttcctgaggctgacctgtgtagcccctcagatttgctgcaggggacggctcgtgggttacgaaccgccctggaggcagtcaagcgtgtgggcgggaaagccctcccccctctttggcctcccagtgggctggggggcttcgtcgtgttctatgtcgttctcatgctgttgctctatgtgacatacaccagacttcttgggagttag

SEQ ID NO: 16475 - DNA, 1296 bp, synthetic construct
  source 1..1296: mol_type = other DNA; note = Synthetic coding sequence
atggaagacctcaaaggccctaccgtaagtagctttctgagcggaatgaaaacagagctttatcccggtgtaacagccattgacatgatgtacaaagaaggcctccatggtgtggataacggcattctgattttcgataaggttagaatcccccgcgagaatctcctggacaaattcggaagcgtcgcccctgatggtcagtaccactccccaattcggaacaagtcggcccggttcaatgcaatgctggctgccctgaccccgtcaagattggctgtcgcctttcaggcgatgggagccatgaaactcgggctgacaatcgctattagatactcccactccagaagacagttcggaccaaagaccaaggaggaagtcaagattatagaacaccagacccagaccctaaggctgatgccacatctggccacagctttggcccttaccttcgtgagtcgctatgcaggtgcactactcgacgaagacgtttttcagggaaaagaactggtgaactccagaagtttgcaagccctggtggcaggacttaaggcttacagcacatgggagaatatacgttgtctgcaagattgccgggagtgcacagggggcatggtggttggccgtgagctcctggcccagtacactaaacagtacgaggagaagccgctgtttggcttacttcagaactgggccgagtccgtgggggacaagctgaggacttctttcctagccttcaatatggacacggtcgatgatctggcattcctcctgaaagccgtcaaatttcgggaaagagtgctgcagcgcggactggtggcacgaatctactacaaagtcaaaacaaaaaaagaggacttttttcatgcttggaacagttgcctccatcacgtggcaagtctctctctcgcccatactcaccgcgtgacactggagcagtttagcctcgctgtgaagagctgccctgatcaggaggaccagacactgctcatgaaattctgcctactctacggaactaaattagtgttccaagaaagggcctggtatctcgagcataaataccttacccccatggcctctacacgcattagaaaccagctgctcgacctatgtgattcggtaaaggatgatgccaggcgcgttatcagtaccttcaatatccctcatacctatctccacgcacctatcgccgggatctcaaacccccgggctgcctgggctttctacccagctcctctgcagccacggcctcgagaggaagcgcggagtcggagacccaagctcggtgcaaagctgtag

SEQ ID NO: 16476 - DNA, 1443 bp, synthetic construct
  source 1..1443: mol_type = other DNA; note = Synthetic coding sequence
atggctgagctgcagatgctgctggaagaagaaattcctggaggtaggagggccctgttcgattcttacacaaatctggaaagggtcgcagattactgcgagaacaactatatccagagcgctgataaacagagggccttggaggagacaaaggcctacaccactcagagcctggcaagtgtcgcatacctgatcaacacactcgccaacaacgttctgcagatgctcgatatccaagcctcacagctgagacgcatggaatcctctatcaaccatatcagccagacggtggacatacacaaagaaaaagtagctagacgtgagatcgggattcttaccaccaataaaaacacctcccgcactcacaagatcatcgcccctgcaaatctcgagcggcctgtgcgttacataagaaagcccatagactatactatacttgatgacatcggccatggggtgaagtggttactgcgcttcaaggtgtctacccaaaatatgaaaatgggggggctgcctcgtacgacccccccgacacagaagccgccctcccccccgatgagcggaaagggaactctcgggcgacattccccatatcgaactctcgaacccgtgcgccctccagtagtccctaacgactacgttcctagtccaaccaggaacatggcccccagccagcagtcaccggttaggacggcgtcggttaatcagagaaacagaacttatagtagtagtggaagctcggggggatctcatcctagttctcgctcctcttcaagagaaaatagcggctcaggttccgtgggtgtaccaatcgccgtccctacccctagtccgcctagtgtctttccagacgctgcagctgggggagcccagaccttggcagacgggtttacttcacctaccccccctgtggttagcagtacaccgccaactgggcaccccgtgcagttttactctatgaatagaccggctagtcgtcatacgccccctacaatcggagggtcactgccctaccgccggcccccctccataacatcgcagacatccttgcagaaccagatgaacgggggtcctttttattcacagaatcccgtgagcgatactccacctcctcctcctcctgtggaggagcccgtgtttgatgaatccccaccgcctccaccaccaccggaagattacgaggaggaagaggcagctgtggtggagtatagtgacccctacgctgaggaggaccctccttgggcccctcgctcctaccttgaaaaagtggttgcaatctatgactataccaaagacaaggaggacgaactgtcttttcaagaaggagctatcatatatgttatcaagaaaaatgatgacggttggtatgaaggagttatgaatggcgtgactggcctattccctggcaattatgtggaatctatcatgcactactctgagtag

SEQ ID NO: 16477 - DNA, 3102 bp, synthetic construct
  source 1..3102: mol_type = other DNA; note = Synthetic coding sequence
atggatgaagaggagaaccattacgtgtctcagctgcgcgaggtgtattcctcctgtgacaccacagggaccgggttcttggatcggcaggagctgactcagctgtgtctcaaattgcacctggaacagcagttgccagtcctgctccaaactttgctcggtaacgaccattttgcgagggtcaactttgaagagtttaaggagggattcgtcgcggttttgtcttccaacgccggagtccgaccaagcgacgaagacagcagctctcttgaaagcgccgcgagcagcgctataccgcctaagtacgtgaacggctcgaaatggtatgggcggcgctcaagacccgagttatgcgacgccgcaactgaagctcgtcgcgtcccagagcaacagacccaggcgagccttaagagccatctgtggcgctccgcttccttagagtccgtggaatcgcccaagtccgatgaagaagctgaatcaacgaaggaggcacagaatgaactgtttgaggcccagggtcagttacagacatgggatagcgaagactttgggtctccccaaaagtcatgcagcccatctttcgatactcccgagagtcagatccgcggtgtgtgggaggaattgggggtgggctcttcaggtcacctgtccgagcaggagctggcagtggtttgccagtccgttggcttgcaaggactggagaaagaagagcttgaggaccttttcaataagttagaccaggatggagatggcaaggtttctttggaggagtttcaattaggcctgttttcgcatgagccagcactgctcttagagtcgagcactagagtgaaaccctccaaagcctggtctcactaccaggttccagaggagtccggttgccataccacgacaacgtcttctctagtctccttgtgttcttccctgcgccttttcagctcaattgacgacggtagcgggttcgctttcccagaccaggtacttgccatgtggacgcaggaaggtatacagaatgggcgtgagatcctccaaagccttgacttcagtgttgacgaaaaagtcaaccttcttgaactgacttgggcactggacaatgagctgatgacggtggactcggccgtacaacaggctgccctagcttgttaccaccaggaactctcctaccagcaaggtcaagttgagcagctcgccagggagcgtgataaggcccgacaggatcttgaacgcgccgaaaagcgaaatctcgagtttgtgaaggaaatggatgactgccactctacacttgagcaactgacagagaagaagataaaacacctggagcagggctaccgggaaagactttccctgttgcgctccgaagtggaggcagaacgagagttattctgggaacaggctcaccggcagcgggcggccttagaatgggatgtgggccggttgcaagcggaggaggccggcctgcgcgagaaactcaccctggccctgaaggaaaattctagactccagaaggagattgtggaagttgttgaaaaacttagcgatagtgaacgtctggccctcaaactccagaaggacctagaattcgtgctaaaggacaagctcgagccccagtctgcggagctcttggcgcaggaagagcggtttgccgcagtgctgaaggagtacgaactgaagtgtcgagatctccaggataggaacgacgagttacaggccgagctagagggtctctgggcgcggctcccaaagaacagacattctccgagctggagtccagacgggaggcgacgccaactgccaggtctcggcccagcagggatcagttttctaggaaatagcgcgcctgttagtatagagacagagctgatgatggagcaggtcaaggagcattatcaggatctgcggacccagttggaaaccaaagtgaactattatgagagagagatcgctgcccttaagcgcaattttgaaaaggaaagaaaagacatggaacaggcgagacgacgtgaagtctccgtcctggagggacagaaggccgatcttgaggagctgcacgagaaatcgcaggaggtcatttggggcctccaagagcagctacaggataccgctaggggacccgagcccgaacagatgggcctggcaccttgctgcacgcaggctttgtgcggtcttgctctgcgtcaccactcgcacctgcagcaaattcggctggaattccacaggctttctgaagagaatacgctcctgaagaatgatctcggccgcgtccgacaggagctggaagccgctgaaagcacccacgacgctcaaaggaaggagattgaagttctgaagaaggataaagaaaaggcctgcagtgaaatggaagtcttgaaccgccagaaccagaactacaaagatcagctgagtcaactcaacgtccgggtactacagctgggacaggaagcttctacacaccaggcgcagaatgaggagcatcgcgtgacaatccagatgcttacacagtcactagaagaagtagtgaggtccgggcaacagcaatctgatcagatacaaaaactgagagtagaactggagtgcttaaatcaggagcaccagtcactgcaactgccctggagcgagttaacccaaaccttggaggagagccaagaccaggtgcagggcgcccacctgaggctgcgccaggcacaggctcagcacttgcaggaagttagactggttccccaagaccgagtcgctgaactccacaggttgctgtccctgcagggtgagcaagctcggagacgcctggatgcccaaagagaagagcatgagaagcagctgaaggctacagaagagagggtggaggaggcagaaatgatcctgaagaacatggagatgctactccaggaaaaagttgacaaactgaaggagcagtttgagaaaaatactaagagcgacctcttgctgaaagaactctatgtagagaatgctcacctggtgcgcgccctgcaggcaaccgaggagaagcagcgcggggccgagaagcagtctagactgcttgaggaaaaagtgagggcgctgaacaaattagtatctcggattgcacccgccgcgctttctgtttag

SEQ ID NO: 16478 - DNA, 627 bp, synthetic construct
  source 1..627: mol_type = other DNA; note = Synthetic coding sequence
tgctgtggatgttcaggtggctgtggctctggctgcggagggcggggcagtggttgcggcgggtgcggctcagggtgcggtggctgtgggtcggggtgtgggggctgtggttccggttgcggaggctgcggcggctgcggctcaggatgcgcggggtgtggcggctgcaagggtgggtgcggttcatgcgggggaagcaaaaggggctgtgtgagttgtggcgtaagcaaaggcgcatgcggcagttgcggaggcagcaaaggggggtgcggtagttgcggggggtccaaggggggctgcgggagttgcggaggctcaaaaggagggtgcggatcctgtggcgggagtaagggcgggtgtgggagctatggctgcagtcagtcgagttgctgcaaaccctgttgctgttccagtggatgcggtagctcctgttgtcaatcgtcctgctgcaaaccttactgttgccagagctcatgctgtaaaccctactgttgccagtctagctgttgcaagccatgctcttgtttcagcgggtgtggaagtagttgctgccaatccagttgttacaagccgtgctgctgccagtcatcctgttgtgttccggtgtgttgccagtgtaaaatttag

SEQ ID NO: 16479 - DNA, 642 bp, synthetic construct
  source 1..642: mol_type = other DNA; note = Synthetic coding sequence
atggccggaagtcccgaactggtggttcttgaccccccctgggacaaggagctggccgccggaacggaatcccaagccctggtttccgcaaccccccgagaggactttagagtgcgctgcacttcaaagagggccgtaaccgaaatgctgcagctgtgtggcaggttcgtgcaaaagcttggcgacgcattaccagaggaaattcgagagcctgctctgagggatgctcagtggacattcgagtctgccgtgcaggagaatattagcattaacggtcaggcttggcaggaggcctccgataactgttttatggattccgacataaaggtcctggaagatcagtttgatgaaattatcgtggatattgcaaccaagcggaagcaataccctagaaagatcctagagtgcgtgatcaaaacaatcaaggcaaaacaggagatactaaagcagtatcaccccgtagtgcaccctctggatcttaagtacgatccagacccagtgctgaatggtaacgcctttaacttctctccttttaacatgatgctggccgtcgatttgtcttacatggtttttattacgtccagccctagctatggcaagttcgaaatgcagcggggcaattcaagcaaaggggaccagtag

SEQ ID NO: 16480 - DNA, 3720 bp, synthetic construct
  source 1..3720: mol_type = other DNA; note = Synthetic coding sequence
atgacaatctggcagatgcaaaaacaggctcaaagggggtccccagctcgcactcatagcatgatgagtctgagtgtgcgcccacaaaggcgcctactgtctgcgagggtcaacagatcccagtcctttgcgggcgtgcttggatctcatgagagagggccacgcagttttcccgtcttctctcctcctggacccccaagaaaaccaccggcactaagcagagtctcacggatgttctctgtggcccacccagccgccaaagttccacagcctgaaaggttggacctggtgtacactgctcttaaaagaggccttaccgcctacctggaagttcatcagcaagaacaagaaaaactgcagggccagataagggaatccaaacgcaacagcagactaggttttttgtatgacctggataaacaggtgaaatccattgagcgttttctgcgccggctggagttccacgcaagcaaaatcgacgagctttatgaagcttactgcgtacaacgccgcctgagagacggggcctacaatatggtgagggcttatactaccggctccccggggtcaagggaggcacgggattccttagccgaggccactcggggccaccgtgagtatactgagtccatgtgcctcctggagtctgagcttgaagctcagctgggcgagttccatctgcggatgaagggactagccgggttcgcccgcctgtgtgtgggcgaccagtatgagatttgcatgaagtatgggcgccagcggtggaagctgagagggcggatcgaagggagcgggaagcaggtctgggattccgaggaaaccatttttctccctctgctaacagagttcctttctattaaggtaacggagcttaagggcctggcgaaccacgtagtcgtggggagcgtcagttgcgagaccaaggatctcttcgccgccctaccccaggtggtagctgtggacatcaatgatctcggcacgataaagctctctctggaagtgacatggtctccgttcgacaaagacgaccagcccagtgctgctagcagcgtcaataaagcctcaacggttactaagaggttctccacctactcgcagagcccgccggacactcctagtttgcgggaacaggctttctacaatatgctgcgtcggcaggaggaactggaaaacggcactgcctggagtctgtcttccgaatcgagcgatgattcgtcctctccgcagctgtccggaaccgcccgtcactctcctgctcccagacccttagtgcagcagccggaacctctccccattcaggtagcttttagacgcccggaaacccctagctccgggcccctcgacgaggaaggcgctgtcgctcccgtcctagccaatggacacgctccatactccagaaccctatcccatatttctgaggccagtgtggatgctgctttggccgaggccagcgtggaggcagtgggcccagaaagcctggcatggggtccaagcccccccacccaccccgcccccacacatggagagcaccccagccccgttcctccagccttggaccctggtcacagcgccacttcctccacgctcggaacgaccggttcggtgccaaccagcactgatccggcgccctccgcacatctggattcagtgcataaatccactgattccggaccttccgagctgcccgggccaacacacaccaccaccggcagtacatacagcgccatcacaaccacccatagcgccccgtctccactgacacacaccaccactggctccacacataaaccgatcatttcaactctgaccaccacaggtccaacgctgaatatcatcggcccagtgcagaccacaacgagtcctacgcacaccatgcccagccccacgcacacaacagccagtcccacccatactagcacttcacccacccataccccaacttctcctactcacaaaacgagcatgtcccctcccaccaccactagtcccaccccgagtggcatgggtttagtgcaaacagcgacttcacccactcaccctacaacgtctccaacacatcccaccactagccctattctcatcaacgttagtcccagcacgtcactggaattggcaacattgtcctctccttccaagcactctgatcctaccctgcccggaaccgacagtctgccctgtagtccgcctgtcagcaatagctacactcaagctgatcctatggcgccacgcacaccgcacccgtctccggcacattcaagccgaaagcccttgacttccccagcccctgacccaagtgagagcaccgtgcagtccctgagccctaccccctccccccctacacccgcccctcagcactcggacctgtgtctcgcaatggccgttcaaacacccgtgcccactgccgctgggggatctggtgacaggtcccttgaagaagccctaggcgcactgatggccgctttggacgattaccggggtcaatttcccgaattgcagggcttagagcaagaggtgaccaggctggagtctctgttgatgcaacggcagggactgacaagatctcgggcttctagtctctccattacagttgagcacgcgctggagagtttcagtttcctcaacgaggatgaggatgaggacaatgatgtcccaggagacaggccaccctccagtccagaagctggcgctgaggattcgatcgattcaccctcggctcgccccctttccacgggctgtcctgcccttgacgccgccctcgtccgtcatctgtaccattgttctcgcctcctgcttaaactgggcactttcgggcccttaaggtgtcaggaagcctgggcacttgaaaggcttttaagggaagcacgagtgctggaggccgtgtgcgagttttctaggcgctgggagatcccagcgagtagcgctcaggaggtcgtgcagttcagcgcatccaggccaggatttcttaccttttgggatcaatgcacggaacggctgagctgttttttgtgccccgtggagagggtattgctgaccttttgcaatcagtatggcgctagactgagtctgagacagcccggcctcgccgaagcagtgtgcgtgaagttcctagaggacgccctgggacagaaactgccgagacgcccccagcctgggccaggggaacagttgacggtgtttcagttttggagcttcgtggaaaccctggacagcccaactatggaggcctacgtcacggagaccgccgaggaagtgcttctcgtgcgtaacctcaatagcgatgatcaggcggtagtcctaaaagctttgaggttggctccggagggtaggctccgtcgtgatggtttaagagcgttgtcctcacttcttgtgcacggtaataacaaagttatggccgctgtgtctacccaactgcgctccttgtctttgggaccaacatttcgagaaagggcccttctgtgctttctcgatcagctagaggacgaagacgtgcagacccgggtggccggttgcctggccctgggatgtatcaaggccccagagggtatcgaaccgctggtgtatctttgtcaaacagataccgaagcagtccgtgaggccgcccgccagagcctgcagcagtgtggcgaggagggacagagcgcccacagacgattggaggagtccctcgacgcccttcctcgcatttttggtccaggtagcatggctagcactgccttctag

SEQ ID NO: 16481 - DNA, 732 bp, synthetic construct
  source 1..732: mol_type = other DNA; note = Synthetic coding sequence
atggtaactgactacggggcgttcatcaagatccccggttgtagaaaacaagggctcgtgcacaggacccacatgtcctcctgccgggtggacaaaccctcggagatcgtggatgtcggagacaaagtatgggtaaaactgattggcagagagatgaaaaatgatcgcatcaaggtgtccctgtctatgaaggtggtcaatcaggggactggaaaagatctggatccaaataacgtcataattgaacaggaagaacggcggagacggagtttccaggattatactggccaaaagataactcttgaagcggtgctaaacactacttgcaaaaaatgcgggtgcaaggggcgggtgaaacccttgccattccctcgcttctccccatgtggctggaccttgttttggaagaaggaggccgcccagtgtcactttgctaaggactgcttcatgcagccggggggcactaaatactctctcatacccgatgaagaggaagaaaaggaagaggctaaaagtgcagaattcgagaagccagaccccacgcgaaacccgtcccggaagcggaagaaggagaagaagaagaagaagcatagggaccgaaaatcttcagatagcgacagctctgatagtgagagcgacaccgggaagagagcaagacacacttcaaaagactctaaagcggcaaagaagaagaagaagaaaaagaagcacaaaaaaaagcacaaggagtag

SEQ ID NO: 16482 - DNA, 330 bp, synthetic construct
  source 1..330: mol_type = other DNA; note = Synthetic coding sequence
atggaagaaattcccgcacaggaagcagcgggatctcctagggttcaattccagtccctggaaacgcaatcagaatgcctgtcccctgaaccccagttcgtgcaggataccgacatggagcagggcctaaccggtggattcccaatctccaaacccgacggaatctctcagttggagcaggacctccaggtgtttgacctcgagactaagaccagggaagtgttaagagacgactgcagcgatggagaaactcgggaggagaataaactacttatcccaaaacagaagatctcagaggaggtgcacagctataaagtacgggtaggctag

SEQ ID NO: 16483 - DNA, 4134 bp, synthetic construct
  source 1..4134: mol_type = other DNA; note = Synthetic coding sequence
atgtctctcgaacgtgagctgcggcagctcagcaaggccaaggctaaggcgcagcgcgccggccagaggcgtgaggaagcggctctgtgtcaccagctcggtgagctgttagctggacacggacgctacgccgaggctttggagcagcactggcaagagctgcagctaagggagagggccgatgatcctctgggttgcgccgtggcccatagaaagatcggggaacgcctcgccgaaatggaagactacccagctgcgttgcagcaccagcaccagtatctggaactagctcattctctgcgcaatcataccgagctccagcgagcgtgggcaaccatcggaaggacacacttggatatctatgaccattgccagtcccgagatgcattgctccaagcacaggctgcctttgaaaagtcactagccatcgttgatgaagaactggaagggacattagctcagggcgagctcaacgaaatgcggaccaggctctacctgaatctggggctgacattcgaatcactgcaacagaccgccctgtgtaatgattattttcgcaagagcatttttcttgctgaacaaaatcacctgtatgaggacctttttcgggcaaggtacaatttgggcacaatacactggagagctggacagcattcacaggcaatgagatgtctggagggcgccagagagtgcgcacatacaatgaggaagcgtttcatggagtctgagtgttgtgttgtgatagctcaggtgttgcaggatctgggagattttctggccgccaagcgggctctgaaaaaggcatatcggttaggatcgcagaagccagttcagcgggctgccatctgccagaatctacagcatgtgctggccgtggtccgcctgcagcagcagctggaggaggccgaggggcgagatccccaaggcgctatggttatctgcgagcagctgggggatctttttagtaaggctggtgattttcctagggcagctgaagcataccagaaacagctacgctttgccgaactgctcgacaggcctggagcagaacgagccattatccatgtgtccttggcgaccacattgggcgacatgaaggatcaccacggagcagttcgccattacgaagaggagcttcgccttcggagtggaaacgtgttagaagaggccaaaacatggctgaacattgctctgagtagggaagaggctggagatgcctacgagctccttgctccttgctttcagaaagcactgtcctgtgcccagcaagctcagcggccacagcttcaacggcaggtgctgcagcatctccacaccgtccagctgcgactgcaaccgcaggaagcccccgaaacagaaacacgcctgagagagcttagcgtggcagaggacgaggacgaagaggaggaggcggaggaggcggcagccactgcggagagtgaggccctggaggctggggaggtagaactaagtgagggcgaggatgacactgatggcctcacaccacagctggaggaggatgaggagctgcagggacacctaggccggcgaaagggctctaagtggaataggcgcaatgacatgggggagacactgctccaccgtgcctgcattgaagggcaactcagacgggtgcaggacctggtgagacagggccatccactgaatcccagggattactgtggatggactcctctgcacgaggcatgcaattatggacatcttgagattgttcgctttctgctcgatcatggagccgcggtggacgatcctggtggacagggttgtgaaggaatcacccccttgcacgatgcccttaactgtggtcactttgaggtcgcagaactgctgctggagcgcggtgcttcagtgacattgcggactagaaaggcaagcgccagatggaggcggtgctcttccgggaagctgtataggagagatcttgacctggaaacccggcagaaggctagagctatggagatgctcctgcaggccgcagccagtggtcaagatccccactcatcccaggcattccacacgccaagctcactgctcttcgatcccgaaacgtcaccgccactatctccttgtcctgaacctccgtctaattctaccaggctgcccgaagcgtcacaggctcacgtccgggtgagccccggacaagctgcaccagcaatggcaaggcctcgccgtagtcgtcacggtccagcctcctcgagctctagctcagagggggaggactctgcaggcccagcgcggccaagccaaaagcggccccggtgctcggccactgctcaacgagtggccgcctggacaccaggccctgcttctaatcgagaagcagctactgcaagcacatcaagagccgcctatcaagcggccatccgaggtgtggggtcggcccagtcacggctgggccctggtcccccacgcggacatagtaaggccctggcaccacaggctgccctcatccccgaggaggaatgcctagccggagattggctagaactggatatgcctttgacccgtagcaggagacctcgaccacgagggacaggagataatagacggccaagcagtaccagcggctcagactccgaagaatctcgcccacgggcgcgtgctaagcaggtacgcctgacttgtatgcaatcttgttctgcgccagtgaatgccggacccagctccttagcttcagagccacccggctcaccctccacacctcgagtctctgagccctctggggattctagcgctgccggacagccattgggacctgccccacctccacctatcagggtgcgtgtgcaagttcaggaccacctgtttttgattccggtccctcacagtagtgacacgcatagcgtggcatggctcgccgagcaggccgcccagagatactaccaaacgtgtgggcttttaccccggctgacgttgcgtaaggaaggcgcgctgctcgcacctcaggatctgatacctgacgtgcttcagtctaacgacgaggtattggctgaggttacgtcttgggatttgcccccgcttacagacagatataggagggcctgtcagagcctggggcagggggagcaccaacaggtgctccaagctgtagagctgcaggggctcggcctctcgttcagtgcctgttctcttgccttggaccaagcacaacttacacccctgcttagagctctgaaactgcacacagcattgagagagctccgccttgcaggaaaccggttgggcgacaagtgtgtcgccgagcttgtcgcagctttggggacaatgccaagcctggcgttgctcgatctgagcagtaaccaccttggacccgagggactccgtcagttagccatgggcctgcccggccaggccacgttgcagtctctggaggagctggatctctctatgaatccactcggggatggctgcggccaaagcctggcttctttactgcatgcctgccccctcctgtccacacttcggcttcaggcctgcggctttggtccgagctttttcctgagccaccagacggccctgggctctgcctttcaggacgccgaacatctgaaaacgctgtccctgtcctacaatgccctcggtgccccagctctggcccggacgctccagtcccttccagcggggaccctgttgcatctcgagctgagtagtgtggctgctggtaagggggatagcgacctcatggagcctgtgttccggtatcttgccaaggaaggctgtgcacttgcgcacctcactctgtccgccaaccaccttggcgataaagctgtccgcgatctgtgtcggtgccttagtctctgcccgagcctgattagcctagatctgtctgcgaaccctgagatatcatgcgcctccctggaggagttgctctccactttgcagaagcgaccccaggggctgtcttttcttggcctgagcggttgcgccgtccagggaccattaggcctgggcctgtgggataaaattgcagcccagctccgggagctacagctttgctcaagacgcctctgtgcagaagatcgggatgcactccgacaactacagccctcacgaccgggacctggggaatgcacgctggaccatggttccaagctcttcttccgaaggttatag

SEQ ID NO: 16484 - DNA, 675 bp, synthetic construct
  source 1..675: mol_type = other DNA; note = Synthetic coding sequence
atgccaacattgttcaagggtgtctggggtgtggtagagcacagtcgcgcacttggccgtttttgtcctgcctgtctaccttcaggccctcatcttcatactcagccggccctgggcacagccgaaatgactctgctgagttctcagagctctagtctggtggcgccttcaggctccgtctctgccgagaatccagagcagaggatgctggagaagagagcaaaggtgattgaagagctactgcagactgagcgagattacatacgtgatctcgagatgtgtatcgaacgcataatggtgccaatgcaacaagcccaggtacctaatatagactttgaggggctgttcggaaacatgcagatggttataaaggtctccaagcagctgctggccgcgttggagatcagcgacgcagtgggccctgttttcctcgggcatcgggatgagctcgaaggcacatacaagatctactgccaaaatcacgacgaagccatcgcgctgttggaaatttatgagaaagacgagaagatccagaaacaccttcaggactcactggcagaccttaaatcgttgtacaatgagtggggctgtacgaattacatcaatctggggtcgtttcttattaaacccgtccaacgcgtcatgcggtaccccctgctattgatggagctgtag

SEQ ID NO: 16485 - DNA, 354 bp, synthetic construct
  source 1..354: mol_type = other DNA; note = Synthetic coding sequence
gtctgtggtgactacctgctatccaggatggacgtcacctcatgtatcagctaccgcaactttgccagctgtatgggcgactcaaggcttctgaataaggttgacgcgtacatccaggaacacctgctacagatttcagaagaagaggagttcctgaagctcccgcgtttgaagctcgaagtgatgttggaggataatgtgtgtttaccctccaatgggaagttgtacacaaaggtgatcaattgggtacagagatcaatctgggaaaatggcgattcactggaggagctgatggaggaggtgtccttcaaagtgaatggaatccaacccttcctgaagattatactgttgtag

SEQ ID NO: 16486 - DNA, 285 bp, synthetic construct
  source 1..285: mol_type = other DNA; note = Synthetic coding sequence
atgctgtgctgggggtactggtccctgggacagcctgggatcagtactaacttacagggaatcgtggcggagccccaagtgtgtggtttcataagcgaccgcagcgtgaaggaggtcgcttgtgggggaaaccactccgtgttcttgctggaggacggggaagtgtatacctgtggcttgaatacaaagggacagctgggccatgagcgtgaggggaataagccagagcagattggtgctttggctgaccaacacattattcatgtggcttgtggtgaaagctag

SEQ ID NO: 16487 - DNA, 747 bp, synthetic construct
  source 1..747: mol_type = other DNA; note = Synthetic coding sequence
atggccacaagcgccccgctgcggagcctggaggaggaggttacctgctcaatttgccttgactacctccgtgacccggtgaccattgactgtggtcacgtcttctgccgtagctgcaccacagacgtaaggccaatatccggctctcggcctgtgtgtcccctctgtaaaaagccatttaaaaaagagaatatcaggcctgtctggcagctggcttcgctcgtagaaaatatcgaacgccttaaagtcgataagggccggcagccaggcgaagtgactcgcgagcaacaggacgctaaactctgtgagcgacatcgcgaaaagttacattactactgcgaagacgacggaaagctcctgtgcgtgatgtgccgggagtccagagagcacaggcctcacactgcggtattgatggaaaaagcggcacagccccaccgagaaaagatccttaaccatctctccactctgagaagggatagggacaaaatccaggggttccaggctaaaggggaggccgatatcctcgctgccttgaaaaaactgcaggatcagcgacagtatattgtggccgaattcgagcaggggcatcagttccttcgcgagcgggaggaacatctactggaacagctcgccaagctggaacaggaactgaccgagggcagggagaaattcaaatcgaggggagtgggagaactggcccgcctggcactggttatcagcgagctcgaagggaaggctcaacaatag

SEQ ID NO: 16488 - DNA, 2814 bp, synthetic construct
  source 1..2814: mol_type = other DNA; note = Synthetic coding sequence
atggagccagatattatacggatgtactcctcatctcctccacccttggacaatggtgcagaagatgacgacgacgacgagtttggcgaattcggcggttttagtgaggttagcccttccggtgtgggctttgtggattttgatacaccagattatactcggccgaaggaggaattcgtgccatccaatcatttcatgcctatacacgagtttagtgagaacgtggacagtctgacgtccttcaagagcatcaagaacggcaatgacaaggacatcacggcagagcttagtgcacctgtgaagggtcagagtgacgtgctgctgagtaccaccagtaaggagattatttcatccgaaatgctggccacctctattgatgggatggaacgaccaggtaacttaaacaaggtagtagagcagagacagaacgttggcaccttggagtcatttagcccaggcgattttagaaccaatatgaacgtagtgcaccaaaacaagcagctggagtcatgcaatggggaaaaacccccttgtctggagattttgacaaatgggtttgcagtcctggagacagtcaaccctcaaggcacggacgacctggacaacgtcgccgactcaaaaggccgcaagccactctccacccattctacagaatacaacctcgacagtgtccctagcccagccgaggagtttgcagactttgccacattttccaaaaaggaacgtattcagctggaagaaattgagtgcgccgtgctcaacgacagagaagccttgactatcagggagaacaataagatcaatagggttaacgagctcaatagcgtcaaggaggtggcccttggcagaagcctcgacaacaagggggacacagacggcgaggatcaggtatgtgtatccgaaatttcaatcgtgactaacagaggcttcagcgttgagaagcagggtctgccaaccctgcagcaggatgaatttcttcagtccggtgttcaatctaaggcctggagcctggtcgattctgccgataacagtgaggccatcaggcgagagcagtgtaaaacagaagaaaaactcgacctcctgacatcaaaatgtgctcatctgtgcatggactctgtgaaaactagcgacgatgaggtcggatcaccaaaggaggagagtagaaagttcacaaacttccaaagcccgaacatagatcccaccgaggagaacgatctggacgactcactgtccgtcaagaatggtgattcaagtaatgattttgtaacctgtaacgacatcaatgaggacgactttggggactttggtgacttcgggtcggcttcgggctccaccccacccttcgttaccggcacccaggactcaatgtcagatgctacctttgaggagtcgtccgagcacttcccccacttcagcgagccaggtgacgattttggcgaattcggcgatatcaatgccgtcagctgtcaggaggagacaatcctgacgaagtcggatctgaagcagaccagcgataatctctccgaagaatgtcaactagcacgtaaatctagcgggaccgggacagagcctgtagcgaagctgaaaaacggccaggagggagaaattggccactttgactctgtccccaatattcaggatgactgcaatggcttccaggattccgatgattttgcggatttttctagcgccggtccaagccaagtggtggattggaatgctttcgaggacgagcagaaagactcgtgtagctgggccgccttcggagaccagcaggctaccgaatcccaccaccggaaagaagcatggcagtctcaccgaaccgacgaaaacattgacactccaggtacaccaaaaacgcactcggtcccctcagccaccagcaaaggcgcagtggccagcgggcatctgcaggagtctgcaacatcagtccagacggctttgctgaaccgactcgagaggatctttgaagcctgcttcccttctatattggtgccagatgctgaggaagaggttacttcactgaagcatctgctcgaaacctctactcttccaattaagaccagggaagcactgcctgaaagtggagagctcctggacgtttggacagaactgcaggatatccacgacgcacatggtctccgatatcagtgggggggatcccacagcaataagaaactcctaagcagtctggggatcgacacccggaatatattatttacggggaataaaaaacagcccgtgatcgtgccaatgtacgctgctggactgggcatgctagagcccacaaaagagccactgaagccactcagcgccgcggagaagatcgcgtcaatcggtcagacagctactatgagccctgatatgaacacttgtacctcagaccagttccaggagagcctgcctcccgtgcagttcgattggtcttcttccgggctcaccaatcctctcgacgccagtggggggtctactctgttgaacctcgacttctttggtcccgtggatgactccagctcttcttccagcacgactattccaggagtggacccagagttatacgaacttacaacgtccaaactcgagatctctacatcttctttgaaggtgacagatgcctttgcacgcctgatgtccaccgtggaaaagacatcaacttcaacctccagaaaaccaaagagagaggagcacttgtctgaggaggcaatcaaggtgatagcaggcctccctgatctgacattcatgcatgctaaagtgctgatgttcccagcaaccttgaccccatcaacatcctcccaggaaaaggccgatgggtag

SEQ ID NO: 16489 - DNA, 114 bp, synthetic construct
  source 1..114: mol_type = other DNA; note = Synthetic coding sequence
atggcctcggaagatattgccaaactcgcagagactctcgctaaaacccaggtagccggaggacaactgtcgttcaagggtaagtccctgaaactcaatacagccgaggactag

SEQ ID NO: 16490 - DNA, 309 bp, synthetic construct
  source 1..309: mol_type = other DNA; note = Synthetic coding sequence
atgcagactagctctagtaggagtgtgcatctctcggaatggcaaaaaaattactttgccattacctctgggatttgcaccggcccaaaggccgatgcgtatagagcccagatcctcagaatccaatatgcttgggccaatagcgaaatttcacaggtgtgcgcgaccaagctgtttaagaagtacgctgagaagtattctgccatcattgattcagataatgtcgagagtgggctcaacaactatgccgagaacattctgactctggcgggcagtcagcagacagactccgacaagtggcagagctag

SEQ ID NO: 16491 - DNA, 474 bp, synthetic construct
  source 1..474: mol_type = other DNA; note = Synthetic coding sequence
atggccacatccgcccccctgagatctcttgaagaagaggtcacttgttcaatatgcctggactatctacgggacccggtgaccatcgattgcgggcacgtattttgtaggagctgcacaaccgacgtacggccaatcagcggtagtagacccgtgtgcccactctgcaagaagccattcaaaaaagagaatattagacccgtgtggcaattggccagcttggttgagaatatcgaacgccttaaggttgataaaggcagacagcctggcgaagtgacaagggagcagcaagatgcaaaactgtgcgagcgtcacagagagaaactgcactactactgtgaagacgatggtaagcttttatgcgtcatgtgcagagagagtagagaacatcgtccacatactgccgtgcttatggaaaaagccgctcaaccacacagagagaagatcctaaaccacttgagtacactccggtag

SEQ ID NO: 16492 - DNA, 348 bp, synthetic construct
  source 1..348: mol_type = other DNA; note = Synthetic coding sequence
atggccggcgcccccacagtctccttgcccgagctgaggagtctgctcgcaagcgggagggcaagactctttgacgtgaggtctcgggaggaggctgctgctggcactattccgggtgccctgaatattccggtgagcgaactggagagcgcgctccaaatggagccagcggcgttccaggccctttacagtgcggagaagccaaaattagaagacgaacatctcgtgttcttctgccagatgggcaagcggggcctgcaggccacacaactggctagatctttaggctatactggcgctagaaactacgctggagcttacagggagtggttggagaaagagtcgtag

SEQ ID NO: 16493 - DNA, 4767 bp, synthetic construct
  source 1..4767: mol_type = other DNA; note = Synthetic coding sequence
atgctgcctccaaagcatctaagtgcaaccaagccaaaaaagtcctgggccccgaatctgtacgaactggatagcgaccttaccaaggagccagatgttatcatcggagagggacccacagacagtgagttcttccaccagaggttccgcaacctgatctacgttgaatttgtcggcccacggaagacgctgatcaaacttagaaacctatgcctggactggttgcagccggaaacccgcaccaaggaggaaataattgagctgttagtcttggaacaatatttaaccattatacctgaaaagttgaagccttgggtgcgggccaaaaaacctgagaactgtgaaaagcttgtgacacttctcgagaactataaagaaatgtaccagccagaggatgataataacagcgatgtaacatcagatgacgacatgacacgcaataggagagagtccagtcccccccattccgttcacagtttctccgatagagactgggacagacgtgggagatctcgtgatatggagccaagagatcgatggagccataccagaaatccaaggtcacgaatgcctccacgcgacttgagcctccccgtggttgccaagacctcctttgagatggaccgcgaagacgaccgggattcgcgggcgtatgagagtagaagccaggatgctgagtcgtaccagaacgttgtggatcttgctgaagatagaaagccgcacaacactatacaggataatatggagaactaccgcaaactgctgtccctcgtgcagctggctgaggacgatggccatagccacatgacccagggccactcatctcggtccaagaggtccgcttatccttcaacatcaagaggtctgaagaccatgccggaggcaaagaagtctacgcacagacgtggtatctgcgaggacgagtcatctcacggtgtcattatggagaaattcatcaaggatgtgagccgcagctcaaagagtggcagggcccgtgaatctagcgaccgttcacagaggttcccaagaatgtccgatgataattggaaagacattagcttaaataagagggagtccgttatccaacagcgagtctacgaggggaacgcatttcggggtggctttcgattcaacagtactttagtctctcggaagcgtgtcctggagaggaaacggcggtaccactttgacacggacgggaaaggctcaattcatgaccagaaaggttgtccaaggaagaagcctttcgaatgcggcagcgagatgaggaaggctatgtccgtgagttccttgagttctctatcgtcaccctccttcacagagagccagcctattgattttggcgcaatgccctacgtctgtgatgaatgcgggcggagctttagtgtcatctccgagtttgttgagcatcaaatcatgcatacgagggaaaatttatacgagtatggagaatcatttattcattcagtggctgttagtgaggtccagaaatcccaagttggaggcaagaggttcgaatgcaaggattgcggcgagaccttcaataaaagtgctgcgttggctgagcaccgcaagattcatgcccgcggctacctggtggaatgcaagaatcaagagtgtgaagaggcctttatgccttcccccactttctccgagctgcagaaaatttatggcaaggacaagttctatgaatgtcgtgtgtgcaaagagacatttctgcactcttcagctctcatagagcaccagaaaatccactttggggatgataaggataatgaacgagagcacgagcgagagcgcgagagagaacgcggtgaaacctttaggcccagccctgctctaaacgagttccaaaaaatgtacggcaaggaaaaaatgtatgagtgcaaggtatgcggtgaaaccttcctgcatagcagttcgcttaaggaacaccagaagatccacacacgaggtaatcctttcgagaacaagggtaaagtctgcgaagagactttcattcccggccaaagcttaaaacgcagacagaagacctataataaggagaagctttgtgattttacagatgggcgagacgcctttatgcagtcaagcgaattaagtgaacatcagaagatccatagccgcaagaatctgttcgagggaagaggatacgagaagtctgtgatccacagcggaccttttactgaaagtcagaaatcacacaccatcacgcggcccctcgagagcgacgaggatgagaaggctttcaccatcagtagcaacccatacgaaaaccagaagatcccaacaaaggaaaatgtgtatgaggccaaatcttacgaacgaagtgttattcattctttggcctccgtggaggcccagaaaagccactctgtagcaggtccatccaaaccgaaagtgatggcagaaagcacaatccaatcgtttgacgccatcaaccaccagcgggtccgcgccgggggcaacacaagcgaggggagagagtatagcaggagtgtgatccatagtctggtggcttccaagccgcctcgctcacataacggaaatgaattggtcgaaagcaacgaaaagggcgagagctcaatttacatctccgacctgaacgacaaacgacagaagattcccgcccgagagaacccatgcgagggggggtctaaaaatcgcaattacgaggattccgtcattcagtcagtcttccgggctaaaccacagaagtctgtgcctggggagggctctggggagtttaaaaaggatggtgagtttagtgtgccgtccagtaatgtgcgggagtaccagaaagcccgggctaaaaaaaagtatatcgagcacaggtctaatgagacctctgtgatacactccctgccttttggagagcagacttttcgtcccagaggtatgctctatgagtgccaggagtgtggcgaatgtttcgcccatagttcggatctgacggagcaccagaaaatccatgaccgagaaaagccctccggatcacgaaactatgaatggagcgttattagaagcttggcaccaaccgacccacagacgtcctatgcccaggaacagtacgccaaggagcaagcgcggaacaaatgcaaagacttccgccagttttttgccaccagcgaggacttgaatactaaccagaaaatctacgaccaggagaaatcccatggcgaagaaagccagggagagaatactgatggagaagaaacccactcagaggagacccatggccaggagacaattgaggatcctgtgatacaaggatccgatatggaggatcctcagaaggatgacccagacgacaaaatttacgaatgcgaagattgcggactgggcttcgtggacctcacagatctgaccgaccatcagaaggtgcactcaaggaagtgtctggttgatagtagagaatatactcacagcgtcatccacactcactcgatctccgagtatcaacgtgactataccggtgagcagctctatgaatgtcccaagtgcggcgaaagctttattcactcctcatttctgtttgagcatcagcggatccacgaacaggaccagctctactctatgaaaggctgtgatgacggcttcatcgctctgctgccaatgaaaccacgaagaaatcgggccgccgaacgcaaccctgccttagcaggcagcgcaatcagatgtctactctgtggccaaggcttcattcacagctccgcccttaacgagcacatgagacttcaccgtgaagatgacctcctggaacagtcccagatggccgaggaagcaataattccagggttggctctgactgaatttcaaagatctcagaccgaggagaggttgtttgagtgtgctgtctgcggggagtcctttgttaatccagctgagctggccgatcatgtcacagtccacaaaaacgaaccctatgagtacggctcaagttatactcatacctcttttcttacagagcccctgaagggggctatccccttttacgagtgtaaggactgtggtaagtcatttatccattctacagtgctgacaaagcataaggagctgcatctggaggaagaggaggaagacgaggctgctgccgctgccgcagctgctgcccaggaagtggaagcaaatgtgcacgtgccccaggttgtcttgagaatacaggggctgaatgtggaggcagcagaacccgaggtcgaagccgccgagccagaagtagaagctgccgagcctgaagtcgaagcagccgagccaaacggggaggcagagggcccagatggcgaagccgccgaacccatcggggaggctgggcagccaaacggcgaggccgaacagccaaacggtgacgccgacgagccggatggggccgggattgaggatcccgaagagcgcgccgaggaacccgaaggtaaggctgaagaaccggaaggagacgccgacgaacctgacggggtcggaatcgaggaccctgaggaaggcgaggaccaggagattcaggttgaggagccttactatgattgccacgagtgcaccgagacatttaccagtagcaccgcttttagcgaacaccttaagactcacgctagtatgattatattcgaacctgccaacgcttttggcgaatgtagtgggtatatcgagagggcgtctaccagtactggcggggcaaatcaggcagatgagaagtatttcaagtgtgatgtctgcggtcagctctttaacgatcgcctcagcctagccagacaccagaacacacacaccggctag

SEQ ID NO: 16494 - DNA, 381 bp, synthetic construct
  source 1..381: mol_type = other DNA; note = Synthetic coding sequence
atggccgccgctacgggcgatccagggctgagtaagctgcagtttgccccgttctcaagtgcactggatgtcggcttttggcatgagctgactcagaagaagctaaacgagtaccgcctggacgaggccccaaaggacatcaagggttactactacaacggagacagcgccggcttgcccgcccggctaactttggagttctcggcttttgatatgagtgctcctactccagcccgctgttgccctgccattggcaccttatataacacaaacacacttgagtcttttaaaactgcggataaaaagctgttgttggagcaagccgctaacgagatatgggaatctattaaatctggcacagccctggaaaatcctgtgtag

SEQ ID NO: 16495 - DNA, 1434 bp, synthetic construct
  source 1..1434: mol_type = other DNA; note = Synthetic coding sequence
atggctgacggccaggtcgccgagttgttactccgtagattggaggcgtctgacggcggtctggattctgcagagctcgctgcagaactcggaatggagcatcaggccgtcgtcggagctgttaagtcacttcaggctttgggggaagtgatagaagctgagcttagatccacaaagcactgggaactcaccgccgagggtgaggaaatcgctcgggaggggtctcacgaggccagagtgttccggtccatccctccagagggcctcgcccaatctgagctcatgaggctacccagcggaaaggtcggattctctaaagccatgtctaacaagtggatccgtgtcgataagtctgcggccgatggcccgcgagtgttcagggtagtcgatagcatggaagacgaggtacaaagaagactccagctcgtgcggggcggacaggccgaaaaattaggggagaaggagcgttccgagttaaggaaaaggaagcttctcgccgaagtcgggagctggcgtgataggccgttcaaaccctacaacttcttagcacacggggtgttgccagactcaggccacctgcatcctcttttaaaggtccgctcccagttccgtcagatttttcttgagatggggtttaccgagatgcccactgacaattttattgagagcagtttctggaatttcgatgcattgtttcagccccaacagcaccccgcaagggatcagcatgatactttctttttgcgtgaccccgccgaggctctgcaactgcctatggattatgtgcagcgggtgaaacggactcattcgcaagggggctacggctctcagggctataaatataattggaaattagacgaagcccgtaagaacctgctacgcactcatactacttcagcttctgctcgagcactgtacaggctggctcagaaaaagccttttacacccgtgaaatacttctcaatcgacagagtcttccgtaacgaaacactcgacgccacacatctggccgagtttcaccagattgaaggagtggtcgccgatcacggactcactttgggccacctgatgggcgttcttcgagaattctttaccaaactcggtattacccagttgcggtttaagcccgcctacaatccttacacagaaccaagcatggaggttttttcctaccaccaggggctgaagaagtgggtggaagtgggaaattcaggtgtttttcgacctgagatgttacttcccatgggactccccgagaatgtgtccgtgatcgcgtggggcctctctttggagcgccctaccatgattaagtatggcataaacaatatcagggagctcgttggccacaaggtgaaccttcagatggtgtacgactcccccctctgcaggctggacgcggagccccggccacctcctacacaggaagcggcctag

SEQ ID NO: 16496 - DNA, 3195 bp, synthetic construct
  source 1..3195: mol_type = other DNA; note = Synthetic coding sequence
atgccggttcaggccgctcagtggaccgagttcctctcatgtcccatatgctataatgaatttgacgagaatgtccataaaccaatttctttaggctgctctcatactgtgtgcaaaacgtgtctgaacaagcttcataggaaggcctgcccctttgatcagaccgccattaataccgacattgatgttctgccggtcaatttcgccctcctccagctggtaggggcccaggtgcccgatcaccagtctatcaaactgtccaacttgggcgagaacaagcactatgaagtggccaaaaagtgcgtggaggacctggcgctctacctgaagcccctcagcggaggtaaaggcgtggcaagtttgaatcagtcagccttgtcccggccaatgcagcgaaaattagtcacactggtgaattgtcagttagtagaggaggagggtcgcgtgcgagcaatgcgcgcagctagaagtctgggggagaggactgtaactgagctgattctacagcatcaaaatcctcagcagttgagcgccaacttatgggcggctgtgagagcacggggttgtcagttcctaggccccgccatgcaggaggaagccctgaagctggtactactagccctggaggacggttcagccctgtcccgcaaggttctggtattgttcgtagtgcagaggctagagcctcgctttccccaggcaagcaagactagcatcggacacgtggttcagttgttgtaccgtgcaagttgtttcaaagtcacgaaacgggacgaagattcgagcttaatgcagctcaaagaagagttccgtagctacgaggccctccgtcgagaacacgacgcccagattgtccatatcgcaatggaggcaggtctcaggatctctcctgagcagtggagttcgctactgtacggggacctggcccacaagtcacatatgcaaagcattattgacaaattgcagagtcctgagtcatttgcaaagtccgtgcaagagcttacaatcgtcctccagcggacaggcgaccctgccaacctgaatcgactccgcccgcacctggagctcctcgctaacatcgatccgaatccagacgcggtaagccccacgtgggaacagctggaaaatgcaatggtggccgttaagacagtggtgcacggacttgtggatttcattcagaactactctaggaagggccacgagaccccccagcctcagcctaattccaagtacaagacttctatgtgccgggacctgaggcagcaggggggctgcccccgcggcacgaactgcacttttgcacacagtcaagaagagctcgaaaaataccggcttcgcaacaagaaaataaacgcaaccgttcgaacatttcccctgctgaataaagtgggggtcaataatactgtgacaactacagctggcaatgtaataagcgttatcggcagtaccgaaacaactggtaaaatcgtaccctctacgaacggtataagcaacgctgaaaattccgtcagtcaactgataagccgctccacagactctacactcagagcgctggagaccgttaagaaggtggggaaggtgggtgctaatggacagaacgccgctgggccatccgccgattctgttaccgaaaataaaattggctccccgcctaaaacgccagtcagtaacgtcgctgccacctcagccgggccaagtaacgtgggcaccgagcttaacagcgtgccacagaagagcagtcccttccttacaagggtacccgtgtatccaccacactcagaaaatattcagtatttccaggaccctcggacccaaattcccttcgaagtcccacagtatccccagacaggatactacccacctccacctacagttcccgcgggcgtcgcaccctgtgtgccacgcttcgtcaggtcgaataatgtgccagaatcttctctccccccagcttcaatgccatacgcagatcattacagtacctttagtcctcgtgatcggatgaacagctccccctatcagcctccacctccacagccatacgggcctgtgccacccgtccctagcggcatgtacgcgcctgtatacgactctaggcgaatctggagacctccaatgtaccagcgagatgacatcataagatcaaactccctcccgcctatggatgtcatgcattcatccgtttatcaaacctccctgagggagaggtacaattcattagatgggtactattctgtggcctgccagcccccttctgaaccaaggaccacggtgccactgccacgggagccatgtggccacctcaagacttcttgtgaagagcagattcgccgcaagcctgaccagtgggcacagtaccatacacagaaggcccctctcgtgtcctctacactccccgtggccacccagtcacctactccaccctcccctctgttcagtgtagacttcagagccgacttctctgagtcggtgagcgggactaaattcgaggaagatcacttatctcattattcaccatggtcttgtggcacaatcggctcttgtatcaacgcaatagatagcgaacccaaggatgtgattgcaaatagtaatgcagtgttaatggacttagattcaggcgatgtcaagagaagagttcacctttttgaaacccagagacgcaccaaagaagaggaccctataatcccgttcagcgacggccctatcatctctaaatggggtgccataagccgttcttctaggactggttaccataccactgatcccgtccaggctacggcctctcaagggtccgctacaaagccaatatcagtgagcgattatgtcccctacgttaacgcggttgattcacgatggtcctcttacgggaacgaggctacaagctccgcccactacgtggagcgggaccgctttatagtcacagacctgtctgggcatcgtaagcatagtagcaccggcgacttgctgtctctggagctccaacaggcaaaaagtaattccctcctgcttcagcgggaagcaaatgccttggcaatgcagcagaaatggaactcccttgacgaaggacgccacttgactctaaacctgcttagtaaggaaattgagttacggaatggcgaggttaaaaagctcaatctcagtgcctcttgtttgatgtacttgttcagtgccgcagcgtcttggctgtaccactactag

SEQ ID NO: 16497 - DNA, 1548 bp, synthetic construct
  source 1..1548: mol_type = other DNA; note = Synthetic coding sequence
tgagccggaggctcgccgagtgtggtggattactttccgtctgaggacttttaccgctgtgggtattgtaagaatgagtccggcagcagatcgaacgggatgtgggcacactctatgaccgtccaggattatcaggatctgatagaccgtggctggagacgctcagggaagtacgtgtacaagccagtgatgaaccagacttgctgcccgcagtatacaattcgctgtcgacctctgcagttccagccctccaagagccacaagaaggtgttgaagaaaatgctaaagtttctagcaaagggcgaagtacccaaaggatcttgcgaagacgagcctatggacagcacaatggatgatgccgtagccggggactttgccctgataaacaagcttgacattcagtgcgacctcaaaacccttagtgacgatatcaaggaaagcctggaatctgagggtaaaaattcaaagaaagaggagccacaagaacttctgcaaagtcaagatttcgtcggggaaaagctgggctccggtgagccatcccatagcgtcaaggtgcatacagtacctaaacccggcaagggtgccgatctctccaagccgccgtgcagaaaagccaaggagattcgcaaggagagaaagcgcttgaagctcatgcagcagaaccccgcaggcgagctcgagggcttccaagcacaaggtcatcctccttcgctgtttcccccaaaggcaaagtcaaaccaaccaaagagtttggaggatctcatcttcgaatctctgccagagaatgcttcacacaaactggaagtgcgggtggttaggtctagcccacccagttcgcagtttaaagctacgctgctggaatcttaccaagtgtataagcgctatcagatggtcatccataagaacccacctgatactccgacggagtcccagttcactagatttctgtgcagtagtcccctggaggctgagaccccacctaatggacctgattgtggttatggatcttttcatcagcaatattggttggatggtaagattattgccgttggcgtgatcgatatcctccccaactgcgtgagctcagtttacctgtactatgaccctgattacagctttctgtcgctgggcgtctatagcgcactcagggaaatcgcttttaccagacagctgcacgagaaaacgtcccagctttcatattactatatgggtttttacatccattcgtgcccaaaaatgaagtataaagggcaataccggcccagcgacctgctgtgccctgaaacctacgtctgggttccgattgagcagtgtctgccctccctggagaattcaaagtattgccggttcaaccaggatcctgaggctgtggacgaggatcgatctaccgaacccgacagactgcaagtgtttcataaaagggccatcatgccttatggagtctacaaaaaacagcagaaggacccgtccgaagaggcagcagtgcttcagtacgcttcactggttggtcagaaatgctctgagaggatgttgctgtttcgaaattag

SEQ ID NO: 16498 - DNA, 225 bp, synthetic construct
  source 1..225: mol_type = other DNA; note = Synthetic coding sequence
atggccatggctcccagtccctcattagtacaggtgtacacatcccctgctgccgtggcagtttgggaatggcaggacggtctgggcacctggcacccatacagtgcaaccgtatgctcctttattgaacagcagttcgtgcaacagaaagggcaacgctttggcctgggaagcctggcacactccattccacttgggcaagcagatccaagtctcgccccctag

SEQ ID NO: 16499 - DNA, 594 bp, synthetic construct
  source 1..594: mol_type = other DNA; note = Synthetic coding sequence
atggccgctttccgggatatcgaagaagtgtcccaaggcttattgtcattacttggagcaaacagggccgaagcccagcaacggcgactcttgggcaggcatgaacaggtcgtcgagcggctgctggagactcaagatggcgctgagaagcagttgcgggagatcttgacaatggagaaggaagtggctcaatcgctgttaaatgctaaagaacaggtgcatcagggcggtgttgagttgcagcaactggaagccggcctgcaggaagcgggcgaggaggacaccaggctaaaggcctccctgctgcagctgaccagggaactggaagaactgaaggaaattgaggcagaccttgaacgccaagagaaggaggtcgacgaggacaccaccgtgacaattcccagtgccgtgtatgtagcacagctctaccaccaggtgagcaagatcgagtgggactacgaatgtgaaccaggtatggtgaagggtattcaccatggccccagtgtggcccagcccatccacctggattccacacagctgtccaggaaattcatcagcgactacttatggtcacttgttgatacagagtggtag

SEQ ID NO: 16500 - DNA, 2271 bp, synthetic construct
  source 1..2271: mol_type = other DNA; note = Synthetic coding sequence
atgtccccccagaagcgcgtgaagaacgtgcaggcacagaatcgtacatctcagggatctagtagctttcaaaccaccctgagcgcatggaaggtgaagcaggatccctccaatagtaagaatataagcaaacacggacagaacaacccggtgggggactatgaacacgcagatgatcaagcagaggaagacgctctacagatggcagttggctacttcgagaaggggcccattaaagcttctcagaataaggataagacccttgagaagcatctaaagacagtggagaacgtagcgtggaagaacggcctggcctctgaggagatagatattcttctgaatatcgcactaagcggcaagtttggcaatgctgttaataccagaatcctgaagtgcatgatccctgccaccgtaatcagcgaagactctgtggtaaaggcagtcagctggctgtgtgtgggcaaatgcagcggttctactaaggtgctgttctacagatggctggtggccatgtttgacttcattgataggaaagaacagattaatttgttatacggatttttctttgcttctctgcaggacgacgctttgtgtccatatgtgtgccatctattataccttctgactaagaaggagaacgtcaagcccttcagagtcaggaaattacttgaccttcaggctaagatgggaatgcagccccacctacaagccctcctatcgctctacaagttctttgcccccgccctgatcagcgtgagtctaccagtcagaaagaagatttacttcaagaatagcgagaacttgtggaagactgctctgctggcggtgaagcaaagaaaccgcggacctagccctgaacctttgaagttaatgctgggcccggcaaatgttagacccctcaaacgaaagtggaacagcctgtcagtaatccccgtactgaactccagtagctacactaaggaatgcgggaagaaggaaatgtcgctgagtgattgtctaaaccgcagcggaagctttcccctggaacagttgcagagtttcccccagctgctgcagaatatccattgcctagagctgccaagtcagatgggcagcgtgctaaacaacagccttttattgcactatatcaactgcgtgcgggatgagcccgttcttctgcgcttttattattggctctcccaaacccttcaggaagagtgcatctggtacaaagtgaataattacgagcatggaaaagagtttaccaactttctggataccatcatccgcgctgaatgcttcctgcaggagggtttctattcctgcgaggccttcctgtacaaatccctgcccctgtgggacggactttgttgccgctcacagtttctgcaactggtgtcatggatccccttcagctctttcagtgaggttaagcccttgctctttgaccatctggcacagcttttttttacctcaacgatatactttaaatgtagcgtgctgcaatctcttaaagagttgttgcagaattggctcctctggctctcaatggacatccacatgaagcctgtgacgaactctcctttggaaacaacacttggcgggagcatgaacagcgtctctaaactcatccattacgtgggctggttatcaacgacagccatgcgactggaatccaacaatacttttctgctgcacttcattctggatttctatgagaaggtctgtgatatttatatcaactataacctgccactggtggttctgttcccaccgggcatattctatagcgccttattgagtctcgacacaagtatactcaatcagctctgcttcatcatgcacagatatcgaaaaaatcttacagccgccaagaagaatgaactcgtgcaaaagaccaaaagcgagtttaattttagctcaaaaacataccaggagttcaaccactacctaaccagtatggtgggttgcttatggaccagtaagccattcgggaagggaatttacattgatcccgagatcctcgaaaaaaccggagtggctgagtacaaaaattctctgaacgtggtgcaccacccttctttcctctcctacgcagtttctttcctgctccaggagtctccagaggaacggacggtcaacgtcagctctatccggggcaagaagtggtcttggtacctggactacttgttctctcagggactgcaaggattgaagttgtttattcgatcctccgtgcaccactccagtattcccagggcagaaggtattaactgcaacaatcaatattag

SEQ ID NO: 16501 - DNA, 1941 bp, synthetic construct
  source 1..1941: mol_type = other DNA; note = Synthetic coding sequence
gcacagggctctgtgagcttcaatgacgttaccgtggactttacccaggaggaatggcagcatctggatcatgcacagaaaaccttgtacatggatgtgatgctggaaaactattgccatctgatctctgtgggatgccatatgactaaacccgacgtcatcctcaaacttgaaaggggggaagaaccgtggaccagcttcgcaggacatacctgcttggaggagaattggaaagctgaagatttccttgttaaatttaaggagcaccaagaaaagtattctagatccgtggtgtcgatcaaccacaaaaaacttgtgaaagagaagtcgaaaatctatgaaaaaacattcacgttgggcaagaatccagttaacagtaagaaccttcctcccgagtacgatacacacggccgaatcctcaagaacgtctccgaactgatcatctctaacctcaacccggcaagaaaacgtctcagtgaatataacgggtacggcaagtcacttctgagtaccaagcaagaaactacccaccctgaagtgaaatcacacaaccagagtgccagagcattttctcacaacgaggttctgatgcagtaccagaagacagaaacccctgctcagagctttggctataatgactgcgaaaagtcctttctgcagagaggaggccttatcactcattcccggccctacaagggcgaaaacccttctgtgtataacaaaaagcgcagggccactaacattgagaagaaacacacatgcaacgagtgcggcaaatcattttgccggaagtcggttctcatactccaccaaggtatccatagtgaggagaagccataccagtgtcaccagtgcgggaacgcatttcgaaggaagagctacctcatcgaccatcagagaacccacaccggggagaagccatttgtgtgtaacgaatgcggcaagtcgtttaggctcaagaccgcattgaccgaccatcaacgcactcatactggagaaaagtcatatgaatgtctgcagtgcagaaacgccttcagactgaagagtcatctcattcgacaccagaggactcacaccggagagaagccatacgagtgcaacgattgtggaaaaagttttcggcagaagaccacactcagcctccaccagaggatacataccggcgagaagccgtacatttgtaaggagtgtggcaaatcctttcaccagaaggccaatctaacagtgcaccagagaacacacactggcgagaagccttacatctgcaatgagtgcggtaagtctttttctcagaagaccacccttgccctgcacgaaaaaacccataacgaggaaaagccctatatttgttctgaatgtggtaaaagcttccggcagaagaccaccctggttgcccatcagagaacccataccggggagaagagctatgaatgtccgcattgtggtaaggctttccggatgaagagttacctcattgaccaccaccggacacacacaggggagaagccctatgaatgtaacgagtgcgggaaatcattcagccagaaaacaaaccttaatctgcatcaaaggatccatacgggtgaaaagccttacgtctgcaatgagtgtggtaaatcctttagacaaaaggccacgctgaccgtacatcagaaaattcacaccggtcagaagtcctacgaatgtccacaatgtggaaaggcgtttagccgcaagtcttatctgatccaccaccagcgaacccacactggtgaaaagccatacaaatgctcggagtgcgggaaatgcttcagacagaaaactaacctgatcgtgcaccaacggacgcatacaggtgaaaaaccttacgtctgtaacgagtgtggcaagtccttcagttataagcggaatttgatcgtgcatcaacggacccacaagggcgagaacattgagatgcagtag

SEQ ID NO: 16502 - DNA, 594 bp, synthetic construct
  source 1..594: mol_type = other DNA; note = Synthetic coding sequence
atgggaggccgtaagcgggaaaggaaggccgcagtcgaagaggacacctccctgtctgaatctgaaggaccaaggcaacctgacggggacgaggaggagagtaccgccctgtcaattaacgaagaaatgcagaggatgctgaaccagttacgggagtacgattttgaagatgattgcgactctttgacttgggaggaaactgaggagactctcctcctgtgggaggacttttccgggtatgccatggccgccgccgaggcccaaggggaacaggaagatagcttggagaaggtgattaaagatacagaatctttgttcaaaacacgagaaaaggagtatcaagagacaattgatcagattgagcttgaactcgcgacggctaagaacgacatgaatagacatcttcacgagtatatggaaatgtgttctatgaaacgaggactggatgtacagatggaaacctgccggcggctaatcacgcaatctggtgaccgtaaatcaccagctttcaccgctgtgcctctgagcgatccaccaccacggcaagctcgcctgcggacaccgatagccatgagccatcttactgctccatag

SEQ ID NO: 16503 - DNA, 423 bp, synthetic construct
  source 1..423: mol_type = other DNA; note = Synthetic coding sequence
atggccatggcacctagccctagcctggtgcaggtctatacatcacctgcagccgtggccgtgtgggagtggcaggacggattgggcacctggcacccctatagtgccacagtatgcagctttatcgagcagcagttcgttcagcaaaagggccagcggttcggactaggctctttagcgcatagcataccattggggcaggcagatcccagtctcgcaccttatattattgatctgccctcctggacccagttcagacaggacaccgggacaatgagggccgtgcggagacacctctttccccagcatagcgcacctggccgtggcgtggtgtgggagtggctttccgatgatggaagttggactgcctacgaagccagcgtctgcgactatctagagcagcaagttgcaaggggcaattag

SEQ ID NO: 16504 - DNA, 3237 bp, synthetic construct
  source 1..3237: mol_type = other DNA; note = Synthetic coding sequence
gtctgcatgcatccacacaacgtccttagcgatgtggtcaattacactctatggctgatggaatgttcacatgctagcgggtgttgccacgctacaatgttttttagtatttgctttagcttcagggccgtgctcgagctcttcgaccgatatgacggtctgcggagattagttaatctgatcagtaccctagagatcttgaacctcgaagaccagggagcactcctgagtgacgatgaaattttcgcaagccgacaaacaggtaagcacacttgcatggctctgagaaagtattttgaggctcacctggctatcaagctcgaacaggtgaagcagtctctgcagagaaccgaaggtggtattctggtccacccacagcctccttataaggcctgcagttacactcacgagcagattgtggaaatgatggaattccttatcgagtacggccctgcacaactgtattgggagcccgccgaggtgtttttaaaactttcctgcgtccagctcctcttgcagctgattagcattgcctgcaattggaagacatattacgcaaggaatgataccgtgagatttgccctggatgtactcgccatccttacagtcgtacccaaaattcagctacagttggctgaatccgtggacgtgctggacgaggccgggtcgaccgtctctacggtgggcatatctataattctcggcgtagctgaaggcgagttctttatccacgatgccgagatccagaagagcgccttgcagatcatcattaattgcgtttgtggaccagataacaggatttcatctattggcaagttcatcagcggcacgcccagacggaaactgcctcaaaatccaaagtccagtgaacatactcttgcaaagatgtggaatgtcgtccagagcaataacggaatcaaggtactactcagtctgttgagcattaaaatgccaatcaccgacgccgatcaaattcgcgccctggcatgtaaggccctggttggactctcccgatcttcaactgtgcgacaaattatctctaagctgcctctattctccagttgccagatccagcagctcatgaaggagcctgtgcttcaggacaaaagatcagaccatgtgaagttctgcaagtacgccgctgaactgatagaacgcgtgtccggcaagcctctcctgattggtacagatgtgtccttggcccggctgcagaaagccgatgtggtagcccaatcaagaatttccttcccagaaaaggagcttctacttctaattcgtaatcatctgattagcaaaggcctgggcgagaccgcgacagtcttgactaaagaggccgacctgcccatgactgcagccagccattctagtgctttcacaccagtgaccgcagccgcttcgcccgtgagcctgccccgaactccacgcatagcaaacggcattgctacccgattgggatcccatgctgcagtgggtgcgtccgcgcccagtgctccaaccgcgcaccctcagcccaggcctccacagggcccattggccctgcctgggccttcatatgcggggaactctccacttattggccgaataagcttcattagggagagacctagtccctgcaatgggcgaaagatccgggtccttcgacagaagtcagatcatggggcctattcacaatccccagccataaaaaaacagcttgatcgccacctccctagtccacccacactcgattccattataacggaatatctgagagaacagcacgccaggtgcaagaatcccgtagcgacttgtcctccattctccttatttaccccccatcagtgccccgagccaaagcagagaagacaggccccaatcaatttcactagtcggctgaatagacgcgcttcctttccaaagtatggtggggtggatggcggctgcttcgataggcacctcattttttcgaggtttaggccaatttcagttttccgggaggcaaatgaggacgaatctggcttcacttgctgtgcattctcagcccgggagagatttctgatgctaggtacttgcactggccagctcaagctctacaacgtgtttagcggacaggaagaggcttcctacaattgccacaattccgctatcactcatcttgagccatctagagacggcagtctgctccttacttcagccacttggagtcaaccactctcggcgctgtggggtatgaagagcgtgttcgacatgaagcattcattcacagaagaccactacgtggagttcagcaaacactcccaagatcgagtgatcggaactaagggcgatatcgcacatatctacgatatccagaccgggaataagcttcttactttgttcaaccccgatcttgccaataattataagcgcaattgcgcaacttttaaccctaccgatgatctggttcttaacgacggggtgctgtgggacgttcggagcgcccaagcaattcataaatttgataaattcaatatgaacatatctggcgttttccatcccaatggattggaggtgataattaacacagaaatttgggacctacgtactttccatctgttgcacaccgtacccgctctggatcagtgccgggtggtgtttaaccataccggcacggtgatgtatggggcaatgctccaggccgacgacgaagatgatcttatggaggaacggatgaaatctccttttggaagctctttccgtactttcaatgcaacagattacaagcccatcgcaactattgatgtgaaacgtaatatctttgatttgtgcaccgatactaaggactgctacctggccgttattgaaaatcaaggaagcatggatgccttgaacatggatacggtctgcaggctgtacgaagtgggacgccagcgcctggccgaagatgaagacgaagaagaggaccaggaggaggaagaacaggaagaagaagatgatgacgaggatgacgacgacactgacgatttggatgaattagatactgaccagctcctcgaggcagagcttgaagaggatgataataacgagaacgcaggggaggatggagataacgatttttctccctctgacgaggagctggcaaatctgcttgaagagggggaggacggtgaggatgaagattctgatgctgatgaggaggtggagcttatcctgggtgacaccgatagtagcgacaactctgacctggaggatgacataattctctcactcaatgagtag

SEQ ID NO: 16505 - DNA, 447 bp, synthetic construct
  source 1..447: mol_type = other DNA; note = Synthetic coding sequence
atgctcagtgacggctgcggcagcgaagaaaagatctccgtgccctcgtgttacgggggcataggcgccccggtgtctaggcaggtgccagccagtcacgattcagaactgatggccttcatgacaagaaaactgtgggaccttgaacagcaagtcaaagcccagactgatgagatcctgagcaaggatcagaaaattgccgcactggaggacttggtgcaaaccttacgcccccaccctgccgaggcaaccctccagcgacaggaggaactggaaaccatgtgtgtccagcttcagagacaagttagggaaatggagcggttcctttctgattatggcctgcagtgggtgggcgagcctatggaccaggaggatagtgagtcaaagaccgtgtcagagcatggagagagggactggatgaccgcgaaaaagttttggaagccctag

SEQ ID NO: 16506 - DNA, 1755 bp, synthetic construct
  source 1..1755: mol_type = other DNA; note = Synthetic coding sequence
atgtcgctgccaccagaaaaggccagcgagctgaagcaactgattcaccaacaactgtctaaaatggacgtgcacggtcggattcgcgagatcttggcagagactattcgggaggaattagcgcctgatcagcagcatcttagtaccgaggacctgataaaagcccttaggagacgagggatcatcgacgacgtcatgaaagaattaaacttcgtgacagatagcgtagagcaggagctgccctccagccctaaacagccaatctgctttgaccgtcagtctaccctgaaaaagtccgatggaacacgcatggctgactctaccactatgttatctatctctgaccccatccacatggtgctcatcaaaaccgatatatttggcgagacgactctggtggctagctacttcctggagtggagaagcgtgctgggcagcgaaaacggggtcacctccctaaccgtggagctcatgggtgtaggcacagagtcaaaagtgagtgtgggaatattgaatatcaagctagagatgtaccctccgctgaatcagacattgtcccaggaggtggtgaacacacaacttgcactggagaggcagaagaccgcagagaaggaacggctgttcctggtctatgccaaacagtggtggagagagtacctgcaaattagaccttcccacaatagtaggctggtgaagatcttcgcccaggatgagaatgggattaacagaccggtatgcagctatgtcaagcccctacgcgcgggtagactgctagacacacctagacaggccgcccgcttcgttaatgtcttaggatatgagcgggcccccgtaattggaggaggaggcaagcaggaacagtggtgcaccttgctggctttcttgtgtaggaacaaaggagactgcgaggatcatgccaacctattgtgttcactgctcctggggtatgggttggaagcgttcgtctgcgtcggtacaaaagcgaaaggcgtcccccacgcgtgggtcatgacctgcggaaccgatggtgccatcactttctgggaaagcctaaccggccatcgatatatccataaacctactaacccagatgagccccctgtggcagagcagccaaaaccactgtacccgtaccgcacaatcgggtgcgttttcaaccaccaaatgttcctgggcaactgccagccatccgacgctgttgaaacttgcgtgttcgatctaaacgacgagtctaagtggaaacctatgagcgaagaagcaatcaaaagtgtttgcgctccgggagcgaccacatctctacctccttttcctccgctgtgcgcgtcaaccattgacgctagcgtgacatctaatgaaatcgagatgcagctgaggctcctcgtgagtgagcatcggaaggatctgggtctcacgaccgtgtgggaggaccagctgtcataccttctatccccagctttggcttcatatgagtttgaaaggaccacctcgattagcgctggcaatgaggaatttcaagatgctatcagacgggccgtgccggatggacataccttcaagggcttccccatccacttcgtttacaggaacgcccgtagagctttcgcaacttgcttgcgctctccattttgcgaagagataatctgctgtcggggcgaccaagtgcgactggcagttagagtgagggtcttcacctacccagaatccgcctgtgctgtctggattatgtttgcttgtaagtatagaagtgtgttatag

SEQ ID NO: 16507 - DNA, 4515 bp, synthetic construct
  source 1..4515: mol_type = other DNA; note = Synthetic coding sequence
atggtgtcagagagcgatttttccaaggacgtggcagtgcaagtgctgcctttagataaaattgaggagaataacaagcagaaagctaatgacattttcatatcacagtacaccatgggtcagaaggatgccctgagaaccgtactgaaacaaaacgtgagtctgtgtctgactgggtggtccgaccattctggcgtcatcactacccactgctcactctatttgcttcgcctgatgagatctagccacttgtcgttgccatccagctgggactatcgggctcagtctatgcccgtgtttaaggaggtaaaagtgcatctgctggaagacgcagggattgaaaaggatgccgttacgcaggagacccgcatcagccccagcggaattgattccgcgaccaccgtggctgctgccaccgccgccgccattgcaactgccgccccgctgatcaaggtccagtcagatcttgaagccaaggttaatagtgtaacggaactgttgtccaagttacaggaaacagacaaacacctccagcgggtaactgagcagcaaaccagtattcagagaaagcaggaaaagttgcattgccacgatcacgagaagcaaatgaacgtgtttatggagcaacacataaggcaccttgagaaactccagcagcagcaaattgatatccagacccacttcataagtgcagccctgaagactagtagcttccagcccgtcagtatgccatcatcaagggccgtggagaagtactctgtgaaaccagagcatcccaatctcggctcatgtaacccatctctgtataatacattcgcttctaaacaggcaccactgaaggaagtggaggacacatccttcgataagcagaagtctccgcttgaaactcccgcaccacgtagattcgcccctgtaccagttagccgagacgacgagttatctaaacgagaaaatctcctggaggagaaggagaacatggaagttagctgtcatagaggaaatgtgcgcttgctcgagcagatactgaataataacgattctctgacccggaaaagtgaaagctcgaacacaacaagtcttactagatccaagattggatggacccctgagaagacaaaccgatttcctagctgtgaagagctggagaccacaaaagtgacgatgcaaaagagcgacgatgtccttcatgacctgggacagaaagagaaggagacgaatagcatggtacaacctaaggagtctctgagtatgctcaagttgcctgatctgccccagaacagcgtgaaactgcaaactaccaacacaacgcgaagcgtccttaaggacgcagagaagattcttcgaggggtccagaacaataagaaggttttggaggaaaatctcgaggccatcatccgtgcaaaggacggagcggcaatgtattctctgattaacgcactgtccaccaaccgtgaaatgtccgaaaagataagaattaggaagaccgtcgatgagtggatcaagaccatcagtgctgaaattcaggatgagctgtcccgcaccgactacgaacagaagagattcgatcagaagaaccagagaaccaaaaaggggcagaacatgactaaagatatccgaaccaacacccaagataagaccgtgaacaagtctgtgataccacggaaacattcccagaaacaaattgaagagcactttcgcaacctacccatgaggggtatgcctgcatcttctctgcagaaagaaaggaaagaaggcctcctaaaagctaccactgtcattcaagatgaggactatatgctccaggtgtatggtaagcctgtgtaccagggacatagatctaccctcaagaaaggcccatacctgcgctttaactcgccttcccctaagtctcggcctcaaaggccgaaggtgatcgagagagtcaaagggaccaaggtcaagtctatacgaactcagaccgacttctatgcgactaagccaaaaaagatggactccaaaatgaagcattcagtgcccgtgttaccccatggcgatcagcaatatctattttcaccctcccgggaaatgccaactttttcgggcacccttgaaggacatctgatccctatggccatccttctgggacaaacccagagcaattccgacaccatgcctcccgctggagtcatagtgagtaagccgcaccccgttactgtgacgacaagcattcctccttcctcgagaaaggtggagacaggagttaagaaacctaatatcgccatagtggagatgaaatctgagaaaaaagaccccccccagctgacagtgcaggtcctgccctctgtagatatcgactccatctcaaattcaagtgccgatgttctttctcccctcagttctccaaaggaagcgtcgctccctccagtccagacctggattaaaactcctgaaatcatgaaggtggacgaagaggaggttaagttcccaggcacaaactttgatgagattatagacgtgatccaggaagaggaaaaatgcgatgaaatccccgacagcgagccaatcctggagtttaatcgcagtgtcaaggcagatagcacaaaatataatggccccccatttccgccagtcgcatctacgtttcagcccaccgccgacatcctcgataaggttattgagcgcaaagaaacactggaaaatagtctgatccaatgggttgagcaagaaataatgagcaggatcattagtggacttttccccgtgcaacagcagatcgcaccttctattagcgtgtctgtttctgagactagtgagccgctgacctctgatattgttgagggcactagctctggagcactgcaactcttcgtggatgcgggggtccccgtgaactctaacgtgatcaaacacttcgtgaatgaagccctagcagaaacaatcgcagtgatgctgggggatcgcgaagctaagaaacagggaccagtagcaacaggcgtcagcggcgacgccagcacaaatgagacctaccttcccgcccgagtgtgtaccccacttccaacacctcagcccacccccccttgcagcccctctagtccggccaaggagtgtgtgttagtaaagacgccagacagcagcccttgtgattcggatcacgacatggctttccccgtgaaggaaatttgtgccgaaaagggcgatgacatgccagctataatgttggtaaatacccccacagttacccccacaaccacccccccaccagccgctgccgtgttcactcccaccctttccgatatctctatagataaactgaaggtgagcagtccggaactgccgaagccatggggcgatggagacctccctttagaagaggaaaaccctaacagcccccaggaagagcttcatccacgggccatagttatgagcgtcgcgaaagatgaggagcctgaatccatggactttccagcccagcctcctcccccggagccagtacccttcatgccatttcccgccgggacgaaggcaccaagcccctcccagatgccgggctccgatagttctacactcgagtccaccctctctgtgacagtgaccgaaaccgaaacactggacaaacctatctcagagggagagattctgtttagctgcggacagaagcttgccccgaaaatcctcgaagatatcggcctgtacctcacaaatctcaacgattcactcagtagcaccctccacgatgccgtggaaatggaagacgatccacctagtgaaggacaggttattaggatgagccacaagaaattccatgccgacgctatcctatcctttgccaaacagaatcaggagagtgccgtcagccagcaggcggtttaccactccgaagatctggaaaatagcgttggagaactctctgagggccagaggccccagctaaccgctgcagctgagaacatcctaatgggtcactccctgtatatgcagcccccggtcacaaacacccagtctctagatcagcaatgcgatccgaagccccttagtcgccaattcgacacagtgtcaggcagcatatacgaagatagttgtgcatctcatggacctatgtcattaggtgagttagagctcgaacccaatagcaagctggttcttcctaccacattgttaaccgctcaggagaacgacgtgaacctaccagtcgctgccgaggatttttcccagtaccagcttaagcagaaccaagatgtgaagcaagtggaacacaaaccgtcccagtcctacctgagagtcagaaacaagagtgatatcgcacccagccagcagcaggtgtcacccggagacatggatcgaacgcagatcgagctgaacccctatctgacttgtgtctttagcggtgggaaggccgtcccactgtcagcttcccagatgccaccggccaagatgtccgtcatgcttcccagcgtgaatctcgaggattgctcccaatctttgagtcttagcacgatgcaagaggatatggaaagtagtggcgccgacaccttctag

SEQ ID NO: 16508 - DNA, 2271 bp, synthetic construct
  source 1..2271: mol_type = other DNA; note = Synthetic coding sequence
atggtggcaccggtgctggaaacgagccatgtgttctgttgcccgaaccgcgtgcgaggcgtgctgaactggtcttcagggcccaggggactacttgccttcggaacttcctgcagcgtggttctctacgaccccctgaagagagttgtggtcactaaccttaacggccataccgcacgagtgaattgcatccagtggatatgtaagcaggacgggtcgccctccacagagttggtttccggcggctcagacaaccaggttattcactgggaaatagaggataaccagctgctgaaagctgtgcacttacaggggcacgaggggccagtctatgctgtccacgccgtctaccaaagacggactagtgatcccgccctctgcacactcattgtcagtgccgccgcggactccgccgtccgtctctggtctaaaaaagggcccgaaggaagagatttattcctggccagctgttcccaagattgtctaatcagaatttggaagttgtatattaaatctacctcgttggagacccaggatgacgacaatatacgactgaaagaaaatacgttcaccattgagaatgaaagtgtgaagatagcattcgccgtgaccttggaaaccgtcctggccggacacgagaactgggtcaatgccgttcactggcagccagttttctacaaagacggcgtacttcaacagccagtgcgtttgttgtctgcctccatggacaagacaatgatcctatgggccccggacgaagaatccggcgtgtggcttgagcaggtgcgtgtgggagaggtcgggggaaacaccttaggattctatgactgccaatttaacgaagatggctcaatgatcattgcacacgcattccatggggcactgcacctgtggaagcaaaacacggtcaatcctcgggagtggacacctgagattgtgatttctggacatttcgacggcgttcaggatctcgtttgggatcctgagggagagttcatcataacggtgggtactgaccagacgacccgcctgtttgctccgtggaagagaaaagatcagtcccaggtgacatggcatgagatcgctcgtccacagatacatgggtacgacctgaagtgtctggctatgataaacagattccaatttgtgagcggcgcagatgaaaaggttttacgggtgttcagcgctcccaggaacttcgtggagaatttttgcgcaataaccggccagtctctgaatcatgtgctctgcaaccaggactcagacctcccagagggagccacggtacccgcgctggggctgagtaataaggccgtgttccagggtgatattgcatcacagccttcagatgaggaggagctgcttacctcgactggcttcgagtatcagcaggttgccttccagccttccattcttacagaacctcccacggaggatcacctgttacaaaataccctctggcctgaggtgcagaaactatatggtcacggttatgagatcttctgtgtgacatgcaattccagtaagaccttgctggcctccgcatgtaaggcggccaagaaagaacacgctgctatcatcctatggaacacgacctcatggaagcaagtccaaaatcttgtgtttcactctcttaccgtgacccaaatggcgttttcccctaatgagaaatttctactggctgtgtcccgggatcgcacctggtcactctggaagaaacaggacacaatctcgccggaattcgagccggttttcagcctgtttgccttcaccaataagatcacctctgtacactctagaattatctggagctgtgactggagcccagattcaaagtatttctttacaggatcgcgcgacaagaaagtggttgtgtggggcgagtgtgatagcactgacgactgcattgagcataacatcggtccctgctcatcagttttggacgtgggcggcgctgtgacagctgtgtccgtgtgtcccgttctgcacccaagccagcgctacgttgtcgccgttggcttggagtgcgggaagatttgtctgtatacttggaagaagaccgaccaggtgcccgagataaatgactggacccactgcgtcgaaacctcccagagccagagtcatacactcgcaatcagaaaactctgctggaagaattgttcaggaaagacagaacagaaagaggccgaaggcgcggaatggcttcacttcgccagctgtggtgaggaccatacggtgaagatccatagagtgaataaatgcgctctctag

SEQ ID NO: 16509 - DNA, 345 bp, synthetic construct
  source 1..345: mol_type = other DNA; note = Synthetic coding sequence
atgcaagagattaaccaaaacctggccgaggaggcaggattaaatatcacacacatttgtctgccccctgacagctccgaagccgagattatcgatgagatcctgaaaattaacgaggataccagggttcatggtctcgctctccagatttcagagaatctgttctccaataaggtgttgaacgccctgaaacccgagaaggacgtagacggggtgactgatatcaatcttggtaagctggtccggggcgacgctcacgagtgtttcgtgtcgcctgttgccaaggccgtgattgagctcctggagaagagcggggtcaatttggatgggaagaaaatcctgtag

SEQ ID NO: 16510 - DNA, 747 bp, synthetic construct
  source 1..747: mol_type = other DNA; note = Synthetic coding sequence
atggccactagcgctcctctgcgatctctcgaagaggaggtgacctgctctatatgtcttgactacctccgggacccagtcactattgattgtgggcacgtgttttgtaggtcctgcacgacagatgtgaggccaattagcggttctaggccggtttgtcccttgtgcaaaaagccgttcaaaaaggaaaacatccgccctgtttggcagcttgcctctttggtggaaaatatcgagcgtcttaaggttgataaagggcgccaaccaggtgaggtcacacgagaacagcaggatgcaaagctgtgtgagagacatagggaaaagctccactactactgcgaggacgatggcaagctactctgcgtgatgtgtcgagaatctcgcgagcatcggccacacaccgctgtcctcatggaaaaggcagcccagccacatagggaaaagatcctgaaccatctgagtactctccggcgagatcgcgataagatccagggctttcaggctaaaggagaggcagatatcttagctgccctaaaaaagctgcaggatcagcgacagtatatagttgctgagttcgaacaggggcatcagtttttaagggagcgagaagagcatttgcttgagcagttggctaagctggagcaggagcttactgagggaagagaaaaattcaaatctagaggtgttggcgagctggcccgcttggcgctagttatctcagaattagagggcaaagcccagcagtag

SEQ ID NO: 16511 - DNA, 1461 bp, synthetic construct
  source 1..1461: mol_type = other DNA; note = Synthetic coding sequence
atgacatgcggatcctattgcggtggtcgcgcattttcctgcataagtgcgtgtggccctaggcctgggcgatgctgtatcactgccgccccttaccggggaatcagctgctaccgcgggctgacaggtgggttcggctcccacagcgtctgcggtggatttagggcaggatcctgcggccgctcattcggatataggtccgggggcgtttgcggcccttcacccccctgcattacaacggtttcagtgaacgagtcattacttacccctctgaacctggaaatcgaccccaatgcacagtgcgtgaagcaggaagagaaggaacagattaaatcgctaaacagtcgttttgccgccttcatcgacaaggtccgctttttagagcagcagaacaagctgctggagacgaaactgcagttttaccaaaaccgcgagtgctgtcagagtaatctcgagccactgtttgagggctacattgaaactttgcgcagagaggctgaatgtgtggaggccgattccgggcggctggcgagtgaattgaaccatgttcaggaagtgttggagggatataagaaaaaatatgaagaagaggtgtctctgcgagccacagcagagaacgaattcgtggcattgaaaaaagatgtggattgcgcgtacctgcgaaagagcgatttggaagctaatgtggaagcactgatccaggagattgatttcttgagacgactgtacgaggaggagatccgtgtactgcagtcacatattagcgatacttcagtcgtggttaaacttgacaactcgcgcgacctaaatatggactgcatcatagcagagatcaaagctcagtacgacgacattgtcacgaggtcccgtgcagaggccgaatcctggtacagatccaagtgtgaagagatgaaggctacagtgatccgtcacggtgaaacgctcaggcggacaaaggaggagattaacgaactgaaccgtatgatccagaggctcaccgcggaggtcgaaaatgcaaagtgccaaaattccaagctcgaagccgccgtggcccaatcggagcagcaaggggaggctgctctgtctgacgcccgctgcaagctggcagaactggaaggtgctctacagaaagccaagcaggacatggcctgtcttattagggagtatcaggaagtgatgaattcaaagctgggattagatatcgaaatcgccacatacagacgcctcctggagggcgaggagcagaggctgtgtgagggagtcggctctgtgaatgtgtgtgtgtcttctagccgaggcggagtggtctgtggagacctctgcgcctctactacagcacctgtagtttccacccgggtgtcatcagtgccaagcaactctaacgttgtggtaggcaccactaatgcatgcgccccctcagcacgcgtcggagtctgcgggggctcatgcaaaaggtgttag

SEQ ID NO: 16512 - DNA, 1710 bp, synthetic construct
  source 1..1710: mol_type = other DNA; note = Synthetic coding sequence
atggcactgttgtctgaagggctggatgaagttcctgcagcctgcttgtctccttgcggtcctcccaatcctactgagctcttctccgaatccaggcgcctggctctcgaagagctggtggccggcggtccagaggcattcgcagcctttctacgtcgcgaaagattggcacgattcctaaatcccgatgaggtccatgcgatcctgcgcgcagccgagagaccaggagaagagggagccgctgccgctgcggccgcagaagactccttcggtagctctcacgattgctcttccggaacgtactttcctgagcagtcagacctcgagcccccgttgttagagttaggctggccagccttctatcaaggggccggcgagggcggcccgtatggctgcaaggacgcactacgccagcagctccgctcagcacgggaggtgattgcggtggtcatggacgtcttcactgatattgacatctttagggatttgcaagaaatatgccgcaagcagggcgtggctgtgtacatcctcctcgatcaggcgcttctgtctcagttcttggatatgtgtatggacctgaaagtgcatcctgaacaggagaaactcatgaccgtgaggactattaccgggaacatttattacgctcgctcagggaccaagatcatcggcaaggttcacgaaaaattcaccctgatcgatggtattcgcgtggcaaccggatcttactcattcacatggaccgatggcaagcttaattcatccaatctggtcattctgtccggccaggtagttgaacacttcgatctggaatttcgcatcctgtacgctcagtcaaaacccattagtcccaagctccttagccactttcagtcatccaacaaattcgatcacctgacaaatcgaaagcctcagagcaaagaacttaccctgggcaacttgcttcgtatgaggctcgcacgtctgagctccacaccacggaaagctgatctcgatcctgagatgcctgccgagggaaaagcggagcgtaagccacatgactgtgagagcagcaccgtgtcggaggaagattattttagtagccacagggacgagttgcagtccaggaaagcaatcgacgctgcaacacagacagagccaggggaagagatgccagggctgtcggtgagtgaggttggaacccagacatctatcactacagcttgtgccggaacccagactgctgtgatcaccaggatagcttcaagtcagactaccatctggtcacggtcaaccaccacacagaccgacatggacgaaaatatcctatttccgagaggtactcaaagcacagaaggttcgcctgtttccaaaatgtccgtgtctcgcagtagtagccttaagtcttcatccagcgtgtcctctcagggctctgttgcctcttcgaccgggagcccggctagcatccgcacgacagatttccataatcccggttatcctaagtacttgggcaccccccatctagaattatatctgtctgactccctgcggaatttgaacaaagagcgtcaatttcattttgcaggaatccgttcccggctgaaccacatgctggctatgctgtcacgccgaacgctatttaccgaaaatcacctcggactgcactcggggaacttcagcagagtgaacctcttggcagtgcgggatgtggcattgtatccttcctatcagtag

SEQ ID NO: 16513 - DNA, 1224 bp, synthetic construct
  source 1..1224: mol_type = other DNA; note = Synthetic coding sequence
atggttctgttctctgatagtagccttccccattggcagcagcaaccaccacagcccgcgccaccccctcccttgttccccagacagcaacaggtccaggtgaacaaaggccgagtgaactgtcaccctagatgcaggtatatcaagacgaagccctgccatcagctgtcccatcaagtctgggtgcagcagaagccgtcacacagattgctctcactgcagttgtcccctagcccgaagccttcaccgagtcctcagttgtctctcaagtttcgtctgagcctcaaattccgccccaagcagctgttccatcctatgtccttgctgaagcataatccccctacccacagtcaccctagccctaagctgcagcagtcccaacctcagtctaatgttcagggacagtcacccgtgagagttcagtccccctctcagacacggattcggccatccacaccctcccagctgtccccaggccagcagagtcaggtgcagaccacaacgtcccagccaatcccgatacagccccacacatccctgcaaattccaagtcagggccagcctcaaagccagccccaagtggtaatgaaacataacgctgtgatcgaacatctgaaacagaaaaagagtatgacaccagccgaaagagaggagaatcagagaatgatcgtttgcaaccaggtaatgaagtacattctagacaagatagataaggaagagaaacaggccgcaaaaaaacgtaaaagggaggaatccgtggagcagaaacgatccaagcagaatgctacgaagctgtcagccttgttgttcaaacataaggagcaactaagagcggagattctcaaaaagagggccctgttagataaagacctgcagatagaagtacaggaggaactaaagagggacctgaagatcaagaaggaaaaggacctgatgcagcttgcccaagcaaccgcagtcgccgccccatgcccacctgttaccccggctccgccggccccccccgcccctcccccttcccctccaccgccgcctgccgtgcaacacacagggctcttatccacccctactctgccagctgccagccaaaaaaggaagcgtgaagaagaaaaggatagcagctccaagagcaaaaagaaaaaaatgatcagtacaaccagtaaagaaacaaaaaaagacaccaaactatactgtatatgcaagacaccctatgacgaatcctag

SEQ ID NO: 16514 - DNA, 480 bp, synthetic construct
  source 1..480: mol_type = other DNA; note = Synthetic coding sequence
atggccactagtgcaccgctgagaagcttggaggaagaggtcacatgttcaatctgcttggactatctcagggaccctgtcaccatagattgcggccatgtattctgcaggtcctgtacaactgacgtgcggcccatttctggttcaagacctgtctgcccgctatgcaaaaagccatttaaaaaagaaaatattcgacctgtttggcaattggaaaagatccttaaccatctgtcaacgctcagacgtgatagggataaaatccaaggctttcaagccaaaggcgaggctgacattctggccgcacttaagaaactgcaggaccagcggcagtatatcgttgctgaatttgagcagggccaccagttcctgcgtgaacgggaagagcatttgctcgagcagctggcaaagttagagcaggaattgacagagggaagggagaaatttaaaagcagaggcgtgggggaactagcgcgttag

SEQ ID NO: 16515 - DNA, 309 bp, synthetic construct
  source 1..309: mol_type = other DNA; note = Synthetic coding sequence
atgaacgaggcagagattgtagatgttgcactagggattctgatagaatccagaaaacaggaaaaggcttgcgaacagcccgccctggcaggagccgacaaccctgagcacagtccaccctgcagcgtctcaccacacactagcagtggctcatcatctgaggaggaagactctggcaagcaagcccttgccccaggactgtcgcccagccaacggccgggggggtctagtagcgcgtgctctagatcccctgaagaggaggaagaggaagatgtgttgaaatatgtgagagagattttcttttcgtag

SEQ ID NO: 16516 - DNA, 345 bp, synthetic construct
  source 1..345: mol_type = other DNA; note = Synthetic coding sequence
atgcagttcggcgaactgcttgccgctgtgcggaaggcccaggccaacgttatgcttttcctggaggagaaggaacaggccgccctgtctcaggcaaacggcataaaggcacatctcgaataccggagcgctgaaatggaaaaaagcaaacaagagttagaaactatggcagctatttctaatacagttcagttcctggaaaggtctatgacaagcgaactcaagtgcttgcccctgttcagcgcgaacatcgggcttccaaacctgtcccctgccccagggaatagctctagcaatatgtgtatgacgagcaggtctacaagaacccagcataccagcatctag

SEQ ID NO: 16517 - DNA, 579 bp, synthetic construct
  source 1..579: mol_type = other DNA; note = Synthetic coding sequence
atggctcctaagccaggtgcagagtggagcaccgccctctcccatttggtgctgggcgtggtgtcactccatgcggctgtgtcgactgcagaggcatcgaggggggccgcggcgggtttccttctgcaagtactcgccgccactacgaccctggcccccgggttatcaacccatgaggactgcctggccggcgcttgggttgccacagtaattggactgcccctattggctttcgatttccactgggtgaatggggatcgatcatctgcgaatctcttactaggcggtgggatggttctagctgtcgccggcggccatcttggccctgaaggtcgatccgtggcgggtcaggctatgctacttgtggtcgcagtaacaatcctcatagttgctgtcttcacagccaacacctacggtatgtggggaggggccatgctcggagtcgccggactcctgtccagactggaggaggataggctgctgctgctgcctaaagaagatgtttgtcgctgggccctagctgtgggaagctgggcatactgccgagctctgcacacacagcggctccaatgggagtag

SEQ ID NO: 16518 - DNA, 888 bp, synthetic construct
  source 1..888: mol_type = other DNA; note = Synthetic coding sequence
atgaaacagtacggactcggcccaaatggaggaatcgttacatccctgaatctgtttgccactcgcttcgatcaggttatgaaattcatcgaaaaggcccaaaacatgtccaaatatgtccttatcgacactcccggccaaatcgaagtgtttacttggtctgcatcaggcaccatcatcacagaggccttggcctcttcctttccaacagtagtgatatacgtcatggataccagtcgaagcaccaaccctgtgacatttatgtccaacatgctgtatgcatgtagcattctctataaaaccaagctgccattcatagtggttatgaataagactgatatcatcgaccactcatttgctgttgaatggatgcaggatttcgaggcttttcaggatgctctgaatcaggaaacaacctacgtctctaacctaactaggagcatgagcctggtgctcgatgagttctactccagcttgcgagtggtgggagtgagtgcggtacttgggactgggctggatgagttgtttgtgcaggtaactagtgcggctgaggaatatgagcgcgagtaccgccccgaatatgaaaggctgaagaagtctctggcaaacgctgagagtcaacaacaacgggagcagctcgaacgcttgcgaaaggacatggggtcagtggcactcgacgccggaacagcaaaggactcactgagcccagtgctgcatccgagtgacctcatcctcacacgagggacgctcgatgaggaagatgaggaggccgactcagataccgacgatatcgaccatcgtgtcacagaagagagtcacgaggaacccgcctttcagaatttcatgcaggagtcgatggctcaatattggaagagaaataacaaatag

SEQ ID NO: 16519 - DNA, 1212 bp, synthetic construct
  source 1..1212: mol_type = other DNA; note = Synthetic coding sequence
atgccttctgctgaggcaaagctcaagaagaataggtgcgcgaactgttttgattgtcctggatgcatgcataccctttccacacgtgcgacctccatttcgactcagcttccagacgacccagcaaagacgaccatgaagaaggcctactatttggcctgcggattctgcagatggacaagcagggatgtcggtatggcagataaaagcgttgcatcaggtggctggcaggaaccggaaaacccccatacacagcgcatgaacaaactgattgaatattaccagcagctcgcccaaaaagaaaaagtcgagagagatcgcaaaaagctggcccgacggcgcaactacatgccactggccttttccgataaatatggcctgggcactcgactccaacgtcctagggccggtgcctctattagtacgttggcggggctgtctctgaaggagggcgaagatcagaaagaaatcaaaattgaacctgcccaggctgtggatgaagtcgagccgctgcctgaagactattacaccagacctgtaaacttaaccgaggttacaaccttgcagcaaagactcttgcagcccgactttcaaccagtgtgtgcgtcacaactctacccgcgccacaaacatctgctgatcaaacgttccttgcgttgccgaaagtgcgagcacaacctgtccaaaccggagttcaacccgacctcaattaagtttaagatccagctcgtggccgttaattacatccctgaggttcgtattatgtctatacccaacttacgctatatgaaagaatcacaagttttgttgaccctgacaaaccctgtggaaaacttaacccacgtgacactgttcgagtgcgaggaaggcgatcccgacgacattaatagtactgcaaaagtggtcgtccctcctaaggaattggtgctcgccggcaaagatgccgccgccgaatacgacgaacttgccgaacctcaggactttcaagatgaccccgacattatagcattccgcaaggctaataaggtgggtatctttatcaaggtcactcctcagagagaggagggggaggtgaccgtgtgcttcaaaatgaagcacgacttcaagaatctcgcagcccctattagaccgattgaggagagtgatcagggcacagaggtgatctggctgacacagcacgtcgagctgtctctgggtccacttctgccctag

SEQ ID NO: 16520 - DNA, 1674 bp, synthetic construct
  source 1..1674: mol_type = other DNA; note = Synthetic coding sequence
atggatcagtctcgagtactgctatgggtgaaggcggagccatttatcgtcggggctctccaagtaccccctccatctaaattctcactccactacttgcgcaagatttccacctacgtccagatcagagcaactgagggtgcttaccctagattgtactggtccacttggcgtcacattgcttgtggtaagctgcaactcgcgaaggacctcgcctggttgtattttgagattttcgattcactgtccatgaagacaccagaggaacgtctggagtggagcgaagtgctaagtaactgcatgagcgaggaagaggttgagaagcagcggaatcagcttagtgttgacaccctgcagttcttactgtttttgtacattcagcaactcaacaaagtgagtctccgcaccagtcttatcggcgaggagtggccctctccaagaaataagtcacaatcacctgacctcactgaaaagagcaactgccacaacaagaactggaatgactactctcaccaggctttcgtgtacgatcatctgagcgatctgctggagctcctcctggatcccaaacagctgacggcttctttccactccacacacagttccctggtcagcagagaggctgtcgtggccttatcctttctgattgaaggaaccattagtcgggcccggaagatctaccctctgcacgagctggccttatggcaaccactgcatgccgactctggattctcaaaaatttccaaaactttttcgttctataagctagagacttggctgcgttcctgtctcactggcaacccctttggtaccagtgcctgtctaaagtctggcaagaagttggcatgggcacaccaggtggagggcaccactaaaagggccaagattgcctgtaacacgcacgttgcccccagaatgcacagactggttgtaatgtcccaagtctataaacagacacttgccaagtctagtgacaccctagcaggcgcccacgtaaaaatccacagatgcaacgagtccttcatatatctcctaagtccactgagaagcgttaccatcgaaaaatgcaggaactcaattttcgtcctgggacctgtgggaactacactgcacctgcattcttgtgataatgtcaaagtaatagcagtgtgtcaccgcttgtcaatctcgagtactacagggtgcatttttcacgtgttaaccccaacccgacctctgattctatctggtaatcagaccgtaacattcgcacctttccatactcactaccccatgctggaagaccatatggctaggactggcttagcgacagttcctaactactgggataatcctatggtagtgtgcagggagaactcggacacacgggtgtttcagcttctgcctccttgcgagttttatgtgtttatcatccctttcgagatggagggcgataccactgagatcccgggaggcctgccttcagtataccagaaggctctcggtcaacgagaacagaaaattcagatttggcaaaagacggtgaaggaggcccacctaaccaaagaccagaggaagcaattccaggtattggtggagaataagttttatgaatggctgataaataccggccacagacaacagttggactctcttgtgcctcctgccgctgggtccaagcaggccgccggttag

SEQ ID NO: 16521 - DNA, 462 bp, synthetic construct
  source 1..462: mol_type = other DNA; note = Synthetic coding sequence
atggccgaacaggagcagagaaaaatcccactggtgcctgaaaatctattgaagaaaagaaaggcctatcaggccctgaaggcaactcaggctaaacaggcactgctggctaagaaggagcagaaaaagggcaaggggctccgcttcaaacgactcgaaagctttctccacgattcctggcgacagaagagagacaaggtgcgcttgagacgcctcgaggtaaaacctcacgccctggaattgcccgataagcacagccttgctttcgtcgtccggatcgaacgcatcgatggagtctcactgctcgtgcagcgcaccatagccagactaagactgaaaaagattttctctggagtgtttgtgaaggtcacgccccagaacctgaagatgctcaggattgtcgaaccctacgttacgtggggggaggtctggcgacacctgctcggaaggccccacagttag

SEQ ID NO: 16522 - DNA, 2070 bp, synthetic construct
  source 1..2070: mol_type = other DNA; note = Synthetic coding sequence
atgatagactcggttaaactccggcgggattccgcagctgacttcttttcacattacgaatacctctgtgcgctgcaaaactctgtaccattacccgccgttcgggcatgcctacgagaaggcgtgctcgactttaacgctgacaggctgcggggagttgattgggccccgttactgtctactttgaaaatcaacaaagatctccccctggtctccattaagagtttttttcaaccctggttaggggacacgggaagtgacatgaacaagttctgtcgctctagggtgccggctatcagatataaggacgtgaccttccaactttgcaaagctcttaagggatgcctctccatatcatccgtgctcaaaaatctggagctcaatggacttatactgcgggagcgtgatctgactatccttgctaagggcctgaataaaagtgcttctttggtccaccttagtctagctaactgcccaattggggacggcggcttggagatcatctgtcagggcattaagagctcaataactctaaagaccgttaattttaccggctgcaatttgacctggcaaggagccgaccacatggccaaaatattaaagtaccaaactatgaggcgacacgaggagacatgggccgagtctctgcgctacaggaggcccgacctggattgtatggcgggactaagaagaatcacgttgaattgtaacactctgatcggcgaccttggcgcgtgcgccttcgccgattcacttagtgaagacctatggctcagagcacttgatctccaacagtgcggcctaacaaacgagggggccaaggctctgctcgaggccctggaaactaataccacacttgtcgtcctcgatatccggaagaaccccctgattgatcattccatgatgaaggcagtgatcaaaaaagtgctgcaaaacggaagatccgcaaaaagcgagtatcagtggattacgtcaccctctgtgaaggaacccagcaagacagccaagcagaaacggcgcactattatcctgggctccggacacaagggcaaggcaaccatcagaattggactagcgacgaagaagcccgtctctagcgggcgcaagcactcactaggcaaagaatactacgcccccgctcccctgccgccaggggtatccggattcttgccctggcgcactgcagagcgtgcaaaacggcataggggctttcctctgattaagaccagggacatatgcaaccaactccagcagccaggtttccctgtgactgtaactgtggaaagcccatcctcttccgaggtggaagaagtggacgattccagcgaatcagttcacgaagttccggagaaaaccagtattgagcaggaggctctgcaagaaaagttggaagagtgtctgaaacagctcaaggaggagagagtaataagattgaaggtcgataagagggtgagcgagcttgagcatgaaaacgcacaactacgcaatatcaacttctcactgtctgaggccctgcacgcccagagcctgactaatatgatcctcgacgacgaaggcgtcctaggatccattgaaaacagttttcagaagtttcacgcattcctggacttacttaaggacgctggcctgggccaacttgcaaccatggcaggcatagatcagtctgattttcagctcctgggccatccccagatgacttctacagtgtccaatcctcccaaggaggagaagaaggctctggaggatgaaaagccagagccgaaacaaaatgcactgggtcagatgcagaacatccagttccagaaaattactggagatgctcggattccgctccctctcgacagttttcccgtccccgtgtctacacccgaagggcttggaacatccagcaacaacctaggcgtccctgccacggagcagcgccaggaaagttttgaaggcttcattgcaaggatgtgttcacccagccctgacgcgacctccgggacaggatcccagcgcaaggaggaggaactcagtagaaatagtagatcctctagcgagaagaagacgaaaactgaatctcactag

SEQ ID NO: 16523 - DNA, 915 bp, synthetic construct
  source 1..915: mol_type = other DNA; note = Synthetic coding sequence
atgaacttcagcgaagtgttcaagctctcctcactgctgtgtaaattcagccctgacggaaagtatttggctagctgcgtccagtacaggctggtggtgcgggacgtgaacacactgcagattctgcagctgtatacatgtctggatcagatccagcatattgagtggagtgccgactcccttttcattttgtgcgccatgtataaacgaggtctggtgcaggtgtggagtttagagcagccggaatggcattgtaagattgacgaagggtcagctggccttgtagcaagctgctggagtcctgatggccgtcatatcttgaataccacagaattccacctgcggattaccgtgtggtccctctgcaccaaatctgtatcatacatcaagtatcctaaggcatgtctgcagggaattacattcactcgggacggaagatacatggctcttgcggaaaggcgggactgcaaagattacgtttcgattttcgtatgctctgattggcaactcctgaggcactttgacactgatacccaggacctcacaggcatcgagtgggccccaaacggctgcgtgttagcagtctgggacacctgcctcgaagtcagaattctcaaccacgtaacgtggaagatgatcactgagtttggtcatccagccgctatcaatgacccaaagattgtggtgtacaaagaagctgagaagagcccccagctgggcctgggatgtctctcctttccccccccccgggccggggcaggtcccctgccgagttccgagtcgaagtatgagattgcttcagtccccgttagtctacagacactgaagccagtcactgatcgcgcaaatcctaaaataggaatcgggatgctcgctttttcaccagattcttattttctcgcaacccggaattag

SEQ ID NO: 16524 - DNA, 483 bp, synthetic construct
  source 1..483: mol_type = other DNA; note = Synthetic coding sequence
atgaaggaggtggggcgtccccgggaagttcggggccgcccagggaagtctcggattcagaaagaactcgcagacatcactttggatcctcctcctaactgctcggctggccccaagggcgacaatatttacgaatggcgaagtacaatactggggccacccggctcagtgtacgaggggggcgtgttctttctggacataaccttcacccccgaataccctttcaagccccctaaagtcacctttaggacaaggatctaccactgcaacataaattctcagggtgtaatttgtctggatatcttaaaggataattggagtcctgccttgacaatttctaaggtgctcctctctatctgctctttattaactgattgtaaccccgccgacccgcttgtggggtcaattgccacacagtacatgaccaatcgagccgagcacgaccgcatggcccgccagtggacaaaaaggtacgccacatag

SEQ ID NO: 16525 - DNA, 516 bp, synthetic construct
  source 1..516: mol_type = other DNA; note = Synthetic coding sequence
atgagttcaggaaatgccaagataggccaccctgctccaaactttaaggcaaccgctgtgatgcctgatgggcagttcaaagatatttcgttaagcgattataagggcaaatacgtggtcttcttcttctaccccctagactttacttttgtctgccctacagagattattgcattctctgatcgcgccgaggagttcaaaaagcttaactgtcaggtgatcggcgcttccgtggacagtcacttctgtcacctggcctgggtaaacaccccaaaaaagcagggcggactcggccccatgaacatccccctggtctctgatcctaagagaaccatcgcccaggactacggggtgctcaaggccgacgaggggatatcttttaggggcttgtttataattgacgacaagggcatcttgcgccagatcacagtgaatgatctgccagttggccgatctgtcgatgaaacattgcgtctcgttcaagcctttcagttcaccgataaacatggggaatag

SEQ ID NO: 16526 - DNA, 603 bp, synthetic construct
  source 1..603: mol_type = other DNA; note = Synthetic coding sequence
gtgttgattttcgcgtgcctcgtgccgggctttcccgcagtaatgagttcaagggggccctgcactttggagacactaatcaatccctcgcctagtgtggccgatgtgaagatctatcctgaggaaatcactccattgctccccgcaatttccggagaaaagatagccgaagatcagacctgcttttttctgcagatcctcctgaagtacatggtcattcaagctgcgagcctggagtggaagaataaagagaatcaggacacaggcttcaaattcctttttaccctgttcaggaaatattatctacctcacctcttcccttccttcacaaaactgacaaatatctataaacccgtgttagatatcccccatctgcggccgaagcccgtttatataactaccaccagagacaatgagaacatttactcaacaaagatcccgtatatggctgctcgcgtcgtctttattaagtggatagttactttcttcttggaaaagaagtacttaaccgctacccagaacacaaagaacggggttgatgttttgcccaagatcatccaggtgtgtcacccatcgtcattttacctgttgatgctcgtctag

SEQ ID NO: 16527 - DNA, 576 bp, synthetic construct
  source 1..576: mol_type = other DNA; note = Synthetic coding sequence
atgagtagcactctcggaaaactgagcaatcaagtggaagagactctcccgctgctgaagaaaccgcttaagagggctattacaacactgatggcaggtatactgcgactagtggtacagtggccaccaggtcggcttcagaccgtgaccaagggcgtggagtctctgatttgtacagattggattcgacataagtttacacgctccagaattccagagaaggtgttccaggcttcccctgaagaccacgagaagtatggaggtgatccccaaaacccacacaagctccatattgttacccgtataaaaagcacccgtcgccgtccttactgggaaaaagatattattaaaatgctgggcttggaaaaggcccacacaccccaggtgcacaaaaatattccaagtgtgaacgctaagttgaaagttgtgaagcacctgattcgcatcaaaccgctcaaactgcctcaaggattgcctgcggaagaaaacatgagtaacacctgccttaagtcaactggggaactggtggtccagtggcatctgaagccggtggagcagaaggcccacgagagttag

SEQ ID NO: 16528 - DNA, 483 bp, synthetic construct
  source 1..483: mol_type = other DNA; note = Synthetic coding sequence
atggaggcagagaggccgcaagaggaggaggatggtgaacaggggccacctcaggatgaggagggctggccacctccaaatagcacgactagaccatggcgtagtgctccaccctcaccaccaccaccaggtactaggcatactgccctgggcccccgaagcgccagcctcctctccctgcagacggaacttctgttggatttggtagccgaagcccaaagtagacgtttggaggagcagcgcgctaccttctacacccctcaaaacccgagctcactagcgccagcccctctgcggcctctggaagatcgagaacagctgtacagtacaatcctgagccaccaatgtcagaggatggaagcacagcgatcagaacctcccttaccccctggtggccaggagttgctagagctgctgttgcgggtccaagggggcggcaggatggaggaacaacgcagccgacctccaactcatacatgctag

SEQ ID NO: 16529 - DNA, 321 bp, synthetic construct
  source 1..321: mol_type = other DNA; note = Synthetic coding sequence
accttcctcgaacaatctaagactcgtttcaacaagaattataagggcatgtcgctaagtaaaattaccactacggtggggcttaacatagggacagtagacgtggggaaggcaaggctcatgttttgggaccttgggggccaggaagagctgcagtcattatgggataaggacaagacaaagtgtggagatctcgggacgctacactcaagcaaggtgtcagcttcgtttcgcctgcgggatctggcagcagatcaccaccggactcagaaatggcagagaccggacgtaggaactgccggctggctgccgctgccatag

SEQ ID NO: 16530 - DNA, 1524 bp, synthetic construct
  source 1..1524: mol_type = other DNA; note = Synthetic coding sequence
atggctgagttacaaatgctactggaggaagaaatacctggaggcaggcgcgcgctgtttgattcctataccaatcttgagcgtgtggccgattattgtgaaaacaactatattcagagcgctgacaaacagcgagcactggaggagacgaaggcatacacaacacagtctctcgctagcgtggcctaccttattaacacgttagcgaacaacgtccttcagatgctagatattcaggcctctcaactgaggcggatggagtcctccatcaatcatatttcacagaccgttgatatacataaggagaaggttgctaggcgggagattggaatcctaacaaccaacaagaacacaagtcgaactcacaaaatcattgctcccgctaacctggagcgaccggtgcggtatatccggaaacctatcgattacaccatcctcgacgacatcggccacggggtgaaggtcagtactcagaacatgaagatgggaggcctcccgaggactaccccgccgacccagaaacccccttccccccccatgtccggaaagggtaccctgggaagacatagcccgtacaggactctggaacccgtccggccaccggtggttccaaacgactacgtgccctcgcctacccggaacatggctccctctcagcaatctcctgtacgaacggctagtgtcaaccagcggaatcgtacctactcgtcctctgggagcagtggcggatcgcatccaagctccaggtctagttctagagaaaattctggctctggctctgttggcgtcccaattgccgtcccaaccccatccccaccctcggtgttccccgcaccggctggttctgcgggcactccacccctgccagcgacaagtgcctcagcccccgctcccctggtccctgctactgtcccctcaagcacggctcccgatgcggccgctggcggggcccagacactggccgatggattcacatcacccactcctccggtggtatctagcactcctccgacaggacaccccgtgcagttctactccatgaatagacccgctagtcgacacacacccccaacgatcggagggtcattgccatacagacggcccccctccattacgagccagacatcactgcagaaccagatgaatggagggccattctattcgcaaaatccggtgagcgacacccctccaccaccgcctcctgtggaagagcctgtcttcgacgaaagccctccccccccaccgcctccagaggactatgaagaagaagaggcagcagtggtggagtattcggacccgtacgccgaagaagatccaccgtgggcccccaggtcctacctggagaaggtagtggctatctacgattacacgaaggataaggaagatgagctatcgttccaggaaggtgctatcatttatgtgatcaaaaaaaatgatgacggttggtacgagggggtcatgaatggggttaccggtctcttccctgggaactacgtggaaagcatcatgcactactctgagtag

SEQ ID NO: 16531 - DNA, 303 bp, synthetic construct
  source 1..303: mol_type = other DNA; note = Synthetic coding sequence
atggcctctgccggaactcagcactactcgattggtctaagacagaaaaattccttcaaacagagcggaccaagcggcacagtgcccgcaacacccccagagaaaccctccgagggcagggtttggccacaagcccaccaacaggtgaagccgatttggaagctggagaaaaaacaggtagagacgctctctgccggtcttggaccgggtctcctgggcgtgcccccccagccagcctacttcttttgccccagtaccctgtgtagctccggcacaacagccgtgattgcggggcattcctag

SEQ ID NO: 16532 - DNA, 1212 bp, synthetic construct
  source 1..1212: mol_type = other DNA; note = Synthetic coding sequence
atggcatccgcgctccggcctcctcgcgtgcccaaaccaaagggggtgctgccaagtcactactacgaaagttttcttgagaagaaggggccctgcgatcgcgattacaagaagttttgggccgggctgcagggtcttactatttacttttacaactccaaccgcgatttccagcatgttgagaaactgaaccttggagcctttgagaaacttacggatgagataccctggggaagttcccgggacccagggacccacttcagcttaatactacgggatcaggaaattaagttcaaggtcgaaaccctcgaatgtagagagatgtggaaagggtttattcttactgtggtggagctgcgggtgccaacagacctcactttgctgcctggccacctgtatatgatgagtgaggttttagctaaagaggaagcccggagggcactggaaactcccagttgttttctcaaggtttctcggctggaggcccagctgttacttgaacggtatccagagtgcggcaatctcctgctgaggccgtccggagatggagctgacggagtctctgtgacaacacggcaaatgcacaatgggacacatgtggtcagacactacaaagtgaagagagaaggcccaaagtacgtaattgacgtcgagcagcccttttcctgcacttctctcgatgccgtggtgaattattttgtgtcccatacaaagaaagcgctggtgccatttttactggacgaagactacgaaaaggttttgggctatgtggaagcagacaaggagaatggggagaatgtgtgggtggccccgagcgccccgggcccaggaccagccccatgtacaggcgggcctaaacctctttcgcctgcctccagtcaggataaactgccccccttgcctccccttccgaatcaggaagaaaattacgttacaccaatcggcgatggtcccgccgttgactatgagaaccaggatgtcgcatcctcgtcctggcctgtcattctcaaacctaagaagctcccgaaacccccagctaagctgcccaaaccacccgtgggaccgaaaccggagccaaaggtgtttaatggcggcctaggaaggaaactgcccgtgagcagcgctcagcccctcttcccaaccgcaggcctcgccgacatgactgccgaactgcagaagaaactggagaaaaggagagctcttgaacattag

SEQ ID NO: 16533 - DNA, 1551 bp, synthetic construct
  source 1..1551: mol_type = other DNA; note = Synthetic coding sequence
atgttgcgccgggggtctcaagccctaagacggtttagcaccggaagagtctactttaagaataaactgaagctggccctcatcgggcagagtctcttcgggcaggaagtctattcacatcttcgtaaggaaggccacagagtggtgggcgtttttaccgtgccagacaaagatggaaaggccgacccgttggcgctagccgctgagaaggacggcacaccagtgttcaaactgcctaaatggcgtgtcaagggtaaaactatcaaagaggtggctgaagcctaccgaagcgtcggagctgagttgaacgtgcttcccttttgcactcagttcattccaatggatatcatcgactctcctaaacacggctcaattatttatcacccatccatattgcccagacaccggggtgctagcgcaattaactggacactgatcatgggtgacaagaaggccggattttccgttttttgggccgatgacggccttgacactgggccaatcctgctgcaaaggtcctgcgatgtggaaccaaatgatacggttgacgctctctataatcggttcctgtttcccgaagggataaaggcaatggtggaggccgtgcagcttatcgctgacggcaaagctcctcgaattcctcagccggaagagggggccacctatgaggggatacaaaagaaagaaaatgctgagattagttgggatcagagcgcagaggtactgcacaattggattcggggccacgataaggtgcctggagcctggacagagattaacgggcaaatggttactttctacgggtcaacactgctcaattctagtgttccaccaggcgagccccttgagataaagggtgctaaaaagccaggacttgtcacaaagaatggactcgtgctgttcggcaatgacggcaaggccttaacggtaaggaacttgcaatttgaagacggtaagatgataccagctagccagtacttctctactggggagactagcgtggtggagctcaccgctgaagaggtgaaggtggccgaaacaatcaaggtcatctgggcaggcatcctttctaatgtgccaattatagaagacagtaccgacttcttcaaatctggcgccagctccatggacgtggcacgtctggttgaggagattaggcagaagtgcgggggccttcaactgcagaacgaggatgtttacatggcaacgaaatttgagggtttcattcagaaggttgtgcgtaagctgcgtggcgaggatcaggaagtggaactggtggtggactatattagtaaagaggtgaatgagataatggtaaaaatgccatatcagtgttttattaatggacagtttaccgacgccgacgacggcaagacctatgatactatcaatcctaccgatggctctacaatctgcaaagtgtcatatgccagcctggctgacgtggataaggccgtggccgcagccaaagatgccttcgagaacggcgagtggggcaggatgaacgcacgtgaacgagggaggctgatgtatagcatgcgtatgaattag

SEQ ID NO: 16534 - DNA, 1581 bp, synthetic construct
  source 1..1581: mol_type = other DNA; note = Synthetic coding sequence
atggaagaaatacctgcccaggaggctgctggcagccctagagtacagttccagtccttggagacacaatcagagtgccttagtccagagccacaattcgtgcaagacacggatatggagcagggactgacagggggattcccaatctccaagcctgatggcatatctcaactggaacaggaccttcaggtattcgacctagaaacgaaaacccgcgaagtgttaagagacgattgtagcgatggcgagactagagaagaaaacaagctactgatacccaaacagaagataagcgaggaggtgcatagttataaagtcagggtcggccggctgaagcacgacatcacacaggtgccagaaacacgcgaggtctataagtcggaagatagactcgaacggttgcaggagattctaaggaagtttctgtatctcgaacgcgagttccgacaaattaccattagtaaagaaaccttcacatctgaaaaaaataacgagtgccatgagcctgagaagtccttctctcttgacagcaccatcgatgcagaccagcgagtgctgcgcatccaaaatacagatgacaatgataagtatgatatgtctttcaaccagaactccgcttcaggtaagcatgagcacctgaacctcaccgaggattttcagtcttccgagtgcaaagaaagcctgatggatctgagtcacctgaataagtgggagagtatcccgaacaccgaaaagtcctacaagtgcgatgtgtgcggaaagattttccatcagtcctccgccttaactcgccaccagcgaattcatacaagagaaaaaccttacaagtgtaaggaatgcgaaaagagcttctcccaatcttcgagcctaagcaggcacaagcgcatacacaccagggaaaagccttataaatgtgaggcatctgataagtcttgcgaagctagcgataagagctgctccccttcctccggcataatacagcacaaaaaaatacacacacgagccaaatcctataagtgttcaagttgtgaacgagtgttttctagaagtgtccatctgactcaacaccaaaaaatccataaagaaatgccttgcaaatgcacagtgtgcgggagtgacttctgtcacactagttacttgctggaacatcagcgggttcaccatgaggagaaagcatatgagtacgacgaatacggcctagcatatataaagcaacagggtattcacttcagggagaagccatacacatgcagcgagtgcggcaaggattttcgtctgaattcacacctgatacagcatcaaagaatccacaccggcgagaaagctcatgaatgcaatgagtgcggcaaagcattttctcaaactagctgcctgatacagcatcacaagatgcacagaaaagagaaaagctatgagtgtaacgaatacgagggttccttttcacatagcagtgacctgatacttcagcaggaggtcctgacgaggcagaaggccttcgattgcgacgtctgggaaaaaaatagcagccagagggcacaccttgtgcagcatcagtccattcacaccaaagaaaactcatag

SEQ ID NO: 16535 - DNA, 603 bp, synthetic construct
  source 1..603: mol_type = other DNA; note = Synthetic coding sequence
gtgctgatttttgcttgcttggtcccaggtttccccgccgtgatgagctccaggggaccctgtacattggaaactctgattaacccatcccccagcgtcgcagatgtgaaaatctacccagaagaaataactccactgctgcctgctatcagtggagagaagattgcagaggatcagacctgcttttttctgcaaatcctgttgaagtatatggtgatccaggcggcaagcctagagtggaaaaacaaggaaaaccaggacacaggtttcaagttcctcttcaccctcttcagaaagtactatcttccgcacctttttccgagctttaccaaactgacaaatatctacaagcccgtccttgatattcctcatctccggccaaagcccgtctatatcaccaccacccgcgacaatgaaaatatatacagtaccaagatcccttacatggccgcccgagtggtcttcattaaatggatagtaaccttcttccttgaaaagaaatacctgacagccacccagaataccaagaatggagtcgacgtcctccctaagatcatccaagtttgccacccttccagcttttacctgctcatgctcgtttag

SEQ ID NO: 16536 - DNA, 540 bp, synthetic construct
  source 1..540: mol_type = other DNA; note = Synthetic coding sequence
aacatcaagccaggagaggggctgggaatgtacatcaaatccacctatgatggattgcacgtgatcaccggcaccactgagaatgtcgggtggcagctgaagaacctcgttaagaaactccgcgagaatcccacaggggtggtactcttgttgaaaaaaagaccgacaggcagtttcaacttcactcccgccccactgaaaaatctgcggtggaagccccctctggtacagacgtctcccccccccgctaccactcagagccctgagagcactatggataccagtcttaagaaggaaaaatccgccattcttgatctttatattccaccaccacccgccgtcccttattctcctagggacgagaatggatctttcgtgtatggaggctcctctaaatgcaagcaacctctcccaggcccaaaaggcagcgaatccccaaatagcttcctggatcaggagagtaggagaaggcgattcaccatcgcagactccgaccaacttcctggatactcagttgagacaaatatactccctacctag

SEQ ID NO: 16537 - DNA, 1368 bp, synthetic construct
  source 1..1368: mol_type = other DNA; note = Synthetic coding sequence
atgatgggtgcaccaaacctcattgctgacagcatggagtacggcctgtcttattcagtgatctcctacttaaagaagctcagtcagcaggcaaagatagaaagcgaccgggtgatagggagtgttggaaagaaggtcgtgcaagagacaggaatcaaagtgcgcagtagaagccacggactgagtatggcttaccgcaaagactttcaacagctgctgcaggggatttcagaagacgtcccccatagattactagacttgaatatgaaagagtatacagggttccaagttgcccttcttaacaaggatcttaagccccagacttttcgcaacgcgtacgatataccgcggcgcaatctgttggaccacttgaccaggatgaggtccaacttgttaaaatccactcgccggttcttgaagggccaagatgaggaccaggtgcactctgtcccaattgcacaaatgggcaattaccaggaatatttgaaacaagtaccgagtccactccgggaactggatccagatcagccgcggcgtctgcacacatttggcaacccttttaagctcgataagaaggggatgatgattgacgaggctgacgagttcgtagccggaccgcagaacaaacataaaaggcccggtgagccaaatatgcagggaatcccaaagcgaaggcgttgcatgtctcctctattgcggggaagacaacagaatccggtggtcaacaaccacattggcggaaagggacctcccgccccgaccactcaagcacagccagatctgatcaaacctttgccgctgcataagatctcagagaccacaaacgatagtatcatacacgatgtggtggagaatcatgtagctgatcaactgagcagtgatatcactccaaatgctatggataccgagttctctgcctcaagccctgcgtccctgctggagcgtcctaccaatcatatggaggccctggggcacgaccatcttggaacgaatgaccttacagtgggcggatttttggagaatcacgaagaaccacgggataaggaacagtgtgctgaagaaaatatccctgctagttcgctgaataagggaaaaaagttgatgcattgtaggtcacacgaagaggtgaatactgagctgaaagcccagattatgaaggaaatcagaaagcccggtaggaagtatgaaagaatattcaccctcctgaagcacgtgcaagggtctctgcagactaggctaatatttcttcagaacgtcatcaaggaggcaagcagattcaaaaaaaggatgttgatcgagcagctggaaaacttcctggacgaaatacatcgcagagccaaccagattaatcatatcaactcaaattag

SEQ ID NO: 16538 - DNA, 1467 bp, synthetic construct
  source 1..1467: mol_type = other DNA; note = Synthetic coding sequence
ctagattgcggacctcggctgcctgtggaggtcggcccatcactttcctcaccatccagcggatgtggcgagggttccatttcagtaggagagaatgtctccgacgtagctcctacccaaccatggtggcctaacacccctggagatagcgtgagcgaggaactaggcccgggacggagcggggatacggaggatctgagcccgaactggccactcaatagccaggaggacacagctgcccagtcatctcccggtcgcggggaggaggccgaggcgtcagcagctgaagctcagggtggagaacaggcatacttggctggactagccgggcaataccatttagaacgttatcctgattcttatgagtctatgtcagagcctccaattgcacacctgctgaggccggttttgcctcgggcattcgcctttcctgtagacccacaggtgcaatccgcagctgacgaaactgccgttcagctctctgagttacttaccttgccagtcctcatgaaaagatccatcacagcacccctagccgcccatataagccttgtcaacaaggcggcagtggattatttcttcgtcgagctgcacctagaggcccactacgaagcacttcgacatttcctccttatggaggatggtgagtttgcccaatccttgtccgacctgttgtttgaaaagttaggggccggacaaaccccaggcgagttactaaatcccctcgtgctgaacagtgttctctctaaggccctgcagtgttccttacacggggatacaccacacgcctctaacctgagcttggcgctaaaataccttcctgaagtcttcgctcccaatgcacccgacgttctgagctgtctggaactgcgctataaggtcgattggccgttgaatatcgttatcactgagggctgcgtgtccaaatacagtggcgtgttttcgtttcttttgcagcttaagctgatgatgtgggcattgaaggatgtgtgcttccatttgaagcgcaccgtcccttctgccgcagccgtgcaggcccgagatgccgcattcagagaggggcatcctggcctccacaggcagccagacccagccaggcaccttgtcagggttcaaggacaggtgggacaccgtgggcggcccggcggggacccggcctgcgccaggcgcgtgccagcccaaggtcggctgcaagccgctccagtgatgaacgtgatacacagcatcttttctctggtgcttaaattcaggagccagctcatcagtcaggcgtggggccctcctggcggtccaaggggcgcggagcacccgaattttgcattgatgcagcagtcatataatacttttaagtattactcacactttcttttcaaggtcgtcactaaactagtgaacagagggtatcagccccacctggaagattttctgttgcgaattaatttcaataactactaccaagacgcatag

SEQ ID NO: 16539 - DNA, 3819 bp, synthetic construct
  source 1..3819: mol_type = other DNA; note = Synthetic coding sequence
atggccaacgattctcctgcaaagagcctcgttgatattgacctgagttcgctgagggatcccgccggaatcttcgagctcgtggaagtggtgggcaacggaacttacggacaagtctataaggggcgccatgtgaagaccggccagctggccgctattaaggtgatggacgtgaccgaggatgaagaagaagagattaaactggagattaacatgctgaaaaaatactcgcatcaccggaacattgctacctattacggggctttcattaagaagtcccctcccggacacgacgaccagctgtggttagttatggagttttgtggggcaggctctatcaccgaccttgtaaaaaatacgaagggcaacaccctgaaggaagattggatagcttacatttctcgcgaaatattgagaggactcgcgcatctgcacatccaccatgtgatacaccgtgatatcaaaggtcagaacgtgctgctgactgagaacgcagaggtcaaattagtcgatttcggagtctccgctcagctcgaccggactgtgggcaggaggaatactttcatcgggaccccatattggatggcaccagaagtcatagcctgcgacgaaaacccagatgccacctatgactatcgctctgatttgtggtcttgcggcataactgctatcgagatggctgagggcgcgccgcccctatgtgatatgcatccaatgcgcgccctttttctcattccacgtaaccctccgccgaggttgaagagcaagaagtggagtaaaaagttcttctcttttattgagggatgcctcgttaagaattacatgcagaggccttctactgagcagctcctgaaacacccttttatcagagatcagcctaatgagcggcaggtcaggatacagctgaaggaccatatagaccggactcggaaaaaacgcggggagaaggacgaaaccgagtatgagtattcaggctccgaggaggaggaagaagaggtccctgagcaggagggggagccatcgtcaattgtgaatgttcccggcgaaagcacacttcgtcgggatttcctccggttgcagcaggagaataaggagcggagtgaggctctgagacggcaacagcttctacaggagcaacaactgcgcgagcaggaggaatacaagcgtcagcttctcgctgagaggcagaaaagaatcgaacagcagaaggagcagaggagaaggctcgaagagcagcagcgacgggagcgagaagccagaagacagcaagagagggaacagcgacggcgggagcaggaggagaagcggaggctggaagaactcgagcggcggcgcaaggaagaagaagaaagacgcagggctgaagaggaaaaaagacgggttgagcgggagcaggagtacatcaggaggcagctcgaggaggaacagcgccatttagaggtgctgcagcaacagcttttgcaggaacaagccatgctactgcacgatcacaggagaccacaccctcaacattctcagcagccgcccccaccccagcaagagcgcagcaagccctccttccatgccccagagccaaaggctcactatgagcccgccgatcgggcccgcgaggtagaggacaggttccggaaaacaaatcatagctcccccgaagcccaatccaagcagacaggtagggtcctggaacccccggtgccatcgcgcagcgagagcttttccaacggcaactctgaatctgtgcaccccgccctgcaaagaccggcagagccacaggtaccagttcgaaccacaagtcggagccctgtcctgagtcgcagggacagtcctctccagggaagcgggcagcagaactctcaggccggccagagaaattctacatctattgagcccagactgttgtgggagagggtggaaaagctcgtccctcggccaggatctggaagcagctcaggaagttccaactctggctcacagcccggcagtcaccccggcagtcaatcgggctctggcgaacgatttcgggtgcgcagcagtagcaaaagtgagggaagcccctctcagaggctggaaaacgcggtcaagaaaccagaagataaaaaagaagttttcaggccactgaagcccgccgacctcaccgccctcgccaaggagctccgggcagtggaggatgtgcggccccctcacaaagtgacagattacagctccagcagcgaggaaagtggaaccaccgatgaggaggatgacgatgtggagcaggaaggcgctgacgagtcaacgtccggacctgaggatactagagcagccagctcactgaacctgtccaacggggaaacagaatccgtgaaaactatgatcgtgcatgacgatgtggaaagtgagccagctatgactcccagtaaagaggggactttgattgtcaggcagtctacagtggatcagaaacgggccagtcaccatgagtcgaacgggtttgcaggcaggatccatctgcttcccgatttgttgcagcagtcccattcttcatcaacgtccagcactagttcctctccaagttcatcacagcccaccccaacaatgagccctcagactccacaagacaagctgacagcgaacgagacacagtccgcctcctctactctccagaaacacaagtcctcctccagttttactccgtttattgatccaagactgctgcagatcagcccgtcctccgggacaactgtcacctccgtcgttgggttctcttgcgatggcatgaggcctgaagcgattcggcaggacccaacacggaaaggttcggtcgtgaatgtgaaccccaccaacacccgtccccagagtgatacccctgagattcggaagtacaagaagcgcttcaattcggagatcctgtgcgctgctttgtggggtgtgaatctgttggtggggactgagtccggtctgatgctcctggacagatccggccaaggcaaggtgtaccccctgatcaacagacgcaggtttcagcagatggatgtgctggaggggttgaacgtgctcgtgacaatctcgggaaagaaggacaagctgcgcgtatactatctatcctggctgaggaataagatcctgcacaacgatccagaagtggaaaagaagcagggctggacgacggtaggggacctggaaggctgcgtgcactataaggtggtcaagtacgagcgtattaagttccttgtaatcgcacttaagagcagcgtcgaggtttatgcctgggccccgaagccataccataagttcatggcgttcaaatcattcggtgagctggtacacaaaccacttctggtggacctaacagtggaggagggccagaggctcaaagtcatctacggatcgtgtgctggctttcacgccgtggacgtcgacagcgggagtgtgtacgacatctacttgcctacacacatccagtgctccataaagcctcatgctattattatactgcccaacaccgatggaatggagctgttggtgtgttatgaagatgaaggtgtgtatgttaatacttatggaagaattaccaaggacgttgttctgcaatggggggaaatgccaacgagcgtcgcttatattagaagcaatcagaccatgggatggggcgaaaaggccattgaaatccgaagtgtggaaacagggcacctcgacggcgtgtttatgcacaagagggcacagaggcttaaatttctgtgcgagcgtaacgacaaagtgtttttcgcctcagtgcgaagtggcgggtccagccaggtgtacttcatgactctcgggcggacgtccctgttgagttggtag

SEQ ID NO: 16540 - DNA, 363 bp, synthetic construct
  source 1..363: mol_type = other DNA; note = Synthetic coding sequence
gcacttcagatatcagagaatttattctctaataaggtactaaatgctctcaagcctgaaaaagacgtggacggggtaactgacatcaacctgggcaagctggtgcgaggcgatgcccacgaatgtttcgtttctccagtggcgaaagccgtgattgagctcttggaaaaatctgtcggggttaatctagacggcaagaagattctagtagttggggcgcatggaagtttagaggcagccctgcagtgcctctttcagagaaaagggtctatgactatgtcaatccagtggaagaccaggcagctccagagcaaaacagagtccaggagtgtgactcgcctggaatgccgacgtgtcatttag

SEQ ID NO: 16541 - DNA, 1866 bp, synthetic construct
  source 1..1866: mol_type = other DNA; note = Synthetic coding sequence
atggtaagcattctgtcatctttcgagtccaggttaatgaaactagagaacagtataataccagtgcataagcagaccgaaaatctgcagcgcctccaagaaaatgtggaaaaaacactctcttgcctggaccatgtcatctcctattaccatgtcgcctccgatacagagaaaattataagagagggacctactggccgtcttgaagagtatcttgggtctatggccaagattcaaaaagctgtcgagtacttccaggacaactcaccagacagtcccgagctcaacaaagtcaaactgttgttcgagagagggaaagaggctctggagagcgaatttcgctcactcatgacaaggcactccaaggtcgtgagtcctgttctgatcttggatttaatatccggcgacgatgatctggaggctcaggaagacgttacgcttgagcacctgcccgaatcagtgctccaggatgttatcaggatctctaggtggctggtcgagtatggtaggaatcaagactttatgaatgtgtactatcaaatcagaagctctcagttggatagatcaattaaaggcctgaaagagcattttcacaaaagctcttcctcatctggggttccatatagccccgcaatacccaataagcgtaaagacactccgaccaaaaagcctgtgaagcggccaggcacgataagaaaggctcagaacttgcttaagcagtatagccaacacggacttgatggaaaaaaggggggtagtaacctgattccgctcgagggccgagacgatatgctagatgttgaaacagatgcatatatccactgtgtgtcggcttttgtgaagttggcacaatcagagtaccaactccttgccgatattattccagaacatcatcagaaaaaaacctttgatagcctaatacaggacgcactagacgggctcatgcttgaaggggagaatatcgtatctgccgccaggaaagctatcgtgcgacatgacttctcaacggtcctgacggtcttccctatactgagacacctgaagcagacaaagcccgaattcgaccaggttctacagggtacagccgcctctaccaagaacaaactccccggccttatcacatccatggagactatcggagctaaggcgcttgaagatttcgcagacaatatcaagaatgatcccgacaaggagtacaatatgccaaaagatggtacggtgcacgaactaacttcaaatgccattctcttcttgcagcagctgcttgactttcaggagacggcgggagcaatgctcgcatcgcaggggaaggtcctgggaaacttgcagctcaatcttctgtctaagagcaaggtttatgaggaccctgccttatcagccatatttcttcataataattataactatatcctgaaaagcttagaaaagagcgagctcatccaactggtcgccgtaacacagaagactgcagagagatcttaccgtgagcacatcgagcagcaaattcagacgtaccagcggtcttggctcaaggttacagactatatcgccgagaaaaacctccctgtgtttcaaccaggagttaaactgcgagacaaagagagacagatcattaaggagagattcaagggcttcaacgatggtctcgaagagctgtgtaaaattcaaaaagcttgggccatacctgatacagagcagcgagacagaattaggcaggctcagaaaaccattgtgaaggaaacatatggagcgttcctgcaaaagttcggctcggtacctttcaccaagaaccctgagaaatacatcaaatacggtgtcgagcaggtcggagacatgattgataggctattcgatacgtcagcctag

SEQ ID NO: 16542 - DNA, 1344 bp, synthetic construct
  source 1..1344: mol_type = other DNA; note = Synthetic coding sequence
atggattttttattagggaatcctttcagctcccctgtggggcaacggatagagaaagcaaccgacggcagtctacaaagtgaggattgggcgctgaatatggagatctgtgatatcatcaatgaaaccgaagagggaccgaaagatgcgttacgagccgtgaaaaaacgcatagttgggaacaagaactttcacgaggtgatgttggcgctcacagtactggaaacttgtgtaaagaattgtgggcacaggttccacgtgcttgtcgcttcccaggattttgtcgaatccgtcctggtgcgaactattctccccaagaataatcccccaacaatcgtacacgacaaagtcctgaatctgattcagacagtgtttaactcagagacccagagcggtcaagattctgtcggaacggactcgtcccagcaggaggactccgggcaacacgccgccccccttcctgcgcctcccatactgtccggagatacacccattgctccaactccggaacaaattgggaaattaaggagcgaactggaaatggtgtccggaaacgtccgggtgatgtccgagatgctgactgagcttgtgccaacccaggccgagcctgccgatctagaactcctgcaggaactgaatagaacctgccgtgcaatgcagcagcgcgtattggagctgattccacaaatcgctaacgagcaactgaccgaggaacttttgattgtgaatgacaatctcaacaatgtgttccttcggcatgaacgctttgagcggttcagaaccggacagaccacgaaagcgccatctgaagccgaacccgctgcggacctcatagacatggggcccgatccagcagctaccggtaacttatcttcccaattggccggcatgaatcttggctccagctcagttcgcgccggcctccaatcactggaagcttctgggcggctggaggacgagtttgacatgtttgcccttacaagaggctcctctctggcagaccaacggaaggaagttaagtacgaagctcctcaggccacagacggcctcgccggtgccctggacgccaggcagcagagtacgggggctattcctgtgacccaggcgtgtctcatggaagacatcgaacagtggttgtccactgacgttggaaacgatgctgaggaaccgaaaggggtgacaagcgaggaatttgacaagtttcttgaggagagagcaaaagccgccgaccgacttcccaacctgtccagtccttccgccgagggtcctccaggacccccttctggccctgcgcctagaaagaaaacccaggaaaaggacgatgacatgctgttcgctctctag

SEQ ID NO: 16543 - DNA, 2103 bp, synthetic construct
  source 1..2103: mol_type = other DNA; note = Synthetic coding sequence
atggcaacaatgataccacccgttaagctgaaatggctggaacatctaaactctagttggatcaccgaagactcggaatcaattgccaccagagagggcgtagctgtgctgtattctaagttggtaagcaataaggaggtcgttccgttgccccagcaggtcctgtgcctgaagggccctcaactgccggacttcgaaagagaatccctgtcctcagatgaacaagatcattaccttgacgctttactttcgtctcagctcgctctggcgaaaatggtgtgttctgattcacctttcgctggggcactccggaagagactattggttctccagcgagtgttctacgctctatctaacaagtatcatgataaaggaaaggtaaagcagcagcagcatagtcccgaatcgtcatctggcagtgcagatgtgcacagtgtctccgagcggccccgatccagtacggacgctctgatcgaaatgggagtaaggactggcctatccctattattcgcgctcctcagacagtcatggatgatgcccgtgtccggacccggactctccttgtgcaacgacgtgattcacacagccatagaggtagtgagttcgctgccacccctgtccctggctaatgaatcgaaaattccgcctatggggctggattgtctgtcacaggtgaccactttcctcaagggagttacaatccctaactcaggggcagataccttaggtcggcggctcgccagcgagctgctactggggttggccgcccaacgcggatcactccgctatcttctggaatggattgagatggccctgggagcctcggccgttgtccacaccatggaaaaaggcaagcttctttcatcacaagagggtatgatttcttttgactgttttatgaccatcctgatgcagatgcggcgatccctgatcagcgaaaatcaggacagcgccgacgtcgatccccaggaacactcattcacacgcactatcgacgaagaggcggaaatggaggagcaggctgagcgtgacagggaggagggacacccagaacccgaagacgaggaagaggagagagagcacgaagtaatgaccgctggcaaaatctttcagtgcttcttgtccgcccgagaagtcgccagatcacgagaccgcgatcggatgaattctggggctggaagtggcgccagggcagatgaccctcccccacagagtcagcaggaaaggagagtctccacagatttgcctgaaggccaggacgtgtacactgcagcctgtaacagtgtgatacatcggtgcgctctgctaattttaggtgtgagccccgtgattgatgaactccagaagaggcgcgaggagggtcagctacagcagccatccaccagtgcctcagaaggcggaggccttatgacccgttcggaatcactaaccgctgagagcagactggtacatacctcaccgaactataggctcattaagagcaggtctgaatcggacctgagccagcccgagagcgacgaagaggggtacgccttgtctggacgccgcaatgtggatttggatttggctgcttcccataggaagagaggccccatgcacagtcagcttgagagcctgagcgattcatgggcgcggctgaagcactcccgtgactggctttgtaatagtagctatagtttcgagagtgacttcgacctgaccaagagtctcggcgtgcatactctaatcgaaaatgtggtgagctttgtgagcggggacgtaggcaatgccccagggtttaaagagcccgaggaatcgatgtccacgtcaccccaagccagtatcatcgcgatggagcagcaacagctgcgcgccgaattgagactagaggctctccatcagattttggtcctcttgagtggaatggaagaaaaaggcagcataagcctagccggcagcaggctaagctctggctttcaaagttcaacactcctgacttcagtcagactacagtttcttgcgggttgtttcggcctgggcacagtgggccacacaggaggaaagggtgagtccggcaggcttcatcattaccaggacgggattcgcgccgcaagagggtattag

SEQ ID NO: 16544 - DNA, 537 bp, synthetic construct
  source 1..537: mol_type = other DNA; note = Synthetic coding sequence
atggcggatcgggccgccgcggaacgcgcgtgcaaagatcccaatccgataatcgacgggaggaaagcgaatgtgaacctggcttacttgggtgctaagccgcggattatgcagcccggcttcgcgttcggagtgcaacagctccatcctgcactcatccagagacccttcggcattcccgcacactacgtatacccccaggcatttgtgcaacctggcgtggtgatccctcatgttcaaccaactgccgctgctgcctctactaccccttatattgattacacaggcgccgcctatgcgcagtactcagcagccgccgctgccgcagcagccgcagccgcttacgaccagtacccctatgcagcctctcctgccgcggcaggctacgttaccgccggtggatacggttacgccgtgcagcagccgattacagcagctgctcccggcacagcggctgccgcagccgctgccgccgccgccgctgccgcgttcggtcagtatcagccccagcagctgcagacggatagaatgcagtag

SEQ ID NO: 16545 - DNA, 579 bp, synthetic construct
  source 1..579: mol_type = other DNA; note = Synthetic coding sequence
atgggaaaagggtgcaaggtggtggtgtgcggattactgtcagttggaaaaactgcaatcctcgagcaactcctgtacggaaatcacacaattggaatggaggattgtgagaccatggaagatgtatatatggcctccgtggaaacagatagaggagtcaaggaacagctgcatctgtatgacaccagaggcttgcaggagggagttgagcttcccaaacattacttctcttttgcagacggatttgtcttggtttatagcgtcaacaacctggagtctttccaacgggttgagctgcttaaaaaggaaatagataaatttaaggacaagaaagaggtggctatcgtggtgctcggcaataagattgatctgtcagagcagagacaagttgacgcagaagtagcccagcagtgggctaaatctgagaaagtgagattgtgggaagttacagtgaccgatagaaaaactctgatcgagccctttactcttctggcctctaagttgtctcagccacagtccaagtcgtcgttcccgctacccggccggaaaaataaaggcaattctaactctgaaaactag

SEQ ID NO: 16546 - DNA, 555 bp, synthetic construct
  source 1..555: mol_type = other DNA; note = Synthetic coding sequence
atgaatcggtcacaaccggggctgctccgaacggaccctgttcccgaggagggtgaggatgtggccgccaccatttcagcaacggagactctgagcgaggaggagcaggaagaacttaggagggagttagccaaggtggaggaagagattcagaccctctctcaggttctagcagcaaaggaaaagcatctcgccgagatcaaacgcaagctgggtattaacagccttcaagagttaaagcaaaacattgccaaagggtggcaggacgtcaccgccacttctgcttataaaaaaacctctgaaaccctgtctcaggcgggccaaaaggcctcggcggccttcagctcggtgggcagcgtcattacaaaaaaactggaggacgtcaagaattcacctactttcaaatcctttgaggagaaggtggagaatctcaaaagtaaggttggcggaaccaagccggccggcggcgactttggggaagtcttgaatagcgctgccaatgcctctgccaccacaacagagcctttgcccgagaaaactcaggagagcctctag

SEQ ID NO: 16547 - DNA, 1620 bp, synthetic construct
  source 1..1620: mol_type = other DNA; note = Synthetic coding sequence
atggcgacctctgctcctctgaggagtctcgaggaggaggtgacgtgttccatctgcctggactatcttcgggatcctgtgactatcgactgtggccacgtattctgtcgctcctgtaccactgacgtccgaccgatcagtggcagcagacctgtgtgtcccctctgtaagaagcccttcaagaaggaaaatatacgtccggtatggcaactggcatctctggttgagaacatcgaacgtctcaaggttgataagggcaggcagcccggggaagtaacaagggaacagcaggacgccaaactatgcgagaggcacagagagaagcttcactactattgtgaggatgacggaaaactcctatgcgtgatgtgcagagaaagtcgagagcacagaccacatacagctgtcctgatggagaaagcagcacaacctcacagggagaaaatcctcaaccacctgagcactctgcggcgggatagagataagatccagggcttccaggcaaagggcgaagccgatattctggccgcgctcaagaaactgcaggaccaacgacaatatatcgttgcagagtttgagcaagggcaccaatttcttcgagagagagaggaacatctcctggagcaactagccaagttggagcaagaattaaccgagggacgggagaagtttaaatcgagaggggtaggcgagctggcaaggctggcactggtcattagcgaattggagggcaaagctcagcagccggctgccgagctgatgcaggatactcgggatttcctgaacaggtaccctaggaagaagttttgggttgggaaacctattgccagagtagtcaagaaaaaaactggggagttcagcgataagctcctgagcttacaacgcggcctgcgcgagtttcaaggaaagctgctccgggacctggaatataagactgtatcagtaacactcgacccccagtccgcctcaggctacttgcagctttccgaagactggaaatgtgttacctacacctcgctgtacaagagcgcctatctgcatcctcagcagtttgactgtgagccaggggtcctgggctctaagggctttacatggggcaaggtctactgggaggtcgaagtcgaacgtgaaggttggagcgaggacgaagaagaaggcgacgaagaagaagagggcgaagaggaagaggaggaagaagaggcgggctatggggacggatacgatgactgggaaacggacgaagacgaggagagcctgggagacgaagaggaagaggaggaggaggaggaggaggaagttcttgagagctgtatggtaggcgtggctagggactccgtcaagaggaaaggtgacctcagcctcagaccggaggacggagtgtgggctttgcggctgtcttcctccggcatctgggctaatacgagccctgaagccgagctgttcccagccctgcgccccagaagagtgggaatagctctggattacgaaggtgggactgtgacatttacaaacgcagaaagccaagaactgatctacaccttcacagctacctttacacggagactggtgccctttctgtggctcaaatggccagggacgcgactgctgctgcgaccatag

SEQ ID NO: 16548 - DNA, 612 bp, synthetic construct
  source 1..612: mol_type = other DNA; note = Synthetic coding sequence
atggaacctccaatggagccctctggcggggagcaggagcctggcgcagtgcgtttccttgacctgccatgggaagacgtgctcctgccacacgtgctgaacagagtgcctctgagacagcttctgcgactgcagagggtatcacgcgcctttcggagcttggtgcagctacaccttgcaggcctgagaaggttcgatgccgcccaggtggggcctcagattccgagggcagcgctggcccgccttctccgagatgcagagggcctgcaggaactggcccttgcaccctgccacgaatggctgtcggacgaggatctggtccccgtgctcgccaggaacccacaacttagaagcgtggcgctggggggatgtggacaattatcgcgccgtgccctcggggctctggcagaaggatgtcccaggctgcaaaggttgagtctggcacattgtgattgggtggacggccttgccctaaggggattggccgaccgctgccccgctctagaggagctcgatttaacggcgtgccgccagctgaaggatgaggcaatagtctacctggctcagcgcagaggggctgggttacgttcactgagcttagcagtgaattag

SEQ ID NO: 16549 - DNA, 1824 bp, synthetic construct
  source 1..1824: mol_type = other DNA; note = Synthetic coding sequence
atggcccgaggccttgggaaggctagcggattccccgctggcccatccggggccgagctgcccgcctcaggcagaagacggggaccactcattagcctttttcctgcggtcctggctagcgaggccgccatgagttatcctgctgacgactatgaaagtgaagccgcctacgacccatacgcttacccatccgactatgacatgcacacaggagaccctaagcaggaccttgcctatgagcgccagtatgagcagcagacatatcaggtgattccggaggttatcaagaatttcatccaatacttccacaagaccgtgtccgacctgatcgaccagaaggtatacgagctacaggcctccagggtgagttcagacgtaattgaccagaaagtctacgaaatccaagacatctatgaaaacagctggactaaacttaccgagaggttctttaaaaataccccttggcctgaagcagaggcaatagctccacaagtcgggaatgacgctgtctttcttatcctctataaagagctttattatcgccatatctacgcgaaggtgtcaggcggcccaagcctcgaacagcgcttcgagagctactacaactattgtaatttgttcaattacattctgaatgccgacggcccagcgccattggaactccctaaccagtggctgtgggatatcatcgatgagtttatttaccagtttcagtcattctcgcagtaccgctgtaagaccgctaagaagtccgaggaagaaatagatttcctgcggtctaatccaaagatatggaatgtccacagcgttctaaatgtcctgcattctctggtcgataaaagcaatataaacaggcaactggaggtttacacatctggcggggacccagagagcgtggctggagaatatgggcggcattccttgtataagatgttggggtattttagcttggtcggcctgctgcgcctgcatagtctgctgggcgactactaccaagccatcaaagtcctcgagaatatcgagctgaataaaaagtcaatgtattcccgtgtccctgaatgtcaggtaacaacttattactacgtaggctttgcgtacctgatgatgaggagataccaggatgcgattcgtgtatttgccaacattctgctatacattcagcggaccaagtccatgttccagcgcacaacatacaagtacgagatgattaataagcagaacgaacagatgcacgctctgttagcaattgcgcttacgatgtatccaatgcgcatcgatgagagcattcatctgcaactgagggaaaagtacggagacaagatgctacggatgcagaaaggtgatccccaagtgtacgaagaactattctcatactcctgcccaaaattcctatcccctgtggttcctaactatgataacgtgcatcctaactaccacaaggagccgtttctgcagcagttaaaggttttttccgatgaagtgcagcagcaagcgcaattgagtacaatcagatctttcctgaagctgtataccactatgcccgtggcaaagctggccggctttctggatctgacggaacaggagtttcgtattcaactgttggtctttaaacacaaaatgaagaatctggtctggacctccggtatctcagctcttgacggagaatttcagtcagcctcagaagtggatttctatatcgataaggatatgattcatattgctgacactaaggtcgcacgccgctatggggatttcttcattcggcagattcataaatttgaggaacttaaccgcactctcaagaagatgggacaacgaccttag

SEQ ID NO: 16550 - DNA, 1308 bp, synthetic construct
  source 1..1308: mol_type = other DNA; note = Synthetic coding sequence
atggctgcatcctcgctggagcagaaactgagcaggctcgaggccaaattgaaacaagagaaccgggaagctcgcaggaggattgatttaaatttggacatctcaccccagagaccaaggccaattatcgtgatcaccttgagcccagctccagcgccctcccagagagctgcccttcagctgcccctcgccaatgacggaggatcccggagcccctcgtccgagtcttctccacagcatccaacgcctcctgctcgacctagacacatgctgggcttgccctccactcttttcacaccgcgaagcatggaatctattgagattgaccaaaagctccaggagataatgaagcaaacaggctacctgactataggaggccaaaggtaccaagcagagatcaatgacttggagaatttgggagagatgggaagcggaacgtgcggacaggtgtggaagatgcggttccggaagactggacatgtcattgctgtcaaacagatgagacgctctggcaacaaagaggaaaataagcgcatcctgatggatcttgacgtcgtccttaagtctcacgattgcccgtacatcgtccagtgctttggtacatttataactaacactgatgtcttcatcgcgatggaactgatgggtacttgcgcggagaagttaaagaaacgcatgcagggacctataccagagcgcatcctgggcaagatgacagtggccatagtcaaagctttatactatctgaaagagaaacacggcgtcatacaccgggatgtgaaaccttcaaacatcctgctggatgagcgggggcagattaaactctgtgacttcggtatatctggccggctggtggattccaaggcaaaaacacggtctgccgggtgcgcggcctacatggctcctgagcggatcgaccctcccgacccaaccaagccagactatgacattagagctgacgtgtggagccttggcataagcctggttgaattggccaccgggcaatttccttacaaaaactgcaagaccgatttcgaggtcctcaccaaagttctccaggaggagcctccactcttaccgggacatatggggttcagcggcgactttcaatcctttgtcaaagattgtctaacaaaggaccatcgaaaaagacctaagtacaacaagctcctggaacactcatttatcaaaaggtatgaaacactggaagtagatgtagctagctggttcaaggacgtgatggccaaaactgaatcgccgcgaacctccggcgttctgagtcaaccccatctgccattcttcagatag

SEQ ID NO: 16551 - DNA, 3006 bp, synthetic construct
  source 1..3006: mol_type = other DNA; note = Synthetic coding sequence
atggcctcctcccccttgccaggacctaacgatattcttctcgctagcccctccagcgcatttcagcctgacaccttaagtcagccgcgccctggacacgccaatctcaagccaaaccaggtgggacaagtgatcttatacggcattccaatcgtctcactcgtgattgacgggcaggaacgcttatgtctggcccaaatttccaacacccttctgaaaaatttctcgtataacgagattcacaataggcgggttgcccttggtattacttgtgtgcagtgtaccccagtccagctggagattctgcggcgggcaggcgctatgcccatctcctcacgaagatgtggaatgattaccaagcgtgaggccgagcgcctttgcaaaagttttctcggagagaataggccccccaagttgcctgacaacttcgctttcgatgtctcccatgagtgtgcctgggggtgtcgggggagttttattccggctcgttataactcatcccgggcaaagtgtatcaagtgcagttactgtaacatgtattttagccccaacaagtttattttccactcacaccgaactcctgatgccaagtatacacagcccgatgccgctaattttaattcatggagaaggcacctgaagctcactgataagtccccgcaggacgaactcgtattcgcctgggaggacgttaaggcaatgtttaatggcgggtctcggaaacgagcactgccccagccaggcgctcatcctgcttgccatcccctgtctagtgtgaaagccgcagcagtagcagccgccgctgcagttgctggaggaggcggtctgctgggccctcacctcttgggcgcacccccccctccacccccgcccccgcctcctctcgccgagcttgcaggcgcccctcatgcccaccataagagaccacggttcgatgatgacgacgactcgctccaagaagctgccgttgtggctgctgcctcacttagcgctgccgcggccagcctgagcgtggcggccgcttctgggggagctggtactggaggcggcggtgccggtgggggatgcgtggcgggggtgggggtcggcgctggcgcgggagccggagctggtgctggagccaaaggcccgcgttcctatccagtcatccctgtgcctagtaagggttccttcggcggcgttctgcagaagttcccagggtgcgggggccttttcccccacccctatacttttcccgctgccgccgcagcattttccctgtgccacaagaaggaagatgccggcgccgccgcggaagccctaggaggggcaggagccggcggtgcaggcgcagctcccaaagccgggctttctggacttttttggcccgctgggcggaaagatgcattttatccgccattttgcatgttttggcccccacgaacacccggaggtctccctgtccctacctatctgcagccacctccccaacctccaagcgctctgggctgtgccctcggtgaatccccagctctcctgaggcaggcatttctggatttagccgaacctgggggggctgcggggtcagcggaggctgcccctcctcctggtcaacccccacaagtggtggcgaacggccctggaagcggtcctccacctccagccggcggcgcaggaagccgcgatgcattatttgagagtccccctgggggctctggtggggattgcagtgccggatctaccccacctgcggattcagttgccgcggccggagctggcgcggcggccgccggaagcgggccagcgggctctagggtgcccgcaccgcaccatccacacttgcttgagggaaggaaggcgggcgggggtagctaccaccactcaagcgcgtttcgtccagtgggtggcaaagatgacgctgagagtttggccaagctgcacggagcgagtgccggcgcaccacactcagctcaaacgcacccacaccaccatcatcaccctcaccatcaccaccaccatcatcatcccccccagcctccttcaccactgctcctcctcccccctcaacctgacgaaccggggagcgaaagacaccatccagcgccaccaccacctccaccacctcctccgcccccgcctctggcccagcacccgcaccacagaggtctcctgtctcccggaggcaccagctgctgttacccctccgaggactcttccgaggacgaggatgacgaagaagaggaacaggaagtcgatgtggaggggcacaagccgcccgagggagaggaggaagaagagggccgtgaccccgacgatgatgaggaggaagatgaggagacagaggtattgctgggggatccgctggtgggcggtgggcgcttcttacaaggcagagggccaagtgagaagggcagtagcagagatcgcgcgccggctgtagccggcgctttccctctcgggctcaactcatccaggctgcttcaggaggacggaaaactgggcgatcccggcagcgacctgcctccaccgcccccccctcctttggcaccccaaaaggcaagtggcggtgggtccagttctccagggtctcccgtgcatcaccccagtctggaggagcagccatcatataaggactcccaaaaaactaaggagaataatcaggttatcgtatcaactaaggacgacaactcttttagtgacaagaataaagagcatagcttcttcatcaccgactcagatgcctctggcggagacttctggagggaaagaagtggggagcatacacaggagacaaattcacctcacagcctaaagaaagacgtggaaaatatggggaaagaggaacttcagaaggtcttgtttgagcagatagacctccgccggcgcttggaacaagaatttcaagtcttgaaaggtaatacaagtttcccagtgttcaataattttcaggaccaaatgaagagggaactggcctatcgggaggaaatggtgcagcagctgcagatcgtgtcctgcatcagtacgtag

SEQ ID NO: 16552 - DNA, 198 bp, synthetic construct
  source 1..198: mol_type = other DNA; note = Synthetic coding sequence
atggccatggccccctctcctagcctcgtccaggtctatacaagtccagccgctgtggcggtgtgggagtggcaagacggtctgggcacttggcatccgtacagtgcaaccgtgtgcagttttatcgagcagcaattcgtccagcagaagggtcagagatttgggctagggagtctggcacactcaatcccactgtag

SEQ ID NO: 16553 - DNA, 1041 bp, synthetic construct
  source 1..1041: mol_type = other DNA; note = Synthetic coding sequence
atgatctctaggcctgcctggttgtggggcgcagagatgggagccaacgagcacggtgtgtgcattgcaaatgaggcaatcaacacaagagaacccgccgcagagattgaagccctgttggggatggatctagtcaggctgggactggaaagaggagagacagcgaaggaagctctggacgttatcgtctcactgctggaggagcatggccaaggcggtaactatttcgaagacgccaactcatgtcatagttttcagtcggcctatcttatagtcgatagagacgaggcctgggtactggagactatcggaaagtattgggccgccgagaaggtgactgagggcgttcggtgtatatgtagtcagctgagcctgactacaaagatggatgcggaacaccccgagctaagaagctacgctcaatcccagggatggtggaccggggaaggagaattcaatttctctgaggtgttcagccctgtggaagatcatctggattgcggcgctggcaaggatagtctggaaaagcaagaggagtcgataactgtgcagacaatgatgaatactctcagagacaaagcgtcaggcgtatgtattgactctgaattctttctgaccacagccagcggagtgtccgtgctccctcaaaatagaagttcaccatgtattcattactttactggaacacccgacccctcaagatccatctttaaacccttcatcttcgtcgatgacgtcaaactagtgcccaagacacagagcccttgttttggcgatgatgatccagctaaaaaggagcctaggtttcaggagaagccggaccggcgacatgagctgtacaaagcacatgagtgggcccgagccataatcgaatccgaccaggagcagggcagaaaactgagaagtaccatgttggagttggaaaaacaaggcctcgaagctatggaggagatcttgacgtccagcgaacctctagaccccgcagaggtcggcgatctgttttatgactgcgttgacacggaaattaaattctttaaatag

SEQ ID NO: 16554 - DNA, 1620 bp, synthetic construct
  source 1..1620: mol_type = other DNA; note = Synthetic coding sequence
atggccacatccgccccactgagaagcctagaggaggaagttacatgctcaatctgtcttgactatctgcgggatcccgtgacaatagattgtgggcacgtattctgccgcagttgtactacggacgtgcggcccatttcaggcagtcgccctgtctgtcctctttgtaaaaagccttttaagaaggaaaatattcgcccagtttggcagctggcaagcctggttgaaaacatagaaaggctaaaagttgataaggggagacagcctggagaagtgacgcgggagcagcaggacgccaagctgtgtgaaagacatcgtgaaaagctgcattactactgcgaggatgatggcaagctgctgtgcgttatgtgtcgagagtccagagagcaccgaccacataccgcagtgttaatggagaaagcggctcagccgcaccgagaaaagatcctgaaccatttgtcgactctacgccgggaccgagacaagatccagggattccaggcaaagggcgaggccgatattctggctgccctcaagaagctccaagatcaacgccaatatattgtggcagaattcgagcaaggccatcagtttctgcgcgagagggaggagcacctgcttgaacagctggccaaacttgagcaagaattgacagagggcagggaaaaattcaaatctaggggagttggcgaattggccaggcttgctctggtgataagcgaactggaaggcaaggcccagcagccagcggcagagctgatgcaggacacacgggattttttaaatcggtacccaaggaagaaattctgggttggcaaacccattgcacgtgttgtgaaaaaaaagaccggggaattttcagataaactgttatcccttcagcggggtctgagggagttccaaggtaagctgctccgggacttagaatacaagacagttagtgttaccctggatcctcaatccgcgtcaggctacctccaactaagtgaggattggaaatgcgtcacatataccagcctgtataagagcgcatacctgcatccccagcaatttgactgcgagccaggcgtgctcggaagtaaaggtttcacctggggcaaagtttattgggaagtcgaagtcgaacgtgagggctggtccgaagacgaagaagaaggcgacgaggaggaggaaggggaggaggaggaggaggaggaggaggctggatacggagacggctacgacgattgggagactgatgaagacgaggagtctttaggcgacgaggaggaagaagaagaagaagaggaggaggaagtccttgagagctgcatggttggggtggctagggattccgtcaagagaaagggtgatctatctctaagaccagaggacggagtatgggcgcttcgcctttcatcatccggtatctgggcaaacactagccccgaggcggagttgtttcccgcgctgaggcctaggcgagtaggaatcgctctcgactatgagggcgggacagtgacttttaccaacgcagagagccaggagctgatttacactttcaccgccacatttaccagacgactggttccattcttgtggctgaagtggcctggcacacgcttgctgctacggccgtag

SEQ ID NO: 16555 - DNA, 390 bp, synthetic construct
  source 1..390: mol_type = other DNA; note = Synthetic coding sequence
atggctgagttgatacagaaaaaattgcagggcgaggtggagaaataccagcagctccagaaagacctgtctaaatctatgagtgggagacagaaactggaggctcagctgactgagaataatattgtcaaagaggagctggcattgcttgacgggagcaatgtggtgtttaaactgctgggccctgtgctggttaagcaggaattgggagaagccagagccacagttgggaaaaggcttgattatattaccgccgagatcaagcgttatgagtctcaactgagagatttggagagacagtctgagcagcagagggagactctggctcagctgcagcaggagttccagcgggcccaggccgcaaaggccggggctcccggaaaagcatag

SEQ ID NO: 16556 - DNA, 1740 bp, synthetic construct
  source 1..1740: mol_type = other DNA; note = Synthetic coding sequence
atgtccgcggccaacccagagactccgaactcgaccatctctcgcgaagccagcactcagtccagtagcgccgcggcgagtcagggttgggtccttccggagggcaagatcgtccctaatactgtgttcgtcggaggcattgacgcacgaatggatgaaactgaaatcgggagctgctttggcagatacggatccgtgaaggaggtgaagatcataaccaacagaaccggcgtttctaaaggctatggattcgtgtctttcgtcaacgacgtggatgtgcagaagatcgtcgggagtcagatccactttcacgggaaaaaactcaaactgggccccgccataaggaaacagaagctttgtgcaagacacgtccagccccgaccactggtagtgaacccccccccccccccgcagttccagaacgtttggcgcaatcctaacacagagacttacctgcagccccagatcacgcctaaccccgtaacccagcatgtgcagagtgctgcgaatcccgaaacaccaaactccaccatcagccgtgaagcttcgacacaaagcagcagcgctgctgcctcccaaggttgggtcctgccggaaggcaagatcgtgcccaatacggtcttcgttggtggtatcgatgctagaatggacgaaacggagatcggatcctgcttcgggcgatatggttctgtcaaggaagtgaagatcatcactaatagaactggagtaagcaagggttatggattcgtgtcttttgtgaacgacgttgacgtccagaagattgttggttcccaaatacacttccacggcaagaaactcaaactcggacctgccatcaggaaacagaagctctgtgccaggcatgtgcagccgaggccattagtggttaaccccccgcccccacctcagttccaaaacgtgtggcgaaatccaaacaccgaaacctacttacagcctcagattactcccaacccggtgacacagcacgtccaggcttactctgcttaccctcattctcctggccaggtgataaccggttgccagctccttgtttataattaccaagaataccccacctatccggattccgctttccaggtcactactggataccagttgcccgtctataattaccaaccctttcccgcctatccccgtagtccatttcaagtcaccgccgggtatcagctaccggtgtacaactaccaagcatttccagcctatccaaactccccattccaagtggccacaggataccagttccccgtctataactatcagccattccctgcttaccccagttcaccgttccaagtaacggcgggctaccagttaccagtatacaactatcaggcgtttcccgcttatccgaactctccatttcaggtcgctacgggataccaatttcccgtttataactatcaggcattccctgcatatcctaatagccccgtacaggtgaccaccggatatcaattgccagtatacaactatcaggcattcccggcatacccaagcagcccgttccaggtcacaaccggctatcagctgcccgtttacaactaccaggccttccccgcttaccctaactctgcagtgcaggtgaccacaggctaccagtttcatgtgtacaactaccaaatgccccctcagtgtcccgtgggggaacagcgccgaaacctatggaccgaggcctataagtggtggtacctggtttgtcttatccagagacgggactag

SEQ ID NO: 16557 - DNA, 831 bp, synthetic construct
  source 1..831: mol_type = other DNA; note = Synthetic coding sequence
atgtatgcgagctggacgaaggcatgccggggcctcgaagaacttatcaatttaacccggctgaacgtgtcatacaaccacatagacgacctttccgggttaatccccttacacggtattaaacacaagctgagatatattgacttgcactctaaccggatagactcaatccaccacctcctacagtgcatggtgggtttgcacttcctcaccaacttgatcctggagaaggacggcgatgacaatccagtatgtaggctccctggttacagagctgttattctgcagaccctgcctcagctgaggatcctggattgcaaaaatattttcggcgagccagtgaatctgactgagataaattcgagtcaactgcagtgcttggagggcttattggacaatctcgtgagcagcgactctcctctcaacataagcgaagacgaaattattgaccgcatgcccgtcatcaccgctcccatcgacgaactggtccccttggaacagttcgcgagcacaccctctgacgccgtgctaacaagtttcatgagcgtctgccagagctcagagccagaaaagaataaccacgagaacgatctccagaatgagatcaaacttcagaagttggatgatcaaatcctgcagttgctcaacgagacaagcaactcgattgacaatgttctggaaaaagatccacggccaaagcgggacaccgatatcacatctgagtcggattatgggaactccaggaaaaatggagagaccaagaaggctgcagccggttccactgacaagacagatccacggggtggtactcaaagtttcagttgcaggtag

SEQ ID NO: 16558 - DNA, 1995 bp, synthetic construct
  source 1..1995: mol_type = other DNA; note = Synthetic coding sequence
atgggtgatgatggctcccctccagcgaaaaaaatgattaccgacattcacgcaaatggaaagaccattaacaaggtgccaacagttaaaaaagagcaccttgatgactacggggaggctcccgtggagactgacggcgagcatgtgaagaggacttgcacatccgttcccgaaacactgcacttaaatcccagcctgaaacatactctcgctcaatttcacctgtccagccagagctcactggggggccccgccgcgtttagcgctcgccacagccaggagagtatgagcccgacagtattcttacccctaccgagcccccaagttctgccaggacctctccttatcccttccgactctagtactgagctgactcagaccgtgctggagggcgagagcataagctgctttcaggtgggaggtgaaaaacgactttgcctacctcaagtgctgaacagtgtgctccgcgagttcacgttgcagcagatcaatactgtgtgtgacgagttatatatctattgctcccggtgtacttcggatcagcttcacattctgaaggtccttggaatcctgcccttcaacgctccatcttgcggactaatcacacttacggatgcccaacgactgtgtaacgccctgctgcgcccacgcacgttcccgcagaacgggtctgtgctgcccgctaagtcctccttggcgcagctgaaagaaacgggctctgcttttgaagtcgagcatgagtgtctggggaagtgtcaagggcttttcgcgccccaattctacgtgcagcctgacgccccttgcattcagtgcttggagtgctgtggaatgttcgccccccaaacattcgtgatgcattcacacaggtccccagacaaaaggacttgccactggggcttcgaatccgctaagtggcattgttatctgcatgttaatcagaagtatctcggtacccctgaggagaagaagctaaaaattatccttgaagagatgaaggaaaagttttccatgcgatctggaaaacggaatcaatctaaaaccgacgcccctagtggtatggagctgcagtcatggtatcctgtaatcaaacaggagggcgaccacgtgtcccaaacccacagctttctgcacccctcgtactacttatacatgtgcgataaggtcgtggcccccaacgtgagcctgacttctgcagttagccagagtaaagagctcacgaagacggaagctagtaaaagcatttcccggcagtccgaaaaagctcactccagtgggaaactccagaagacagtcagctatccggatgtgtctttggaggagcaggagaagatggacctgaaaactagtagagagttgtgcagccgtcttgatgcaagtatctccaataactccacaagcaaaaggaagagcgagtccgctacttgcaatctcgtgcgcgacattaataaagtggggataggcctagttgccgctgcctcctctccactacttgtgaaggacgtgatctgcgaggacgacaaagggaaaatcatggaagaagtgatgcggacttacttgaaacaacaagagaagctcaatctgatcctgcagaagaaacagcagctgcaaatggaggtcaaaatgttatcctctagcaaatctatgaaagagttaacagaagaacaacagaaccttcagaaggagctggaatccctgcagaatgagcacgcccaacgcatggaagagttctacgtggaacagaaagatttggagaagaaactggagcaaattatgaagcaaaagtgcacctgtgattcaaacctggagaaagataaagaagctgagtacgcagggcagctcgctgagctgcgccagcgactcgaccatgctgaggcagatcggcaggaacttcaggacgagctgcggcaagagagagaagcaaggcagaaattagagatgatgataaaggaactgaaattgcaaattttgaagagctccaagactgcaaaggagtag

SEQ ID NO: 16559 - DNA, 1068 bp, synthetic construct
  source 1..1068: mol_type = other DNA; note = Synthetic coding sequence
atggggcgaagggatctagtgagtggagggagcaatgagggtaacggaaaggaagattgggccatgaagactgttagtcttagatggaccaagctcccgcctgtcaagagcgccatccgcggacaagcacccgtcgtaccatatatgcgctacggccattctactgttttgatcgatgataccgtactgctgtgggggggaaggaacgataccgagggcgcttgcaacgttctttacgcatttgacgttaatacacataagtggtttaccccacgcgtgtctggcacagtccccggagcccgcgatgggcatagtgcatgtgtcctgggaaaaattatgtacatttttggggggtacgaacagcaagcagattgcttttctaacgacattcacaagttagacacttccacaatgacatggacattgatttgcacgaaaggatctcctgcccgatggagagactttcatagtgccacgatgctgggctcccacatgtatgtgttcggcggtagggcagacaggttcgggcccttccacagtaataacgagatttattgtaatcgcatcagggtgttcgatacccgaaccgaggcctggctggattgtcctcctactcccgtgctccccgaggggcgacgttcccactcagcctttggttataacggagagttatatatctttggtggatacaacgctaggcttaatcggcatttccatgacctttggaaattcaaccctgtgtcattcacttggaagaaaattgaaccgaagggaaaagggccctgtcccagacgacgccagtgctgctgtattgtgggggataaaattgtgctgtttggcggcaccagccccagccccgaagagggactgggcgatgagtttgatctgatcgaccactctgatcttcatattctagactttagcccatcgctaaaaacactgtgtaagcttgcagtgatccagtacaacttagaccaaagttgtctgcctcatgatatcaggtgggagttaaacgccatgacaactaacagtaacatctcacgaccaatcgtcagcagtcacgggtag

SEQ ID NO: 16560 - DNA, 1245 bp, synthetic construct
  source 1..1245: mol_type = other DNA; note = Synthetic coding sequence
atggccgctgccccaccttcctactgcttcgtggcttttccccctagagcgaaagatggactggttgtcttcggaaaaaattctgctcgtcctcgggatgaggttcaagaagtggtctatttcagtgcagccgatcacgagccagaatccaaggtagagtgcacctatatctctattgatcaggttcctcgtacatatgccatcatgatttctcggcctgcttggttgtggggcgctgagatgggcgccaatgaacacggggtgtgcatagccaatgaggcaatcaatactcgcgaacccgcggccgagattgaggcgcttctggggatggaccttgtgcgcctcggactcgaacgcggggaaaccgctaaggaggctctggacgtaatagtttccttgttggaggagcacggtcagggtggtaattattttgaggacgccaactcctgccactcgttccagagtgcctaccttattgtcgatagggatgaagcctgggtgttagagactattggtaagtactgggctgctgaaaaagtgacagaaggtgtccgatgtatttgcagccagctctccctcaccaccaaaatggatgccgaacatccagagctcagatcgtatgcccagagccagggctggtggactggcgaaggagaattcaattttagcgaagttttctctccggtggaagatcacctcgactgtggggcgggaaaggactcactggaaaagcaagaggaaagtatcacagttcagaccatgatgaatacgctgcgggacaaagctagcggtgtctgcatcgactctgaatttttcctcacaactgcaagtggcgtcagcgttctacctcagaacaggagcagtccctgcattcactactttactggcacccccgatccttctagaagcatttttaaaccttttatcttcgtggacgacgtgaaactggtgcccaagacccaatcaccttgcttcggagatgatgacccagctaagaaagagccgagattccaggaaaaacccgacagacggcacgagctttataaagcccatgagtgggctagagctatcatcgagagtgatcaggagcaagggcggaagctccggtctaccatgctcgagctcgagaagcaggggctggaggccatggaagagatacttacaagcagcgaacctctagaccccgccgaggtgggcgacttattttacgattgtgtggatacggaaataaagttcttcaaatag

SEQ ID NO: 16561 - DNA, 1200 bp, synthetic construct
  source 1..1200: mol_type = other DNA; note = Synthetic coding sequence
atggccaccggcgacttaaaaaggagcctgcgaaaccttgaacaggtcctcaggctgctgaattatcctgaggaggtagattgcgtcgggcttatcaagggggatcctgcagcatctttaccaatcatttcttacagtttcacctcttatagtccatacgtgactgaactgattatggaaagtaacgtcgaactgattgcaaagaacgaccttaggtttatcgatgccgtctataagttactgagagatcagttcaattacaagcctatcttgacgaagaaacagtttatccagtgcgggtttgccgagtggaaaatccaaatcgtgtgtgatattctgaattgtgtaatgaagaaacataaggaactgagttcactgcagaagatcccgtctcagcaaaggaagaagatctcatcaggcaagagcgagcctcctcttggaaatgagaaaatttccgccgaagccgtgggcgtggacatttctgggagatttatgacatccggaaagaaaaaagccgtagtcatccggcatctatataatgaggacaacgtcgacatctctgaggatacactgtcaccaattactgacgtcaatgaggccgtggacgtgtcggatcttaatgccaccgagattaagatgccagaggtgaaggttcccgagatcaaggccgagcaacaggatgtcaatgttaaccctgagataactgccttgcagactatgctggctgaatgtcaagaaaatctgaagaagcttacttctatagagaagcgattagattgtttggaacagaagatgaagggcaaggtgatggtggatgaaaatacgtggacgaatcttctatctcgggtgactctccttgaaactgaaatgttgttgtccaaaaagaacgatgagtttatcgaattcaacgaggtgtctgaagactacgcatcttgtagcgacatggatctcctgaacccacacaggaagtcggaagtggagcggccagcttcaatcccgctgtccagcggctactctaccgccagcagtgacagcacacctcgtgcttccaccgtaaattactgtggtctaaatgaaatctccgaaaatttccccgcttggtccgcaactagctcctgcagcagtctgtcctggctgctgcgtggacacacttcttacttaagctcccagagctttgcctggcccctctcctgcgtctag

SEQ ID NO: 16562 - DNA, 1317 bp, synthetic construct
  source 1..1317: mol_type = other DNA; note = Synthetic coding sequence
tgatgtgccggagctgaaagaccaagaagacgaggacgactgtgggattcctccggcgtaccccaaagacagaaaagacctggaccttggcgtacccaaacgcaggaacagatgtctcgtgatgtttgtattcatacttggccctgcacatactatctggaacctaagcgtcgctgggtgacaggacagctgtcactaaccagtttgagccttcggttcatgactgactccaccggggagattttagtgagtttccctctcagttctattgtcgaaattaaaaaagaggcatcccatttcatattcagctccatcaccattttagagaaagggcatgccaagcactggttctcttccctgcgcccatcccgaaatgtcgttttctctatcatagagcatttttggcgagaattactgctctctcaacccggggccgtggcagacgcttctgtaccacgcactagaggcgaggaacttacaggcctcatggctggcagccaaaagaggttggaggatacggcgcgagttctgcaccatcagggccaacagctggatagtgttatgcggggccttgataagatggaaagcgatttggaagtcgccgataggttgttgacagagctcgagtcacctgcctggtggccgttctcatccaaattgtggaagacccctccagaaactaagccacgggaggacgtcagcatgacgagctgtgaaccgtttggaaaagaaggaatcctcattaagatccctgctgtcatatctcaccgcacagagtctcacgtcaaaccaggcaggctcactgttctcgtgtccggactggagattcatgactctagcagtctcctcatgcacagattcgagcgggaagatgttgatgatatcaaggtgcacagtccatatgagatatctattcgccaacggtttatcgggaagcccgatatggcctatcgcttgatcagtgctaagatgcccgaggttattcccattctggaggtgcagttcagcaagaagatggaactgctggaggatgcactcgtgctcagaagcgctcgaacctcatcgcccgcagaaaaatcctgcagtgtgtggcatgccgcaagcggcctaatgggaaggacattacatagagaacctccagccggcgaccaggagggcaccgctctccaccttcagacttctctgcccgccctgtccgaagccgatacacaggaactgactcaaggcttcaggccaatgtccctcagtacccaaactgttctcgtcatgctgtgctccgaatccgccggagctctgtggaggcagagactgtcatag

SEQ ID NO: 16563 - DNA, 711 bp, synthetic construct
  source 1..711: mol_type = other DNA; note = Synthetic coding sequence
atgacaggctacgaagcccggcttatcaccttcggtacatggatgtactcagtaaacaaagagcagctcgcgagagcagggttttatgcgatcggccaagaagataaagtacaatgtttccattgcgggggaggactggctaattggaaaccgaaagaagacccctgggaacagcatgcgaaatggtatcccggatgtaagtacctgctggaagaaaaaggccatgagtatatcaacaacattcacttgacacgttccctagagggcgcgttagtacaaacaacgaaaaagacgcccagcttaactaagagaataagtgatacgatatttccaaaccccatgctgcaggaagccatccgcatgggatttgattttaaggacgtgaagaaaattatggaagagcggatccagaccagcggtagtaattacaagactctcgaggtcctagtggccgatctggtgagcgctcaaaaggacacgaccgaaaacgagctgaatcagacttctctccagcgcgaaatttctcctgaagagcctctgaggcggctgcaggaagagaaattgtgtaagatatgtatggacaggcatatcgccgttgtgtttattccgtgcggacacttggttacctgcaagcagtgtgccgaagcagtggatagatgtccaatgtgcagtgccgtgatcgatttcaaacaaagagtgtttatgtcctag

SEQ ID NO: 16564 - DNA, 285 bp, synthetic construct
  source 1..285: mol_type = other DNA; note = Synthetic coding sequence
atgaaccctacaaatcccttttcaggacagcagccatccgctttctctgcaagtagcagtaacgttggcaccctgccttctaagcctccatttcgtttcggacaaccatccttgttcggtcagaactcgactctgagcgggaagtcaagtggtttctcccaggtgtcctcttttccggcatcttctggagtctcccactcaagttctgtccagacgctcggatttacacagacgagcagcgtcgggccattctccggcttggagcatacatctaccttcgtctag

SEQ ID NO: 16565 - DNA, 723 bp, synthetic construct
  source 1..723: mol_type = other DNA; note = Synthetic coding sequence
atggcaatagtgcagacccttcccgtacccctggaacccgcacccgaagctgccaccgcccctcaggctccagtcatggggtctgtctcctccctgatctcggggcgcccatgccctggggggcccgccccccctaggcatcacgggcctccaggacccacatttttccgccagcaggatggcctgctacgaggtggttacgaggcacaggagcctctgtgccccgccgtacctcctaggaaagctgtgccagttacaagcttcacatatatcaacgaagacttccggacggagtctcctcccagcccaagcagtgacgtagaggatgcccgcgagcagagggctcataacgcccacctgcgaggccccccacccaagctgattcccgtgagcggaaagctagaaaagaacatggaaaaaatcttgattcggccaaccgctttcaaacccgtgttgcccaaaccacggggagctcccagcttacctagcttcatggggccacgagcaacggggctatctggctctcaggggtccctcacccagttgtttggggggcccgcaagcagctcttcttccagttcaagctcttccgcagccgacaagcctctggccttcagcggatgggctagcggctgcccgagcgggacattgtccgatagcggccgcaacagcttgtcctcattacctacttatagtaccggcggtgctgagcccacaacctag

SEQ ID NO: 16566 - DNA, 1317 bp, synthetic construct
  source 1..1317: mol_type = other DNA; note = Synthetic coding sequence
atgtgcccgaaaaacgcttcctattacggcaacagagctgccaccctgatgatgctggggagattccgggaggccctgggcgacgcacagcaatctgtccgccttgacgacagcttcgtgcgtggccatctgcgcgaaggcaaatgccacctttcactgggaaatgccatggccgcatgcaggagctttcagagggctctcgagcttgaccacaaaaacgcccaagctcagcaggaatttaagaatgccaacgcggtcatggaatacgagaagatcgcagaaaccgatttcgaaaaacgggacttccgcaaggtcgtcttttgtatggatcgggctctggagttcgcacctgcttgtcaccgcttcaaaatcctgaaggcggaatgcctagccatgctggggcgatatcctgaggcacaatctgttgcatccgatatcttacgaatggactctacgaacgccgacgccctctatgtgcgcggcttatgtctgtattacgaagactgcatcgagaaagccgttcagtttttcgttcaggctctgcggatggcacccgaccacgagaaagcctgtatagcatgtcggaacgccaaagccctgaaggctaagaaggaagatggaaacaaagcatttaaggaaggcaattacaaactggcatatgagctctataccgaagctctcggcatcgacccaaacaacatcaagactaacgccaagctctattgcaatagggggacagtcaatagtaagctccgaaagctggatgatgccatcgaagactgtacgaacgctgtaaaacttgacgatacctacattaaagcatatctccgccgggcccaatgttacatggatacggagcaatacgaggaagccgtgcgagactatgagaaggtataccagactgaaaagacaaaggaacataagcaattgctgaagaatgcccagctagaactgaaaaagagcaagcgaaaggattattacaaaattttgggcgtagacaaaaacgcaagcgaagatgaaatcaaaaaggcctacagaaaacgggccctcatgcaccacccagaccggcactctggggcaagcgctgaagtgcaaaaagaggaagaaaaaaaatttaaagaggtaggtgaggcattcactatcctgtccgaccccaaaaagaagaccagatacgacagcggccaggatttagacgaggaagggatgaacatgggcgactttgatcccaacaacatatttaaggcattcttcggtggtcccggtggcttcagcttcgaggccagcggcccaggcaacttttttttccagttcggctag

SEQ ID NO: 16567 - DNA, 678 bp, synthetic construct
  source 1..678: mol_type = other DNA; note = Synthetic coding sequence
atggaagaagaggagatgaacgatggatcccagatggtgcggagccaggagtctctgacattccaggatgtggccgttgactttacacgggaggagtgggaccagctctaccccgctcagaagaacctgtacagagacgtcatgttggagaattatcgtaacctcgtagccctcggctaccagctgtgtaagccggaggtgatcgcccagctggagctcgaggaagaatgggtgatcgaacgcgattcacttctggatacccatcctggtgatcagtcacacgtcatgagtgtcgtgcgttcgtcagtgcacgctaggtggattgtggggaaggtgatcggcacgaaaatgcagaagacagctaaggtcagagttactaggctagtgctcgatccatacttattgaagtacttcaacaagcgtaagacctatttcgcacatgacgcactgcagcagtgcaccgtcggcgacatcgtccttcttcgggctctcccagtgccgagagccaagcacgtcaaacacgaacttgccgaaatagtctttaaggttggtaaggtgattgacccagtgactggtaagccttgcgctggtacgacttatctggagagtccgttgtctagcgagacaacccagctgagcaaaaacctggaagaactgaatatctcatcggcacagtag

SEQ ID NO: 16568 - DNA, 753 bp, synthetic construct
  source 1..753: mol_type = other DNA; note = Synthetic coding sequence
atgaccaccaaaaacttggaaaccaaggtgaccgtcacgagttcacctattcgtggtgctggcgacggaatggagaccgaagaaccccccaaatccgtggaagttacatccggagttcagtccaggaagcatcattcattgcagtctccttggaagaaggctgtgccttctgaatctcccggggtccttcaactgggaaagatgctcaccgagaaagccatggaggtgaaggctgttaggattttagtgccaaaagccgccattactcatgatatcccgaacaagaataccaaggtgaagtccttaggccaccataaaggggaattcctgggccaaagcgaaggcgtcatcgaacctaacaaggaactgtcggaggttaaaaatgtgttagaaaagttaaagaactccgagcgtaggttactgcaggacaaggaaggtttaagtaaccagctaagggtccagaccgaggtgaatagagagttgaagaagttactggttgcgtcagttggggacgacttgcagtaccacttcgagcgtctagctcgagagaagaaccagctgattctggagaatgaggcccttggcaggaacaccgcccagctgtccgagcagctggagaggatgtctatacagtgcgatgtgtggcgatcaaaattccttgcttcccgcgtgatggcagacgaacttactaatagtagagcggcgttgcagcgtcagaacagggacgcccatggtgccatacaggacctgtag

SEQ ID NO: 16569 - DNA, 387 bp, synthetic construct
  source 1..387: mol_type = other DNA; note = Synthetic coding sequence
atgctatgttggggatactggagtctcgggcaaccagggattagcactaacctgcaagggatcgttgccgaaccccaggtgtgcgggtttataagcgatcgcagtgtcaaagaggttgcctgcggtggcaatcactctgttttcctgctggaggatggggaagtctacacatgtggactaaacaccaagggacagctgggccatgagagggaaggcaacaagccggaacaaatcggagctctggccgatcagcacatcattcacgtagcctgcggggagtcccatagccttgctttatctgatcggggtcaactgttctcttggggtgctgggtcagacggccaactgggtctcatgactacggaagattctgttgccgtgccttag

SEQ ID NO: 16570 - DNA, 1617 bp, synthetic construct
  source 1..1617: mol_type = other DNA; note = Synthetic coding sequence
atggacgtggacaaagaattgggcatggagtctgtcaaagctggagctagcggcaaacccgagatgaggctgggaacacaggaggaaacttctgagggcgacgcaaatgagtctagcctccttgtgttatctagtaacgtccctctacttgccctcgagttcctggagatagcccaggccaaagagaaagccttcctacccatggtgtctcatacattccacatgaggacagaggaatctgatgcttcccaggagggagatgacctccctaagagctcggccaatacaagccaccctaagcaagacgactcacctaaaagctctgaagaaaccatacaacctaaagagggcgacatccctaaggcaccagaggaaacaatccagagcaagaaggaagatcttccaaaatcaagcgagaaggcaatacagcccaaagagagcaacatccctaaaagttctgcaaaacctatccagccgaagctggggaacattcccaaagcgagtgtcaagccttcccagcctaaagaaggcgatattcctaaagcccctgaggagaccatccagtcgaagaaggaggacctgcccaaatctagtgaagaagccattcaacctaaggagggcgatatccctaagtccagcgccaagcccatccagcctaaactgggtaatattgcgaaaactagtgttaagccttcccagcctaaagagtctgacattccaaagagcccagaggagacgattcagcccaaggagggagatatcccaaagtctagcgcaaagcctatccagcccaaactcggcaacatcccaaaggccagtgtgaaaccctctcaacctaaggaaggagacatatcgaaatccccagaagaggccatccaaccgaaggaaggagacctccccaagtcactggaagaagcgatccaaccaaaagagggtgacatccctaagtccttggaggaagccatccagcctaaggagggcgatattcctaaaagccccgaagagactattcagccaaagaagggggatattccaaagtctccagaggaagctattcagccaaaagagggggacatccctaagtcacccaagcaggctatacaacctaaggaaggagacattccaaagtctctggaggaggccatcccccctaaggaaatcgatatacccaagtcgccggaagaaacaatccagccaaaggaggacgacagtccaaaatctctggaagaagctactcctagcaaggagggtgatatcctcaagcccgaggaggagacgatggagttccccgagggggacaaggtaaaagtgattttgtctaaggaagattttgaagcgtccctgaaggaggcaggcgagcgcctagttgccgtcgacttctccgcaacctggtgtgggccatgcaggaccatccgaccgttcttccatgctcttagtgtaaagcatgaggacgtcgtctttttggaagtggacgcagataactgcgaggaggttgtgcgtgagtgcgccatcatgtgcgtgcctacattccaattttacaagaaggaggagaaagtggatgaactatgtggtgccctcaaggaaaagctggaggccgtcattgccgagctgaaatag

SEQ ID NO: 16571 - DNA, 153 bp, synthetic construct
  source 1..153: mol_type = other DNA; note = Synthetic coding sequence
atggccagcgaggaattgcagaaagacctggaggaggttaaggtgcttctcgagaaagcaacacggaagcgtgttagggacgcattaacggccgagaaaagcaaaatcgagaccgaaattaagaataaaatgcagcagaaatctcagaaatag

SEQ ID NO: 16572 - DNA, 1527 bp, synthetic construct
  source 1..1527: mol_type = other DNA; note = Synthetic coding sequence
atggccacggattggttggggtcaatagtgtcaattaattgtggggacagtctcggagtgtaccagggaagggtcagcgcagtcgaccaggtgagccagacaatcagcctgacgcgtccatttcacaacggggtaaagtgcctcgtcccagaagtcacattccgggccggggatattaccgaactgaaaatcctggagattccagggcccggagataaccagcattttggagatctgcaccagactgagctcggcccttccggcgccgggtgccaagtcggaattaatcagaacggcactggcaaattcgtgaagaagccagcctccagcagttctgcacctcagaacataccaaagaggactgatgtaaagagccaagacgtagctgtttctcctcagcagcagcagtgctcaaaaagctacgttgataggcatatggagagtctgagccaatcaaagtctttccggaggaggcataattcttggagctcttctagtaggcacccaaatcaggccactccaaaaaagtccggcctcaagaatggccagatgaaaaataaagatgatgaatgcttcggagacgacatcgaagaaattccagacactgattttgactttgagggtaatctggccctttttgacaaggctgccgtgttcgaggaaatcgatacctacgaaaggcgcagtggtaccaggagcagaggcattccaaatgagagacccaccaggtatcgccatgatgaaaacatactcgagtccgagccaattgtgtataggagaatcattgtgccgcataacgtgtccaaggaattctgtacggactccggcctcgttgttccgagtattagttatgaattgcacaagaaactcctgagtgtggccgaaaaacacggcctgaccctggagcgaaggctggaaatgactggagtctgtgccagccagatggccctgaccctgctgggggggccgaaccgcctgaacccgaagaacgtccatcagagacccaccgtggctctgctctgcggaccacatgtgaagggggcacagggaatctcatgtggccgtcacctagctaatcatgatgtgcaggtgatcctgtttctgccaaacttcgtaaaaatgcttgagtccatcaccaatgaactgagcctgttctcgaagacccaaggacagcaagtatcttctctgaaggaccttcccaccagcccagtggatctcgtaatcaactgtcttgattgccccgagaatgtgttcttgagagatcagccttggtataaggcagctgtggcttgggctaatcagaatagggccccggtcttgtcaatagatccccccgtgcatgaggtcgaacaaggcatagacgcaaagtggagtctcgcgcttggattgccactgcccctgggagagcacgccggaagaatttacctctgcgacatcggcatcccacagcaggtatttcaggaggttggcataaattatcattcaccgtttggatgcaaattcgtcatccctctgcattcagcctag

SEQ ID NO: 16573 - DNA, 3846 bp, synthetic construct
  source 1..3846: mol_type = other DNA; note = Synthetic coding sequence
atgacattctacagctggatcccctaccacaggcaggcgcccctgaaccaccgacgggtgtgctccgccgagggggcagggagccctggccccgcccttgatccaagatggctacctaccgaagctcatcttctcgaagcccacagactactcctccagtcagtgctttgcgaccggccaagggagtccatacaattgcactttcgcctgtcgatggcaagtcagctgcaggttttttccccgccttccgtttcttcaagcgccttttgctcagctaagaaactgaagattgaacccagcggatgggacgtgtcgggccagagtagtaacgacaagtattatacacacagtaagactctccctgcgacacaggggcaggcaaattctagccaccaagtcgctaattttaatattccagcatacgaccaaggactcctgttacccgctcccgctgtagagcacattgtggtgaccgccgcagatagttcagggagtgcagctacatccaccttccagtcctcccagactcttacccacagaagtaacgtgtccttactggagccgtatcaaaaatgcggcctaaagcggaaaagtgaagaggtggatagtaatggatcagttcagataatcgaggaacatcctcctctgatgcttcagaacaggactgttgtaggagctgctgcaacgactaccactgtcacaactaagagctcttccagttctggcgagggagattatcaattagttcagcacgagatcctgtgcagcatgaccaattcctacgaggttctcgaatttctgggccgtggcacattcggacaggtggccaagtgctggaagcgaagcactaaagaaattgtagccattaaaatcctgaaaaaccatccctcgtatgcccgtcagggacagatagaggttagcatattgagcaggttgtctagcgagaatgcggacgagtataattttgttagatcttacgagtgctttcagcacaagaaccacacgtgtctcgtattcgagatgttggagcaaaatctctacgactttctgaaacagaataagtttagccccctgccactgaaatatataagacccatcctccagcaggtcgctactgcattgatgaaacttaagagcctggggctcattcacgccgacctgaagcccgagaacataatgttagtggatcctgtgcggcagccctatcgcgtgaaggtaattgacttcgggagcgcctcccatgtttccaaggctgtgtgctcgacatacctgcagagccggtattaccgcgcacccgaaataatactcggattgccgttttgtgaagcgatcgacatgtggagtttgggctgcgtcatcgcggaactcttcctgggatggcctctttacccaggagcctccgaatacgatcagattagatatattagccaaactcagggcctccccgccgaatacctgttgagcgccggcaccaagaccacacggttcttcaacagggatcccaacctcggatatccgctgtggcgtttaaagaccccagaagagcacgagttagagacagggatcaagtctaaagaggcccgcaagtatatctttaattgtttagatgatatggctcaggttaacatgagcaccgacctcgaaggtacagatatgctagcagaaaaagccgaccgtcgggaatacatagatttattgaagaagatgctaacgattgacgctgacaaacgcatcactccactcaagaccctcaatcatcagtttgtaactatgacgcatcttctcgattttcctcacagcaaccacgtcaaaagctgtttccaaaacatggagatttgcaagagacgcgtgcatatgtacgacactgtatctcagatcaagagcccattcacaacacatgtggctcctaatacgtctacaaacctaacaatgagtttcagtaaccagcttaatacggtccacaatcaagcgtccgtgttggcctcaagctcaacagcagccgccgcaaccctgtctctggccaactcggacgtgtccttactgaattatcagtcagctctgtacccttctagtgctgctcccgtacctggagtggcccagcagggagtgagcctgcagcccggaaccacccagatctgcacacaaaccgacccctttcagcagacgttcattgtgtgccccccagcatttcagaccgggctgcaggccacgacgaagcactctggctttccggttcgtatggacaacgctgtgccaatagtgccccaagctccagccgcccagcctctgcaaattcagagtggagtactcacccagggaagctgcactccactgatggtggcgaccttacatccacaggtggccacaattactcctcagtatgccgtgccatttactctgtcatgcgctgcaggccggcctgccctggtagagcagaccgcagccgtgctgcaggcatggcccggaggaacgcaacaaatcttgctgccaagcacatggcagcaactacccggggttgctttacataatagtgtccagccaacagcaatgatccccgaggcaatgggatctggccagcagcttgcggattggaggaacgcccacagccacggcaaccagtactctacaattatgcagcagcccagcttgcttaccaaccatgtcactctagctacggcacaacccctaaatgtaggggtagcacacgttgtcagacagcaacagtcatcctctctgcctagtaaaaagaacaaacagtctgcacccgtatcgagcaaaagtagcctcgacgttctcccgagccaggtgtattcactggtcgggtcctcaccactgcggactacatccagctacaacagcctggtaccagtacaggatcagcatcagcccattattattcctgatacaccgtcccccccagtaagtgtgatcacaatcagaagtgacacagacgaggaagaggataataagtataagccttccagctcaggcttgaagcctagatctaacgtcatttcatacgtgaccgttaacgattcgccggatagcgacagctcattatcctcaccctactccacggacacattgtcggcgctgagagggaatagtgggagtgtgctggaaggccctggcagagtggtggcagatggaaccggcaccaggacaatcattgtgccgcccctcaagacgcaactaggtgactgcacagtcgccacccaggcatcagggttactcagtaataaaacaaagcctgttgcgtcagtgtccgggcagtctagtggttgttgcatcacccccactggctacagagcccaaagagggggcacgtcagccgcgcaacccctgaatctgagccagaaccagcagtcctctgccgcacctacgtcacaggagcgcagcagtaatcccgcaccccggagacagcaggccttcgtggcgcccctcagccaggccccttataccttccagcacggtagtccgttgcattccacaggacacccccacttagcccctgcgcctgctcacctgcctagtcaggctcacctgtacacctacgccgcgcccacgtctgctgcagctctcggatctacgtctagcatcgcccacctgttttctccacaaggctcctcacggcacgccgctgcatacactacccaccctagcactcttgtgcaccaggtcccagtctctgtgggacccagtctgctgaccagtgcatcagttgcccctgcccaatatcagcaccagttcgcaacccaaagttacataggatccagtaggggcagcaccatttacaccgggtaccctctgagccccaccaaaatcagccaatatagctacctgtag

SEQ ID NO: 16574 - DNA, 1071 bp, synthetic construct
  source 1..1071: mol_type = other DNA; note = Synthetic coding sequence
atgacaagtgttacccggagcgaaatcatcgatgaaaaggggccagtcatgagcaaaactcatgaccaccaacttgaatctagtctgtcgcccgtggaggtttttgcaaagaccagtgccagcttggagatgaaccaaggcgtaagcgaggaaagaatccatttagggtcatcaccaaaaaaggggggcaactgcgacctaagtcaccaagagcgcttacagtccaagagccttcacctaagcccgcaagagcaatcggcatcctaccaggatcgacgacaatcatggcgtcgagctagcatgaaggagacaaatcgtagaaaaagccttcacccgattcaccaggggatcacagaactttctcgctccatcagcgtggatttggcagaaagcaaaagacttgggtgtctgctcctgtccagttttcagtttagcatccagaagctggagcccttcctgcgagacacaaaagggttctccctggaatcatttcgtgctaaagccagctctctatctgaggaactgaagcacttcgctgatgggctcgagaccgatggcacactgcagaaatgcttcgaagattcaaacggcaaagcctcagacttctccctagaggccagtgtcgccgagatgaaggagtatattacaaaattcagtctcgagcgccagacatgggaccagctcctccttcactatcagcaggaagctaaggagattttgtctagaggttccactgaggcaaaaatcacagaagtgaaggttgagcctatgacctaccttgggtcaagtcagaacgaggttctcaatacaaagccggattatcagaagatactgcagaatcagagcaaagtgtttgactgtatggagctggtcatggacgagctgcaagggtccgtcaaacagttgcaggcatttatggacgaaagtacccaatgcttccagaaggtctcagtgcagctgggcaaaaggtccatgcagcagctggacccaagcccagcccgcaaactgcttaagctccagctgcagaatccccccgccatccacgggtcgggctccgggagctgccaatag

SEQ ID NO: 16575 - DNA, 2748 bp, synthetic construct
  source 1..2748: mol_type = other DNA; note = Synthetic coding sequence
atgcaaggacccgacgcccctctgctgctttccgcgcgagagctgggacctgggcggagggggtctgcctcctggtatcgacaggaaggtggcgcggtgtgtaattggctgcgaaagccacagccactcgaacctcggacatcgttccctagcgcgagaaggtccgagtttcgccccccccggcgactgccatgggcaggaccagcgtcagcccagagtgaggaaggacatgcaggtggaaggtgccaggcaggctcgccagcccctgctcgccggctgagcggtgcattcaaaaccttggtaccgggcactcatgcccagggagcttccgatactcaccccttgggacccccccatacacccgtcctggacccatcgccccaagatggctttccagtgttgtggcgggggtcctcaaaggccagccatatgaatcgtttaaggaacgcaaagatatatgtagagagagccgtcaagcagaaaaaaatttttaccatacagggctgctatcctgtcattagatgtttgttgcgacgtcgcggctgggtggaaaagaagatggtgcacagatctggacccacgctgctcccaccccagaaggatctagattcttctgcaatgggggacagcgatacaaccgaagacgaagacgaggacgaggatgaggagtttcaacccagtcagttattcgattttgatgatctgctgaagttcgacgatctggacggcacacatgccctgatggttgggctgtgtctcaatctgaggaatttaccctggtttgacgaagtcgacgctaactcttttttcccccggtgttactgtcttggcgccgaggacgataagaaagccttcattgaggacttctggttgaccgctgccagaaatgtgttgaaactggtcgtgaagagcgaatggaaatcatacccaatccaagctgtggaggaggaggcatccggtgacaagcagcctaaaaaacaggaaaaaaatccggttttggtgtcccctgaattcgtcgatgaggctctctgtgcatgtgaggaatacctgagcaacctggcccatatggacatagacaaggacctggaagctcccttataccttactcccgaaggttggtcgctgtttctgcagagatactaccaagtggtacacgaaggcgctgaacttcggcacttagatacacaggtgcaacggtgtgaggatatcctacagcagcttcaggccgttgtgccacagatcgacatggagggtgataggaacatttggatcgtgaaacccggcgcaaaatcacgtggccggggtattatgtgcatggaccacctggaggagatgctgaagcttgtgaacggtaatcctgtggtgatgaaggacgggaagtgggttgttcaaaaatatatagaacgcccactcttgattttcggcaccaaatttgatctgaggcagtggttccttgtgactgactggaatccactgacggtctggttctatcgcgacagctacatccgcttctcgacacaaccgttttcacttaaaaatctggataattccgtccacctttgcaataactcaatccagaagcacttggagaattcttgtcacagacatccccttttgccacctgacaacatgtggtcttctcagagatttcaggcccaccttcaagagatgggggcaccaaatgcatggtcaaccataatagttcctggcatgaaggacgccgtgatccacgctctgcagacatcgcaagacactgtgcagtgtagaaaggcctcattcgagctgtatggggccgattttgtgtttggtgaagacttccagccatggctcattgaaataaacgcctcccccaccatggctccaagtactgccgtgactgctcggttatgcgctggagtccaggcagacacactgcgggtggttatcgaccggatgctggaccgaaactgcgatacaggcgcatttgaactgatatacaaacagcccgctgttgaagtgcctcagtatgtgggaattagactgctagtcgaggggtttacaatcaaaaagccaatggccatgtgtcaccgcagaatgggcgtccggcccgccgtgcctcttctgacacaacgcggcagcggcgaggccaggcaccactttccatcacttcacacgaaggctcagctcccgtcacctcacgtgctgagacatcaaggccaagtgttgagaaggcaacactccaagctcgtaggaacaaaggctctctctaccacaggcaaagctcttagaactctgcctactgccaaagtttttatcagtcttccgcccaacctggattttaaagtggccccaagcattctgaaaccaaggaaagcacccgcattgctctgtctgcggggcccccagctcgaagtcccttgctgcctgtgccccttaaaaagcgagcagttcctggccccagtgggcagaagccgccctaaggccaactcccgccccgactgcgacaaaccccgcgccgaggcatgtccaatgaaacggctgagccccctaaagcctctacccctggttggcacattccagagaagaagggggctgggagacatgaagcttggcaagcctctccttcggttccccaccgcgctggtgctcgatcctacccctaataagaagaaacaggttaagtacttaggattagactccatagccgtcggaggcagccgggtcgatggagctaggccctgcacgcctggaagcactgccagggcttag

SEQ ID NO: 16576 - DNA, 2463 bp, synthetic construct
  source 1..2463: mol_type = other DNA; note = Synthetic coding sequence
atgcggataagtagctgttccgatgagtcttcaaattcaaattccagccgcaagtctgataatcacagcccggccgtggtcacaacaacggtctcctccaaaaagcagccttccgtcctcgtgacgttccctaaagaggagcgcaagagcgtgtctggtaaagcatccattaagctgagtgagaccatatccgaaggtacctccaatagcctttctacttgcacaaagagtggtccttctcccttgtccagcccaaatggaaaattaacagttgcttctcctaaaagagggcagaagcgggaggagggctggaaggaagtcgtccgccgtagcaagaaggtgagcgtaccctccactgttatctctagagtgatcgggagaggtgggtgtaatatcaacgctatccgcgagtttacaggagctcacatagacattgataaacaaaaagataaaacaggggaccgcatcattactatcagaggtggcaccgaatccacacgccaggccactcagctcattaacgcattgatcaaagaccccgacaaggaaattgacgagctcattcctaaaaataggctgaagtcctctagtgctaatagcaaaattgggagtagcgctcctaccaccaccgcagccaacactagtctcatggggattaagatgaccaccgtggcactctcttctacatcacagaccgccaccgctctgactgtgcctgccatcagctccgcttcaacccacaagactatcaagaaccctgtaaacaatgtccggccaggattcccagtgtccctccctctggcatacccccccccccaattcgcccatgccctgcttgccgcccaaactttccagcagattcggccccctcggctcccaatgacccacttcggcgggacctttccccccgcccagtctacatggggtcccttcccggtgagaccattgtccccagcgagagctaccaactctcctaaacctcacatggtgccccggcatagcaatcagaactcttctggcagtcaagttaatagcgccggcagtcttaccagtagccctaccactaccacaagctcctcagcttctacagtgcctgggacctctactaacggatccccgtcctccccaagtgttcggaggcagttgtttgtcacagtggtgaaaacttctaatgccaccaccaccactgtgactacaacagcctccaataataatacagcccccacgaacgctacctaccctatgccaaccgctaaagaacattatcctgtctcttccccatcatctccgtctccacccgcccaaccagggggagtgtcccgaaattcccccttagattgtgggtcagcctcaccaaacaaggtggcaagttcttctgagcaggaggcagggagtccaccagtggtagagacaactaacactaggccacctaacagcagctcctctagcgggtcttcttctgctcactctaaccagcagcagccacccgggtctgtgtcccaggagccaaggccacctctgcagcagtcccaggtgccaccacctgaagtgcgaatgactgtgcctcccctggctaccagctccgcacctgtggcagtgccttcaaccgcaccagtaacataccctatgccgcaaacacctatgggatgtccacagcccaccccaaagatggagaccccagcaatccgccctccacctcacggcactacggcccctcataagaattctgcctccgtccaaaatagctcggtcgcagtgctgtctgtaaaccacatcaaacgcccccactcagtcccaagcagcgtgcagttaccttcaaccctgagtacacagtctgcgtgccagaatagcgtgcacccagccaacaagcctatcgcacccaacttttccgccccactgccatttgggccatttagtactttgtttgaaaactcacctaccagcgcgcacgctttttggggtggatccgttgtctcttcgcagagcaccccagagagcatgctctccgggaaaagttcatatctgccaaactcggaccccctgcatcagtcggataccagcaaggcgccaggatttaggcctcctctacagagacccgcgccgtcccccagtggaatcgtcaacatggattccccatatggctctgtcacaccctcgtcaacccacctgggcaacttcgcttctaatattagcgggggccagatgtacggacccggagcacctttgggaggagccccagctgctgccaattttaaccgacagcacttctcccctctttccctgctgaccccatgcagttctgcctctaacgactcctcagctcagagtgtatccagcggtgtgagagccccatctcccgcaccaagctctgtcccgctgggctccgagaaaccttctaacgtgagtcaggacatagtcgctagcggcccattaaaaggcttggtcgccattaagactaaatag

SEQ ID NO: 16577 - DNA, 6033 bp, synthetic construct
  source 1..6033: mol_type = other DNA; note = Synthetic coding sequence
atggagaaggctactgtccctgttgccgctgctacagcagcagagggcgaaggatccccccctgccgtggccgctgtggcaggacctcccgctgcagccgaagtgggaggtggtgttggaggatctagtcgcgcccgcagcgcttcttcaccgcgcggaatggtacgggtgtgtgatctactgcttaaaaaaaaaccaccacagcagcagcaccacaaggctaaaaggaaccgcacttgtcgccctccctccagtagtgagtcctcaagcgattcagacaactcagggggtggcggcggcgggggcggtggcggcggcggcgggggcgggacttcatctaataacagcgaggaagaagaggacgatgacgatgaagaagaggaggtgtcagaggtagaatcattcatattggatcaggacgatctcgagaatccaatgttagagacagcatctaaactcctgttgtcaggcaccgcggacggcgcagatctccggactgttgaccctgagacccaggctagattggaagctcttttggaagccgctggcataggcaaactgtctaccgcagacggcaaggcttttgctgatcccgaagtactgaggcgcctaacatccagtgtttcttgtgctcttgatgaggccgcggcggcgctgactaggatgcgcgcggagagcaccgccaacgccgggcagtcagataatagatccctggccgaagcctgtagcgagggcgatgtcaatgcagtgagaaagctgctgattgaaggaagaagcgttaacgagcacacggaagagggagagagcctgctgtgtctggcctgttctgctggttactacgaactggcccaagtgcttttggccatgcacgctaatgtggaagatagaggcattaagggggacatcacccctcttatggcggcggcgaatggtggccacgtcaagatcgtcaagcttctactagcacacaaagcagatgtcaatgctcaatcatcaacaggtaatactgctcttacttacgcctgtgcaggcggctacgtcgacgtggtcaaggtgctgctggaatccggggctagcattgaggaccacaatgagaacgggcatactcctctaatggaggctggcagtgcagggcatgtggaggttgccagactgctactggaaaacggcgccggaatcaatacacactccaatgaattcaaggagtccgccctaactttagcctgctacaaaggccacctggaaatggtgcgattcttgctggaagcaggggcagaccaagagcacaaaactgatgaaatgcataccgctctgatggaggcatgtatggacggacatgtcgaagtggcccgcctgctgcttgactccggggcccaggtgaacatgccggcagatagcttcgaaagccctttgacactggctgcttgcggaggtcatgtggagctagctgctttgctgattgagaggggtgcgtcgctggaagaagtgaatgatgaggggtacaccccacttatggaggcagctcgcgaagggcacgaggagatggttgcgctgctgcttggtcagggcgctaacattaatgctcagacagaggaaactcaggagaccgcattgaccttggcctgttgcggaggattcctggaagtggctgatttccttatcaaggctggtgcagacatagagctgggctgtagcacccccctgatggaggctgcacaggagggtcacctggagctagtgaagtacctgttggcggctggcgctaacgtacatgccactaccgctacgggcgatacagctcttacatatgcctgcgaaaatggtcacacagatgttgcagacgtgctcttacaagccggggccgacctggaacatgagagcgagggcgggagaacaccccttatgaaggcagctagagcaggtcacgtgtgcacagtgcagttcttgatctcaaagggcgcgaacgtgaatagaaccacggccaacaatgaccacaccgtactgagtctcgcatgtgcaggcggacacttggctgtagtcgagctgctcctggcccacggagccgacccaacccatcggctgaaagacggaagcacaatgctgattgaggcggcaaaaggcggccacactagcgtcgtctgctacctccttgattaccccaataatttgctgtccgcccccccgcccgatgtaacacagcttacccccccatcacacgacctgaatcgagcccccagagtccctgttcaggcactgccaatggtggtgcctccacaggaacctgacaagcctcctgctaacgttgccaccaccctgcctatccgaaacaaggccgcctcaaagcagaaatctagttcccacctccccgccaactctcaggatgtacaaggctacatcaccaaccagagcccagaatcgatcgttgaagaggcccaaggtaagctcactgaactggaacagcgtattaaggaggccatagagaagaacgcacagctccagagcctcgaactcgcacacgcagatcagctcacaaaggagaagattgaagagttgaataaaacacgggaagaacagattcagaaaaagcagaaaatactcgaggaattacagaaagtggaaagggagctccagctgaaaacgcagcagcagctcaagaagcagtatctcgaagtcaaggcgcaaaggatccaactacagcagcaacagcaacagtcatgtcagcacctagggctcttgacccccgtcggcgtgggggaacaactgtctgagggcgactacgcccgactacagcaagttgaccccgtcctcctcaaggatgaaccacaacagacagctgctcaaatgggctttgcccccattcagccactggcgatgccacaagctcttccattggccgcagggccacttcccccaggaagcattgctaatctcaccgagctccaggtcctctccagcctcctgcaaccctgttttcttagtacgctgccgctgatacttatgcaccgactgagagttattatgactcgacctaaatcctcttcaaccagcgagtccggagattcggataatatgcgcatctcttcatgtagtgatgaaagctctaactcaaatagtagcaggaagagtgacaatcactcgcccgcggtcgtgacaaccaccgtgagctcgaagaaacagccgagtgttctggtaacattccccaaggaggagcggaagtctgtaagtgggaaagctagcatcaaactttctgagactatttctgaaggtacctcaaactctctctccacctgcaccaaatctggccctagtccactatcttctccgaacggaaagctgaccgtggcttccccgaagaggggccagaaacgcgaggaaggctggaaggaagtagtgcgcagaagcaaaaaggtgtctgtacctagtacggtgatatcgcgggtgattggtcgcggaggttgcaatattaacgccatccgggaattcaccggcgctcacatcgacatcgataagcaaaaggataagacgggcgaccgcattatcaccatccgcggaggaacagagtctacgcgtcaagctacccagctcattaacgctctgataaaagatcctgacaaagagatagatgagttgattcccaaaaaccgtttgaaatccagttctgccaacagtaaaatcggctcttccgcgccaacgacaacggccgccaatacttcccttatgggaattaagatgaccactgtcgcactgtcaagcacctcccaaactgctactgcactgactgtgcctgcgattagcagtgcttctactcacaagacgataaagaatccagtgaacaacgtgaggccgggctttcccgtcagcctgccactggcttatccaccacctcagttcgcccacgccctgttagctgcccagacattccaacaaatccggcccccacgcttgcccatgacccatttcggagggacctttccccctgctcagtcgacatgggggcctttccccgtgagaccattgtcgcccgccagagcaaccaattcccccaaacctcacatggtgcctagacattctaaccagaacagctccggaagccaggtcaactccgctgggtctctgaccagctcaccgacaaccacaacatcatcctcagccagtactgtgcccggcacatctaccaacggtagccccagctccccctccgttcgcaggcagcttttcgtgactgtcgtaaagaccagtaatgcaactacaaccaccgtgaccaccaccgcatctaacaataacaccgccccaaccaatgcaacgtaccccatgcctaccgccaaagaacactatcctgtctctagtccaagctcaccttcgcccccagcccaaccagggggggtaagtaggaattcaccgctcgactgtggatctgctagccctaacaaggtcgcctcatctagcgagcaggaggctgggtccccccctgtagtggagaccaccaacaccaggcctcccaatagcagctcctccagtggctcctcatccgctcatagtaaccagcagcagcctccgggatctgtgagccaggaacctaggccaccactgcaacagagccaggtgcccccgcccgaagtgcggatgaccgtccccccgctagccacctcctccgccccagtcgctgtccctagcaccgcacccgtgacttacccaatgccccagaccccgatggggtgccctcagcccaccccgaaaatggaaacccccgctattcgaccgccaccacacggcacgaccgcgccacacaaaaacagtgccagcgtacagaatagcagcgtagccgtcctgtcggttaatcacatcaagcgccctcacagtgtacctagctctgtgcagctgccctccaccctgtccacacagtccgcctgtcagaatagcgttcacccggctaataagcctatcgcacccaactttagtgcgcctcttccattcggcccattttcaacactttttgagaactcccccacttcagctcatgcattctggggtggaagcgtggtgtcatctcaatccacgcctgaatctatgctttctgggaagtcctcatacctccctaatagtgatcctttacaccagagcgataccagcaaggcccctggcttccgcccacccctgcagcgccccgccccttctccgtctggaatcgtcaatatggacagtccttacggatcggtcaccccaagcagtacccacctcgggaacttcgcctcaaacatctctggcggccagatgtacgggcctggggctcctctcggtggcgcaccagccgctgccaatttcaatcgccagcacttctcacccctgagtctgctcaccccctgctcaagcgcatccaatgattcaagcgctcagtcagtgtcaagtggtgtacgggccccatcgcctgccccatcctcagtcccgcttgggtcggagaagccttccaatgtgagccaagaccggaaggtaccagttccaattgggactgagaggtccgctagaatccgtcagactggaactagtgcaccatcagtgatcggctccaatttgagtacaagcgtgggccattctggcatctggtcttttgaaggcattggaggcaatcaggataaggtcgattggtgtaaccccggaatggggaaccccatgatccacaggccaatgtccgatcccggtgtgttttcacagcatcaggctatggaacgcgacagtactggaatagtcacacctagcgggacttttcatcagcatgttcctgcaggttatatggattttcctaaggtgggaggcatgcctttttcagtgtacggaaatgccatgatccccccggtggcccctatcccagatggcgcaggcggtcctattttcaatggcccccatgccgccgaccccagctggaactctttgatcaaaatggtctccagttccaccgagaacaatggccctcaaaccgtctggacgggtccctgggctccccacatgaactctgtccacatgaaccagctggggtag

SEQ ID NO: 16578 - DNA, 1446 bp, synthetic construct
  source 1..1446: mol_type = other DNA; note = Synthetic coding sequence
atggcctccgctgcctccgtcacttcactggccgacgaggtaaactgccccatttgtcagggaacactgagggaacccgtgactattgattgcggacacaatttctgtcgcgcatgtctaaccagatattgcgagatacctgggccagatctcgaggagagtcccacctgcccattgtgtaaggaaccctttagacctggctcattccgccctaattggcagcttgctaacgtcgtggaaaacatcgagcgactccagttagtgtcgaccctgggtctgggagaggaggatgtctgccaggaacatggcgagaagatctatttcttctgcgaggatgacgagatgcagctgtgcgtggtgtgtagagaggccggagagcacgctacacatacaatgagatttttggaagacgccgccgcaccatacagagagcagatacataaatgtttgaagtgccttcggaaggagagggaggagatccaagaaatccagagcagggaaaacaagcgtatgcaggtcctgcttacccaggttagcaccaaacggcaacaagtcatctctgaatttgcccatctgcgtaaattcctcgaggaacagcagagtatcttgttagcccagctagagagccaagacggcgacatcctgcggcaacgagatgagttcgatctgttggtcgccggcgaaatttgtcgattcagcgccctgatagaggaattggaggaaaagaacgaacggccagctcgggagctacttacagacatccggagcacgttgataagatgcgagactcggaagtgtcggaaaccagtggctgtgtcgcccgaactgggccagcggatacgtgattttccccagcaggccctgcccctgcagcgcgagatgaaaatgtttctggagaagctttgttttgagttggactacgaacccgcccatatctccctggacccacagaccagccatcctaagttgctgcttagtgaggaccatcagcgggctcagttttcttataagtggcagaactctccagacaacccccagcgctttgaccgcgccacctgtgtgctcgctcacaccggcatcacgggcggcagacatacttgggtcgttagtatcgaccttgcacacgggggaagttgcacagtcggggtcgttagtgaggacgtgcaaagaaagggtgaactcaggctgcggcctgaagagggtgtgtgggccgtccggctggcctggggatttgtaagtgcactaggttccttcccaacccgtcttacattgaaggagcagcctagacaggtgagagttagcttagattacgaagtcggttgggtcaccttcacaaacgccgtaacaagagagccgatctatacatttaccgcatctttcactcgcaaggtaattcctttttttggcttgtggggtcggggaagtagcttttcccttagcagttag

SEQ ID NO: 16579 - DNA, 1566 bp, synthetic construct
  source 1..1566: mol_type = other DNA; note = Synthetic coding sequence
atgccaagcccgcagctgctggtactgttcggatcgcagaccggcaccgcccaagatgtctctgaaaggctcggtagagaggcacggcgccgcaggttagggtgtagggtgcaggccttggatagttatccagttgtgaatctaattaacgaaccccttgtcatttttgtatgcgccaccacaggacagggcgacccgccagacaacatgaagaacttttggaggtttatattcaggaaaaaccttccaagcaccgctctgtgtcagatggactttgctgtcctcggacttggcgattccagctacgctaagtttaactttgtagcgaaaaaactgcatcgtaggcttttgcagcttggaggaagcgctcttctccccgtctgtttgggagacgaccagcacgagctgggacttccatcaaaattcacattgctattcctgcaggaggccccaagtacagggagtgaagggcagcgggttgcccatcctgggtctcaggagcctccatccgagtcaaaaccttttttggcccctatgatctctaatcagcgggttactgggccctcacacttccaggatgtcaggctgatagagttcgacatcctggggtccgggatctcctttgctgctggcgacgtagtccttatccaaccctccaactccgcggcacacgtccagaggttttgccaggtgctggggctagatccggaccaactttttatgttgcaaccccgggagcctgacgtctcctctccaacacggctcccacagccgtgttctatgaggcacttggtgtctcactacctggatattgcaagtgtgccacggaggtccttctttgaactgctggcttgcctgagcctacacgagctcgaacgcgaaaaattattggagttttctagcgcgcagggacaagaggaactttttgagtattgcaaccggcctcggcggaccatcctggaagttctgtgcgacttcccacacactgctgctgccatcccccctgattatctcctcgacttgatacccgtgatccggcccagggcatttagtatcgccagctcactgctgactcaccccagtaggctgcagatcctggtagccgttgtacagtttcagacccggttaaaagaacctaggcggggcttgtgctcgtcttggttggcttcacttgatcccggacagggacctgtccgcgtacctctctgggtgagacctggcagcctggcattcccagagactccggataccccagttatcatggtgggtcccgggactggcgtagcgcctttccgagccgctatccaagaaagagttgctcaggggcagaccgggaacttcctcttttttggctgcaggtggagagatcaggatttctactgggaagcagagtggcaagagctggaaaagagagattgtttaaccctcattcccgccttttctcgcgagcaggaacagaaggtatacgtgcaacataggctccgcgaattaggctctctggtgtgggagttgctcgaccgccaggccacgccgtctccctgtcagagaacttcccggaaaccatag

SEQ ID NO: 16580 - DNA, 753 bp, synthetic construct
  source 1..753: mol_type = other DNA; note = Synthetic coding sequence
tgacagccttcaccagtagagcccaggggccctttctacttttgtcgccttcttctggacgacctggggatgaatagttgggatcggaggaagaactttcacctgctcaagaagaatagtaaactgttgcgtgaactcaagaacttggactcacggcaatgccgggaaactcacaagatcgctgtcttttatattgccgagggacaggaggacaagtgctccattctgagtaacgagagaggaagccaggcttatgaggacttcgtggcagggctggggtgggaggtggacctgagcacacactgcggcttcatggggggccttcagcgtaacggcagcacaggacaaaccgcgccctattatgctaccagtacagtggaagtgattttccacgtttcaacgaggatgccttctgattctgacgactccttaacaaagaagctaaggcatctcgggaacgacgaagtgcacatagtgtggagcgaacattcgcgggattaccggcgcggcattattcctaccgcatttggcgatgtcagtattatcatttacccaatgaagaaccatatgttctttatcgctattacaaaaaaaccagaggtgccttttttcggacctctgttcgacggcgccatcgtctccggaaagttgctacctagtctcgtgtgtgccacgtgtataaatgcttcccgggcagtaaaatgtctcatacccctataccagtccctctacctgttcgctcttaacgtatag

SEQ ID NO: 16581 - DNA, 345 bp, synthetic construct
  source 1..345: mol_type = other DNA; note = Synthetic coding sequence
atggttctcatcctcggacgtcgactgaatagagaggatctgggagtgcgcgattcgccagccactaagcgcaaggtcttcgaaatggacccaaaatccttaaccggtcatgagttcttcgatttttcatctggctcttcacacgctgagaatattctgcaaattttcaacgagtttcgtgattcccggttgtttacagacgttattatctgcgtggaagggaaggagttcccgtgtcatcgggctgtgctctctgcatgttcatcctactttcgggccatgttttgcaacgaccatcgcgaatcgcgggagatgctggtggagatcaatggaatcctggcatag

SEQ ID NO: 16582 - DNA, 1830 bp, synthetic construct
  source 1..1830: mol_type = other DNA; note = Synthetic coding sequence
atggccagtctctcacgagcactgagagttgccgcagcccacccacgccagtctcctacccggggtatgggtccttgtaacttatccagtgcagcaggccctactgctgagaagtccgtcccctaccagcggacgttgaaagagggacagggcacttctgtggtcgctcagggaccttcccgaccacttccgagcaccgctaatgtggtggttattgggggtggcagcctggggtgccagactctttatcacttggcaaaactgggcatgtccggggctgttctgctggaaagggaaaggctgaccagcgggacaacctggcacaccgccggattgttgtggcagctgcggccctctgacgtagaagtcgagctgttggcgcatactcgccgcgtggtgtctagagaactcgaggaggaaacgggcctgcacacaggttggatccaaaacggaggccttttcattgcctccaaccgccagagacttgacgaatacaaacgcttaatgtccctagggaaggcatacggggtggaatcccacgtgttgagtccggccgagactaaaacactgtaccccttaatgaatgtggacgatctgtacgggacattgtacgtgccccatgatggtacaatggatccagctgggacttgcacaaccctggctcgagccgccagtgccaggggtgcacaggttatagagaattgtccggttacaggaattcgggtgtggactgatgatttcggagtgaggagagttgctggggtcgagactcaacatggttctatccagactccgtgtgtagtgaactgcgcaggagtgtgggcctcagctgtgggcaggatggctggcgttaaagtccccctcgttgctatgcaccatgcctacgtggtcacagaacgaattgagggtattcagaacatgcccaacgtgcgtgatcatgatgcctccgtctacctccgactgcagggggacgccctatcggtgggaggttacgaggccaatcctatattctgggaagaagtatcagacaagtttgcattcggcctgttcgacctggactgggaggtctttactcagcacatagaaggcgcaatcaatagagttccggtgctggaaaaaactggcatcaaatcgaccgtgtgcggccccgagtctttcacccctgaccataagcccttgatgggagaggcacccgagctccgaggatttttcctcgggtgcgggttcaatagcgctggtatgatgctgggcggcggttgcggccaggagctggcacattggatcatacacggtcgccccgaaaaagacatgcacggctatgacatccgccgctttcaccacagcctcacggatcacccgcggtggatcagggagcgaagtcacgagtcttatgccaagaattacagcgtcgttttcccacacgacgagcctttggccggccgtaatatgcggagggaccccctgcatgaggaactgctgggccagggatgcgtgtttcaagaacgccatggttgggaaaggcctggttggttccacccaagggggcctgctcccgtgctcgagtacgattactacggtgcgtacggctcccgtgctcacgaggactacgcttaccggagactgctggccgatgaatacacctttgccttccctccccaccatgacactattaaaaaagagtgtctggcatgccgaggggcagcagccgtgttcgacatgagctactttggcaaattctatctggttgggcttgatgctcgtaaggctgcagattggctgttctccgcagatgttagccgccccccagggctacatcgagtgcatgtgtag

SEQ ID NO: 16583 - DNA, 129 bp, synthetic construct
  source 1..129: mol_type = other DNA; note = Synthetic coding sequence
atggataacatgagccctaggttgagagccttcttgtccgaaccgattggagagaaggacgtctgctgggtagacggaatctctcatgaactggctataaatctcgtaaccaagggcattaataaatag

SEQ ID NO: 16584 - DNA, 3120 bp, synthetic construct
  source 1..3120: mol_type = other DNA; note = Synthetic coding sequence
atggttagttccgcccagatggggtttaacctccaggccctgctcgaacagctgtcacaggatgagcttagcaaattcaaatacctgatcacaacattcagcctcgcccatgaattgcagaagattccccacaaggaaatggcatctctgcaggttttcgagaaaatgcatcgcatggacctcagcgagagggcaaaggacgaggtccgagaggccgccttaaaatccttcaataagcgaaaaccactgtcattgggcataacaaggaaagagagacctcccctggacgtggatgaaatgctggagaggtttaagaccgaagcccaagcttttaccgaaacaaagggtaacgtgatatgcctaggcaaggaagtctttaaaggaaagaagcccgataaagacaatagatgtcggtacatattaaaaaccaaatttcgtgagatgtggaagagttggccgggtgacagtaaggaagtgcaggtgatggccgagcgttacaaaatgctcataccattcagcaatccacgggtcctgccaggccctttttcttacacagtcgtactatacggtcccgcagggctggggaagactactttagcacagaagttgatgctcgactgggctgaggacaacctgatccataaatttaagtatgccttttatttatcatgtcgtgaattgtcacggctgggcccatgtagcttcgcagaattggtgtttcgcgattggcccgaactgcaggacgatatcccacatatcctggcacaggctagaaagatcctttttgttatcgatgggtttgatgagcttggtgcagcgcctggagccctcattgaggacatctgcggagactgggaaaaaaaaaaaccagtgcctgtgctgctggggagcctgctaaacagagtgatgctgccgaaggccgccctgctggtgactacaagaccaagagcgcttcgagatctccggatactggccgaagagcctatctacattagggttgaggggtttcttgaggaggatcgaagagcctacttcctcagacacttcggcgatgaggaccaagctatgagagcattcgaactgatgaggtctaacgcagcactcttccaactggggagcgccccagcagtttgctggatcgtctgcactacgctgaagctccagatggaaaaaggcgaggatcccgtccctacttgtcttacacgcactggccttttcttacggttcttgtgctctcgctttcctcaaggggcccagctcaggggcgctctgcgcacactcagcttactggcggctcagggcctctgggcgcaaacctcagttctccatcgagaagacctggagagactgggtgtacaagagtctgatctgcggctctttctggatggcgacatcctcaggcaggaccgggtgagtaagggctgttactccttcatacaccttagttttcagcagttcctgacagctctgttctacactctcgagaaagaagaagaagaggaccgtgacgggcatacctgggacatcggcgacgtccaaaaattgctcagtggggtcgagcgcctgcggaaccccgatctgatccaggctgggtactactctttcggactcgcaaacgagaagcgtgccaaggaactcgaggcaacatttggctgccgaatgagcccagatatcaagcaggagctgctcaggtgtgatattagttgcaagggcggacactccacagtcactgacctgcaggagctgctcggctgtctttatgagagccaggaggaagagctggttaaggaggtgatggcccagtttaaggagataagcctgcacctaaacgcggtagacgtggtgccctccagcttctgtgttaagcattgccggaacctacagaagatgagcctgcaggtcatcaaggagaacttacccgagaacgtcacagcgagcgagtccgacgccgaggttgaaagatcccaggacgatcaacacatgctgccattttggaccgacctctgtagtatctttggttccaataaagacttaatggggctcgcgatcaatgattctttcctgtccgctagcctggtgagaatattgtgcgagcagatcgctagcgacacctgtcaccttcagagggtggtcttcaaaaatattagcccagccgatgcgcaccgtaatctgtgcttggctttgcgagggcacaagaccgtaacgtatctcactctccagggcaatgatcaggacgacatgtttccggctctctgcgaggtgctccgacaccctgagtgcaatttacgctacctgggtctggttagctgttccgctacaacacagcagtgggccgacctttcattggcgctggaagtgaaccaaagcttgacctgtgtgaacttatccgataatgaactgctcgatgagggggctaagctcctgtataccacactgagacacccaaagtgttttctgcagaggctgtctctggagaactgccacctgacagaagcaaactgcaaggacctggcagctgtgctcgtcgtgtcaagggaacttactcatttgtgtttagccaagaaccccatcggtaacaccggcgttaagtttctttgtgagggtcttcgctatcccgagtgtaagctgcagacactggttctctggaattgtgacattacttccgatggctgttgtgacctgactaagctgctccaggagaagtcctcccttctttgcctcgatcttggtcttaaccatatcggtgtgaaaggaatgaagtttctctgtgaagccttgaggaagccgttgtgcaatttacgatgcctgtggctgtggggttgcagtatccctcctttctcatgcgaagacctgtgttctgcccttagctgcaaccaaagccttgtgacactagacttgggacagaatcccctcggctccagtggtgtcaagatgctgttcgaaacactgacgtgctcctccggtaccctgcgcacgctgaggttgaaaatcgacgattttaacgacgaattaaacaaactgctagaggagatcgaggagaagaacccccagctgatcattgacacagaaaagcaccatccatgggccgaacggccttcctcacatgactttatgatttag

SEQ ID NO: 16585 - DNA, 1899 bp, synthetic construct
  source 1..1899: mol_type = other DNA; note = Synthetic coding sequence
atggacactatgatgctcaatgtgaggaacctgttcgaacagctggttcggagagtagaaatcttgagcgaaggtaacgaggtccagttcatacagctggccaaagacttcgaagattttaggaagaagtggcagcgcacagatcatgagcttggcaagtataaagacctgctcatgaaagccgagacagagcgatctgctctggacgtgaaacttaaacacgccagaaatcaagtggatgttgaaattaagcggcgccagagggccgaggccgactgtgagaaacttgaaaggcaaatacagctgatccgagagatgctgatgtgcgatacaagcggatctatccaactgtccgaagagcagaaatcagcactcgctttcttgaaccgcgggcagccttcgtcctcaaatgctggtaacaaacgcttgtccaccatagacgaaagcggctctattcttagtgacatcagtttcgacaagaccgacgagtccctcgactgggacagttcactggtgaagacattcaaacttaaaaaaagggaaaagcgccgctcaacatcccggcagtttgtcgatggtccccctgggcccgtgaaaaagaccagaagcatcggaagcgcagttgatcaggggaacgagtccatcgtggctaagaccacagttaccgttcctaacgacggcgggccaatagaggctgtatctacaattgagacggttccatattggacccgaagccggaggaagaccgggacactccaaccatggaactccgacagtactctgaattcgcggcagctggaaccaaggaccgaaactgattctgtcggaacaccccaatccaatggcggaatgcggcttcacgattttgtttccaaaacagtgatcaaaccggaatcctgcgtgccatgcggcaagaggattaagtttgggaaactgagccttaagtgccgcgattgcagggtggtgtctcaccccgagtgccgcgataggtgtccattaccatgtattccgactcttatcgggacaccagtgaaaatcggagaggggatgctcgccgactttgtgtcacagaccagcccaatgattccttcaattgtggtccactgcgtcaacgagatagaacagaggggactaactgagaccggcctgtatagaatatcaggctgtgaccggacggtgaaggaattgaaagaaaagttcctgcgggtgaagacagttccgcttctctcaaaagtagacgatatccatgccatttgctctcttttgaaggacttcctaagaaacttgaaggagccactgcttacttttcgactcaaccgagcatttatggaggccgccgagataacagacgaagacaattcaatagccgctatgtaccaggccgtcggcgagttgccccaggccaaccgtgacacacttgctttcctgatgatccacctccagcgggtggcacagtcaccacacacaaaaatggatgtggccaatttagccaaggttttcggtcctacaattgtggcccacgcagtccctaatccagaccccgtcaccatgcttcaggacatcaaaagacaacctaaagttgtggagcggttgctgtccctccctcttgagtactggtcacagtttatgatggtggagcaagagaacatagatcccctgcacgtcatcgagaatagtaacgcttttagcaccccccagaccccagacattaaagtttcacttctggggcccgtgacaactccagagcatcagctgctcaaaactcccagttccagctccttatcccaaagggtgcggagtaccctgaccaaaaataccccacgatttgggagtaaatctaaaagtgctacgaatttgggaaggcaggggaatttttttgctagccccatgctgaagtag

SEQ ID NO: 16586 - DNA, 189 bp, synthetic construct
  source 1..189: mol_type = other DNA; note = Synthetic coding sequence
atgagtatctcaagtgacgaggtgaacttccttgtgtacagatatttgcaggaatccggcttctctcactccgcgtttactttcggtatcgagtcacatattagtcaaagtaatatcaacggcgccctggttcccccagccgctctgatatcaatcatacaaaagggattacaatacgtcgaggcatag

SEQ ID NO: 16587 - DNA, 417 bp, synthetic construct
  source 1..417: mol_type = other DNA; note = Synthetic coding sequence
atggagccctccgcacaacagctgcagctggcagcttctctgccagcaaacctttccaacttctgccagggaagtgaaatgccgaccacaagtcgaccagcgcttgatgtcaaaggtggcacaagcccggctaaggaagacgccaaccaggaaatgtcttctgtggcgtatagtaacctggctgtgaaggacaggaaagctgtggcgatcctgcactacccgggcgtagcgagtaatggtacaaaggcctctggagctccaacctcatccagcggaagcccaatcggtagccctaccaccactccaccgaccaagccaccctctttcaatttacaccctgctccgcatctcctggcaagtatgcatcttcagaaactgaatagtcagtaccagggaatggcggcagcaacgccctag

SEQ ID NO: 16588 - DNA, 1473 bp, synthetic construct
  source 1..1473: mol_type = other DNA; note = Synthetic coding sequence
atgaacggggccctcgatcattctgatcagcctgaccccgacgccatcaagatgtttgtgggccagatcccccggtcctggtcagagaaggaactgaaggagctttttgaaccgtacggggctgtctatcagattaacgtgctgagagaccgcagtcagaaccccccacagtccaagggctgctgtttcgtgaccttctatactagaaaagccgctctcgaagctcagaatgcgctgcacaatattaagacacttccaggcatgcaccatcccatccagatgaaaccagccgacagtgaaaagagtaacgctgtcgaggatagaaagctcttcatcgggatggtgagtaagaagtgtaacgaaaacgacattagagtgatgttttccccttttggccagatcgaggagtgtcggattctgcgtggtcccgacggactgtcaaggggatgtgcattcgtgacattctcaactcgtgctatggcccagaacgcaatcaaagcgatgcaccagtcacagacgatggaaggatgcagctcccctatcgtggtaaagttcgccgatacgcagaaagacaaggagcaacggcgactacagcagcagctcgctcagcagatgcagcagctgaatacagcaacatgggggaatctgacagggcttggcgggctcacaccacaatacctggccctgctccagcaagccacgtccagctcaaatctcggagcattctcaggaatccagcagatggctggtatgaatgcgctgcagctccagaacctagctacactagctgcagctgcggccgcagcgcagacttccgctacctctaccaacgccaaccccctgagcacgacctcatcagcactcggcgcattaacatccccggttgcagccagcacccctaactccacagcaggagccgctatgaacagcctaacatcgctgggtacgcttcaaggtctggcaggagccaccgttgggttgaacaacatcaatgccctcgctgtggctcagatgctgtccggaatggcagcgctgaatggggggctaggtgccaccggcctgactaacggaacagctggcactatggacgccctgactcaggcatacagcggtattcaacagtatgcggccgcagcgctgcccactctgtactcccagtctctgttgcagcaacagtctgctgctgggtctcagaaggagggtcccgagggggcgaaccttttcatctatcatctgcctcaagaatttggagaccaagacattctacagatgtttatgcccttcggaaatgtgatatccgccaaagtgtttatcgacaagcaaacaaatctgagtaagtgcttcggattcgtcagctatgacaacccggtttctgcacaggcagcaatccaggcaatgaatggattccaaatcggtatgaaacgccttaaagtgcagttgaagcgcagcaaaaacgactctaaaccctactag

SEQ ID NO: 16589 - DNA, 357 bp, synthetic construct
  source 1..357: mol_type = other DNA; note = Synthetic coding sequence
atggcttcaagcgcacgtgagcacctgttattcgtcagacgacgcaatccgcaaatgcgatatactctcagcccagaaaacctgcagagtctagctgctcaaagctccatgcccgaaaatatgactttacagcgagctaatagcgacaccgatctggttacaagtgagtccaggtcaagtctgaccgccagcatgtacgaatacactttggggcaggcccagaacctgattatattttgggacattaaggaagaagttgatccgtccgattggatcgggttatatcacatagatgaaaacagtcccgctaatttttgggactctaaaaatcggggggtgacaggaacgcaaaagtag

SEQ ID NO: 16590 - DNA, 1620 bp, synthetic construct
  source 1..1620: mol_type = other DNA; note = Synthetic coding sequence
atggcaacatccgcccctcttcgatccttggaggaagaagtgacgtgcagtatttgcctggactatctgcgcgaccccgtcaccatcgactgcggacacgttttctgccgttcatgcaccacagacgtgcgcccaatatcggggagtcggcccgtctgccccttatgcaagaagccgttcaagaaggaaaatattagaccggtttggcagctcgcatctttggtggagaacattgagagactcaaagtagacaaggggagacagcccggcgaggtgacgcgggagcagcaggacgccaagttgtgtgagcgacatagggagaaactgcactactactgcgaggacgatggaaagctactgtgcgtgatgtgtcgggaatcacgagagcatcgtccacatacggcggtcctgatggaaaaggccgcccaaccgcacagagagaaaattttgaaccacctgagtaccctgcgtcgggacagggacaaaatccagggatttcaggctaaaggagaagctgatatattggcagctcttaaaaagctgcaggatcagagacaatacattgtcgcagagttcgaacagggccaccagtttttgagagagcgggaagagcatctgctggaacagctggccaaactggaacaggaattgactgaaggcagggagaagttcaaaagccggggtgtaggggaactggcgcgactcgccctcgtcattagcgaactagaagggaaggctcagcagccggccgccgaactgatgcaagacactcgtgattttctgaacagatatcctcggaaaaagttctgggtgggaaaacctatcgcacgtgtggtgaaaaagaaaaccggagaatttagtgataagctcctttcacttcagagaggcttgcgggaatttcagggcaaactccttcgggatctcgagtataaaacagttagtgtcacacttgaccctcaatcagcctctggctatctgcaattgtctgaggactggaaatgcgtgacgtatacatctctgtacaaatccgcctatcttcatccccagcagttcgattgcgagcctggggtcctcggaagtaagggtttcacctggggcaaagtttactgggaggtggaagtggagagagagggctggagtgaagacgaagaagagggggatgaagaagaagaaggtgaagaggaagaagaagaggaggaagcaggttatggtgacgggtacgacgattgggagaccgacgaggacgaagaaagcctgggcgacgaggaggaggaggaagaggaggaggaggaggaggttctggagtcctgtatggtcggggtggcaagggacagtgtgaaaaggaagggggatctttctctgcgtcctgaggatggagtgtgggcactccgcctgtcatccagtggaatttgggccaatacctctcctgaggcagagctcttccctgctctgagacctaggcgcgtgggaattgctctcgactatgaaggcggcactgttaccttcacgaacgccgaaagtcaagaactgatttatacattcacagccactttcacccgacgcctcgtgccattcctctggctcaagtggcctggaacccggttattactgcgtccctag

SEQ ID NO: 16591 - DNA, 270 bp, synthetic construct
  source 1..270: mol_type = other DNA; note = Synthetic coding sequence
atgtctgagcagggtgaccttaaccaagcaatcgccgaggaaggcggcactgagcaggagacggccactcctgagaacggaattgtgaaatccgagagcctggatgaagaagagaaactggaactgcagcgacgcttagaagctcaaaaccaggagcggcggaaatccaagagtggggcggggaaggggaaacttacgcgcagccttgccgtctgtgaagagtcttctgcccgcccgggaggcgagagtttacaagaccagactctatag

SEQ ID NO: 16592 - DNA, 909 bp, synthetic construct
  source 1..909: mol_type = other DNA; note = Synthetic coding sequence
atggtgaccgagcaggaggtggatgctattggccagaccctggtcgatcctaaacaacccctacaagcccgctttcgggcgcttttcaccctgcggggactaggaggcccgggcgccatcgcctggataagtcaggcgttcgatgatgactcagcactcctgaaacatgagttagcatactgcctaggtcagatgcaggatgcgagagccattccgatgttggttgacgtactgcaggacacccgccaggaaccgatggtgagacacgaagcgggtgaggctctcggagctatcggagatcctgaagtgctggagattctgaaacagtattcttctgacccggtcattgaagtggccgagacctgccagctggctgtgagaaggcttgagtggctgcagcagcatggtggagaaccagccgcaggtccatacctgtcagtggaccccgccccccctgcagaggagcgagacgttgggagactgcgggaagctttgttggacgagagccggcctctctttgagcgttaccgagccatgttcgcccttcgtaacgcagggggagaggaagctgcccttgcccttgcggaggggctgcactgcgggagcgctctttttcgacatgaggtcggatatgttctggggcagttacagcatgaagcagcagtgccccagctggccgcagccctcgcacggtgcacagagaacccaatggtcagacacgaatgcgccgaggccctcggggctatagcaagaccagcttgtctggccgccttacaagcgcatgcggatgaccccgagcgcgtggtgcgtgaaagttgtgaagtggccctcgatatgtatgagcacgagaccggccgggcgtttcagtacgcagatgggctagagcagttgaggggcgcccccagttag

SEQ ID NO: 16593 - DNA, 1521 bp, synthetic construct
  source 1..1521: mol_type = other DNA; note = Synthetic coding sequence
atgtcagtcttgtcaccaggcgacctgaaacctaagagaggtagcccgcaccgcggttcgcttgataggacggatgcctccacagacctggccatgcggtcatggccatcggagctcggctcgcgcacctgctctacttctgctactaccacagccccaagcaattccacgcctatcgcccgccacccaggaaggacaaaggggtataatagcgatgacaacctgtgtgagcctagtctcgaattcgaggtgcccaaccaccggcagtacgtttcccgtcccagctctctcgagagctcaagaaacacatctagtaactcctcccctctcaaccttaaggggtcaagcgaacagcttcatgggcgctcggaatcattcagcagtgaggacctgatcccctcaagagacctggccactttgccccgcgaggcatccacacccggaaggaacgctctagggaggcacgaatacccacttccccgcaatgggccgctcccccaagagggagcacagaaaagaggaactgcaccaccctacgtgggcgttagaccctgctctgctagcccttccagcgagatggtgacactggaggaattcctggaggaaagtaaccggtctagtcctacccatgatacccccagttgccgggatgacctcctgtccgactatttccgtaaagcatcggacccccccgccataggcggccagcccggtcctccggcgaaaaaagaaggcgcaaagatgcctactaacttcgttgcccctaccgtgaagatggcggctcccaccagtgagggtcgccccttgaaacctggccagtacgtcaaacctaactttcgcttaacagaagctgaggctcctccaagcgttgcgcctcgccaggcacagccaccgcagagtctctctcttggaaggccgcgacaggctccagaggctctgggggggagagagacaggtagccacacgttacagagtcctgcacccccttcctctcattcactcgcccgcgagcgaacacctctggttggaaaggccggcagcagttgccaggggcctgggccaaggtcccggccactcgacacgagaaggttttcattagcccctcctaaagaggaacgcctagcacccttgcaccagtctgccactgctcccgcgattgccaccgctggtgccggagcagctgctgccgggtcgggtagtaactcccaactgctgcacttctctcccgccgcggcacccgccgcacgcacaaaaccaaaggcccccccacgtagcggggaagttgccacgatcacccccgtacgcgctggtctctcactgagcgaaggcgacggcgtgcccggacaggggtgcagcgagggattaccagcgaagtctcccgggcgcagcccagatcttgcccctcacctgggacgtgctctcgaagattgcagcagaggatcagtatccaagtcctctccagcctccccagagcccggaggcgacccacaaaccgtctggtacgaatatggttgtgtctag

SEQ ID NO: 16594 - DNA, 678 bp, synthetic construct
  source 1..678: mol_type = other DNA; note = Synthetic coding sequence
atggcccagacagtgccaccttgtgagctgccatgcaaagaatacgacgttgctagaaacacgggtgcgtatacgtcaagcggcctggccacggccagcttcaggaccagtaagtacttactagaggaatggtttcagaattgctacgcacgctaccatcaggcttttgcagacagagatcagagcgagagacaacgtcatgagtctcagcagctggcaactgaaacacaggcacttgcacaacgtacacagcaggactctaccaggacagtcggcgaacgtttacaggacactcattcctggaagagcgaactgcaaagagagatggaagccctcgcagccgaaacaaatcttctattagcacagaagcagaggctcgagagagcactggatgctaccgaggtgcccttcagcattactaccgataatttgcagtgcagggagcgaagggagcatcccaacctggtgcgcgaccacgttgaaaccgaacttctcaaggccctgcctcctgccttgagtcagtgcctgaagaactcatgttcctcgagaaagctgtctgccagaaataagggtacgtgtcagctgatggagaccttgactgtgcatggcgaggcaaatcccggaattgagggaagacgaactcgtgcgttagcccacaaggaggtcccgagcggctag

SEQ ID NO: 16595 - DNA, 309 bp, synthetic construct
  source 1..309: mol_type = other DNA; note = Synthetic coding sequence
atggccaatgactcacctgctaagtcactcgttgatatcgacctgagcagtttacgggacccagccggtatctttgagctggtcgaggtggtggggaatggaacatacgggcaagtttacaagggccgacacgtgaagaccgggcagctcgccgccatcaaagtgatggatgtcaccgaggacgaagaagaggagataaaactggagattaacatgctaaaaaaatatagtcatcatcgaaatatcgcaacctactatggggccttcatcaaaaaatcaccgccaggccacgacgaccagctatggtag

SEQ ID NO: 16596 - DNA, 369 bp, synthetic construct
  source 1..369: mol_type = other DNA; note = Synthetic coding sequence
atggcgacgtctgcacccttgcggtccctggaggaggaagtaacctgtagcatctgtctggactacctccgggacccagtcacgatcgactgtggccacgtattctgcagatcttgcaccaccgacgtccgccccatcagtgggagtagaccagtctgcccactgtgcaagaagccattcaaaaaagagaatattagacctgtctggcaactagcaagcctcgtggagaatattgaacgcttgaaggttgataaaggtcgacaacccggcgaagttacgagggagcagcaggatgctaagctgtgtgagcggcatcgagagaagctccactactactgcgaggacgacgggaagctcctgtgtgtgtag

SEQ ID NO: 16597 - DNA, 312 bp, synthetic construct
  source 1..312: mol_type = other DNA; note = Synthetic coding sequence
atgagtggagggctgctcaaggccttgagatcagactcctacgtcgaactatcacagtacagggatcagcacttcagaggggataatgaagagcaggagaagctgctgaaaaagtcctacgctgagaatgcaatgagatacataaatggaactcgactggatgataggattatccggacagattgggatgctgggttcaaggagggcaggcaatatgggcgcggccgctctgggggtcaagtgcgagacgagtaccgccaagattatgacgccgggcgaggggggtatggaaagttggcccaaaaccagtag

SEQ ID NO: 16598 - DNA, 894 bp, synthetic construct
  source 1..894: mol_type = other DNA; note = Synthetic coding sequence
atgtggccttttccgagcaggtctctgtttccccccccgacgcaggcttggctgcagaccgtcagtagcgaccctgaggctcagggctggggcgcatggaatgaaactaaggagattcttggcccagagggtggtgagggcaaggaggagaaagaagaagaagaggatgctgaggaagaccaagacggcgatgccgggtttctgctgtcactgctggaacaggagaacctggccgagtgcccgctgcctgaccaggaactggaggctattaaaatgaaggtctgtgcaatggagcaggctgagggaactccgaggcctcccggcgtccagcagcaggcagaagaagaagagggcacggccgcgggccagctgctgtccccagagactgtgggctgccccttgagcgggactcctgaggagaaggttgaggcagatcataggagcgtgtatgttggaaatttgtgcctccaccgggtctgtcaccaagggcttagagcgggtcgaagaggcgcagggcccgaacccttgccaggccccgggcaccagggagccgccgagaagaatcagctgccttgggatcagcttcatcgaccccgaggtccaagccgcacaccacgcctgcaaggtggaacacttcccccccaacgcccaccaggtcaggcaccagcccagacgaccagggctgagcccggcccctggaagatcttaactatggtctttactgtcctgaagggacgccccgatttcgagcggggcgctggggcgtggatccgttccaaaccgttggtgctgcatccgggggccggcgctggaagtggcgctggagccagaccagaggaacgcggagttcagagctctcactggccacccctgggaggaggcatggcccaatag

SEQ ID NO: 16599 - DNA, 1059 bp, synthetic construct
  source 1..1059: mol_type = other DNA; note = Synthetic coding sequence
atggacatcgataaggatttggaagctccactttacctcacaccggaagggtggtccttgtttctgcagcgctactatcaagtcgttcacgagggcgccgaactgagacacctagatacccaggtgcagaggtgcgaggacatccttcagcagctgcaggccgtggtgccacagatagacatggaaggcgatcggaacatctggatcgttaaacccggcgcaaagtcacgaggccggggtattatgtgcatggatcacctcgaggagatgctcaaattggtgaacggtaaccctgtagtgatgaaggacggcaagtgggtggtgcagaagtacatagagcgtcccctcctgattttcggaacaaaattcgaccttcggcagtggtttctcgttaccgactggaatcccctcactgtgtggttttatagggatagctacatacgcttttccacccaaccattctccctgaaaaatctcgacaacagcgtccacctgtgcaacaactccatacagaagcacctggagaattcatgtcataggcatcctctactgcctcccgacaatatgtggagttcgcagcggtttcaggcccacctacaggaaatgggtgctcccaatgcgtggtctaccatcattgtcccaggcatgaaggacgccgtcattcacgccttgcaaacaagccaggataccgtgcagtgcaggaaagcctcattcgagctctatggcgctgatttcgtcttcggcgaggactttcagccctggttgatagagatcaacgcttcaccaaccatggcaccatctacagctgtgacggcgcgactgtgtgccggcgtgcaagccgatacgctaagagtagttattgacagaatgttggatagaaactgcgacaccggagcctttgagttaatctataaacagccagtgaccacctcgccggcctccacaccaaggccttcatgtctgctgccgatgtattcagatacacgagctagatccagcgatgatagtaccgcctcttggtgggcgttacgaccctgtcgtccacaggccagaccgtag

SEQ ID NO: 16600 - DNA, 363 bp, synthetic construct
  source 1..363: mol_type = other DNA; note = Synthetic coding sequence
atggagttagacctgttcctgggcctcgatgatgtgtttcctcggttactccatggcctgctccatagagcattttccgtttttcttttcaacacagaaaataagttgttactgcagcagcggtcagatgccaagattacctttccaggctgttttactaacacgtgttgcagccatcctctgagcaatccagctgagctcgaagagagcgacgcgttgggcgtgaggagagccgcccagcggagattgaaagctgaacttggcatccccctagaggaggttacctcctctccgacccaaccatataagcttaagcccaagcacaccatcaaacggtttttaataaagtttctgaactcatag

SEQ ID NO: 16601 - DNA, 339 bp, synthetic construct
  source 1..339: mol_type = other DNA; note = Synthetic coding sequence
atggaggaaatacctgcccaggaggccgcgggttccccccgggtacaattccagtccctagaaacacagagcgagtgtctgagtccagaacctcagtttgtgcaggatacggacatggagcaaggcctgacggggggctttccaatctcaaagcctgatggtataagccaactggaacaagacctccaggttttcgatctggagaccaaaacgagggaggtgctaagagatgactgttcagatggagagacacgtgaggaaaataaacttctaatccccaagcagaagatctccgaggaagtccactcttacaaggtgagagtaggtcggctaaaatag

SEQ ID NO: 16602 - DNA, 1818 bp, synthetic construct
  source 1..1818: mol_type = other DNA; note = Synthetic coding sequence
atgagcgaaatcttgaagcagaaggatactgaaccgacaaattttaaagtggcagccggaaccctagacgcatcaacaaaaatctatgcagttagagtggacgcagtacacgcagacgtgtatcgagtgttgggcggtctgggaaaggatgcaccctctcttgaggaagtggagggccacgtggccgacggatctgccactgagatgggcacaaccaagaaagcagtgaagccaaagaagaagcaccttcacagaacaatagaacagaatattaataacctcaatgttagtgaagcagacaggaaatgcgaaattgacccgatgttccagaagaccgctgctagttttgacgagtgttctactgctggggtgttcctgagcaccttacattgccaagattacaggagcgaactgctctttccatcggacgttcaaacacttagtaccggcgaacctctagaactgcccgagctgggctgtgtggagatgacagatctgaaagccccacttcaacaatgtgcggaagatcgacaaatctgtccttcactggcaggatttcagttcactcagtgggatagtgaaactcacaacgaatccgtgagcgccctcgtagacaagtttaagaaaaacgatcaggtcttcgacataaacgctgaagtggatgaaagtgattgcggtgactttcctgacggatctctgggggacgacttcgatgcaaacgacgagcctgatcacaccgctgtgggtgatcatgaggagttcaggtcttggaaggagccctgtcaagtgcagagctgtcaggaagaaatgatctctctgggggatggcgacatcagaaccatgtgtcccctactgtctatgaagcctggcgagtactcctactttagccctagaacaatgtcaatgtgggccggaccagatcattggagatttcgcccccgccggaagcaagatgcgccgagccagtctgaaaataaaaaaaaatcaactaagaaggattttgagatcgattttgaggatgatattgatttcgacgtctacttcagaaagactaaagccgcaacgatcctcaccaaatccactctcgaaaaccagaattggcgcgccacgactctgcctacagactttaactataatgtcgacaccctcgtacaactccatctgaagcccggaacaagactgctgaaaatggctcaggggcacagggtggagactgaacattatgaagaaatcgaggattatgactataataacccgaacgacacctcaaacttttgtcctggcctgcaggctgctgacagcgatgacgaagaccttgatgaccttttcgtcggccccgtgggaaacagcgatctctctccatatccctgtcatcctccaaagacggctcagcagaacggtgatacccccgaggctcaggggttggatattactacatacggggagtcaaatttagtggccgagcctcaaaaagtgaacaaaatcgaaatccattacgccaaaaccgcaaaaaaaatggacatgaagaaactgaagcaatcaatgtggtccttgctcacggccctgagcggcaaggaagcagacgccgaggccaatcatagggaagctggcaaggaagccgcattggccgaggttgcggatgaaaagatgcttagcggcctcacaaaggatctacagcgctcactgcctccggtgatggcacaaaacctgtcaatccccctggcctttgcgtgtttactgcacctggccaacgaaaagaatcttaaactggagggaacagaggatttgtctgatgtcctggtgcgacagggcgattag

SEQ ID NO: 16603 - DNA, 2253 bp, synthetic construct
  source 1..2253: mol_type = other DNA; note = Synthetic coding sequence
atgtcgtcttcaccagtcaatgtcaagaagctgaaagtgtccgagctgaaggaagagctcaagaaacgcagactatctgacaaagggctgaaggcagagctcatggaaagactgcaggcggctttagacgatgaggaagccggcggacggccagctatggagcccggaaacggggatgaccagggcttccaagagggagaggacgagctcggggacgaagaggagggcgccggcgatgagaacgggcatggggagcagcaacctcagccccctgctactcagcaacagcagccccagcagcagcggggagcggctaaggaggccgccggcaaatcatcaggccctacttctctcttcgccgtgacagtggcccctcctggggcgcgtcaaggtcaacaacaggccggtggcaaaaaaaaagccgaggggggaggcgggggcggtagacctggcgcaccagctgccggcgatggcaagacggagcaaaaagggggcgacaagaaacggggtgtcaaaaggccccgcgaagaccacgggaggggttacttcgaatacattgaggagaacaaatactctcgcgccaaatcccctcaaccaccggtggaggaggaagacgaacactttgacgacaccgtcgtgtgtctggatacctacaattgcgacttgcattttaagatatctagggataggctctccgccagcagcctcacaatggaatcctttgcattcttgtgggcaggaggcagggcttcttatggggtgagcaaaggtaaagtttgcttcgaaatgaaagtgaccgagaagatccctgtgaggcatctttacaccaaagatattgatattcatgaagtccgcataggctggtccttaactacgagtggaatgctccttggcgaagaggagttttcctacggttactcgctgaaaggtattaagacatgtaactgtgagacggaagactatggtgaaaagttcgatgaaaatgacgttatcacatgcttcgccaacttcgagtctgatgaggtcgagttgagctacgccaaaaatggacaggatctgggggttgcattcaaaatctcaaaggaggttctggccgggaggcctctgtttcctcacgtgctgtgtcataactgcgccgtggaatttaatttcggtcagaaggagaagccctacttccctattcccgaggagtacacgtttattcagaatgttcctctggaggacagagtgaggggcccaaagggcccagaagaaaaaaaagactgtgaagtggtgatgatgatcggtctcccgggcgctggtaaaacaacctgggtgacgaaacatgccgcagagaaccccgggaagtacaatatccttggaacgaacaccataatggacaagatgatggtcgcagggttcaaaaagcagatggctgacactgggaaactgaataccctcctccaacgggcgccacaatgcctcggaaaattcattgagatcgccgctcgcaaaaagcgtaatttcatcctcgatcaaactaatgtgtccgccgctgcacagagacggaagatgtgcctcttcgctggcttccagagaaaggcagtggtcgtatgccccaaggacgaagactacaaacagagaactcagaaaaaggccgaggttgagggcaaggatctccccgagcatgctgtattgaaaatgaaggggaattttacacttccagaggtcgccgaatgctttgacgagatcacttacgtggagctgcagaaagaggaggctcagaaacttcttgaacagtacaaggaggagagtaaaaaggctcttccacctgagaagaaacaaaataccggttctaaaaagagtaacaagaataagtctggcaagaaccagttcaaccgcggaggcggacataggggaagaggcggcttcaacatgcgcggcggtaacttccgaggcggggcgccaggaaaccgcggcggatacaatcgacgtggcaacatgccccaaaggggaggcggggggggagggtcgggcgggatcggatatccctacccccgggctccagtctttcccggccgcggttcctatagcaatcggggaaattacaataggggggggatgcctaaccgggggaattacaaccagaactttcgcggtcgtggaaacaatcgtggatataagaatcagtctcagggctataatcagtggcaacagggacaattctgggggcagaagccgtggagccaacactaccatcaggggtattattag

SEQ ID NO: 16604 - DNA, 804 bp, synthetic construct
  source 1..804: mol_type = other DNA; note = Synthetic coding sequence
atgtgggatcagcgacttgttaaactagccctcctccagcacctgcgcgcattttatggtattaaagttaaaggagtgcgggggcagtgtgaccgacgacggcatgagaccgctgcgactgaaattggagggaaaatattcggtgtccccttcaacgcgctgcctcacagtgctgtaccagagtacgggcatatcccttctttcctggtggatgcctgcaccagtctggaagaacatattcatactgaagggctattccgcaaatctggttccgtgatccggttgaaggcgttgaaaaacaaggtggatcatggggaaggctgtctgagttccgcacctccttgcgacatcgcggggctattaaaacagttcttccgcgagcttcccgagcctatactccctgcagatctccatgaagcgctgctaaaggcacagcagttgggaaccgaagaaaagaacaaagcaatactgctactgtcatgcttgttggccgatcacacggttcacgtgctgcgatatttttttaacttccttcgcaacgtgtctcttcggtccagcgaaaacaagatggattcctccaacctggctgtaatctttgcgccaaacctgcttcagacaagcgaaggacacgaaaagatgtcctccaatgccgagaaaaaaggtgtttatcagacgctgagttggaagcgataccagccttgttgggtgttgatggtttctgtgctgttacaccattggaaagctttgaagaaagtgaacatgaaattgctcgttaatattcgggaaagagaggacaacgtttag

SEQ ID NO: 16605 - DNA, 600 bp, synthetic construct
  source 1..600: mol_type = other DNA; note = Synthetic coding sequence
atgccacataagattggtttcgtggtcgtaagttcaagtggccatgaagacggattttctgccagagaactgatgatccatgcacccactgtgtcaggttggaggtcaccgtcatacgtcagcctgtgcgacaacgagaagaccggctgcaaagctcgggaacttaaatccgtgtacgttgacgcagtcgggcagtttctgaaattgatattccaccaaaaccacgtaaacaagtataacatctacaaccaggtggcactggtagccattaacattatcggagatcccgccgacttcagcgatgaaagcaacaccgcatcacgcgaaaagcttatcgatcactatcttggtcacaacagtgaggaccccgcactggagggtacctatgcgaggaagtccgactatattagtcccctggatgacctggcttttgatatgtatcaggacccggaagtggcccagattatccggaagctggacgagcggaaaagggaagctgtccagaaggaacgctacgattatgccaagaagttaaaacaagctatcgctgacctgcaaaaggtcggagaaagactgggtcgctacgaggttgagaagtag

SEQ ID NO: 16606 - DNA, 471 bp, synthetic construct
  source 1..471: mol_type = other DNA; note = Synthetic coding sequence
atgaccgaggactctcagaggaactttagatccgtgtactatgaaaaggttgggtttcggggtgtggaagagaagaagtccctggagatcctgctgaaagacgatcggctcgacacagaaaagctatgcaccttctcccagagatttccgctcccctcaatgtatcgggccctcgtgtggaaagtgctgctggggatcctgcccccgcaccatgagtcccacgcaaaagtgatgatgtaccgcaaggaacaatacctggatgtgttacatgcactaaaagtagtgaggttcgtgtctgacgccacgcctcaggcagaggtttatttacggatgtatcagctcgaatcagggaagctccctagatctccttctttccccttggagccagatgacgaagtctttttggcaatcgcaaaagctatggaggaaatggtcgaggattcagtcgactgttactggatcacacgctag

SEQ ID NO: 16607 - DNA, 2730 bp, synthetic construct
  source 1..2730: mol_type = other DNA; note = Synthetic coding sequence
atgattcggcacgcgggtgctcccgcacgcggtgatccaaccggccctgtcccagtggtgggcaagggagaggaggaggaagaggaggacgggatgcggctgtgcttgcccgccaatccaaaaaactgcttaccccacaggagaggcatttcaattttagaaaaactgatcaaaacctgtccggtctggttgcagctatcattaggacaggccgaagtagcaagaatcctacatcgagtggtggcgggcatgtttcttgtgcgcagggactcgagtagcaagcagctggtcttgtgtgtgcattttccatcactgaacgagtcaagcgctgaagtgctggaatataccataaaggaggaaaagagcattctttacctggagggatctgccctggttttcgaagacattttcaggttaatcgcattttactgcgtgagcagagatcttctgcccttcacgctgagactgccacaggcaatcctggaggcatcgtccttcaccgatttggagactattgccaatctaggtctgggtttctgggactctagtctcaacccccctcaggaacgtggcaaacccgccgaacccccccgggacagggctcccggattccccctggtgagctccttaaggccaaccgctcacgatgccaactgcgcctgtgaaattgagctctcagttggaaatgaccggttgtggtttgtgaaccccatctttattgaggactgttcttccgcgctgccaaccgaccagccacccttagggaattgtcccgctcgccctctgccaccgacatctgacgctaccagccctacatcccggtgggcacccaggagaccccctcctccgccgcctgtgctgcccctgcagccctgctctcctgcccaaccgccgccccttcccgctaaaaagaatctgccaactgctccacctcggcgccgcgtttctgaaagagtctcgcttgaggaccagtctcctggaatggccgctgagggagatcagctatccctaccacctcaaggaacctctgacggcccagaagacacgccaagggagtctaccgaacagggccaggataccgaagtgaaggcctccgatccacacagcatgcctgaattgcctagaaccgccaagcagcctcctgtacccccaccgcgcaagaaacggatctctcgacagctggcgtcgacactgccagcgcccttagagaacgctgaactgtgcactcaagccatggcgctggagacccctacgcccgggccccctcgcgagggacagagtcctgctagtcaggctggcacacagcacccccctgcacaggctaccgcccacagccagtccagcccggagttcaaggggagcctggcatccctgtctgactccctcggagtttcagtcatggcaacagatcaggattcctacagcacgtcttccacagaagaagaactggagcagttctcctccccgtccgtcaagaaaaaaccatcaatgatccttggcaaggcgaggcaccgtctgtcctttgcttctttcagcagtatgtttcatgccttcttaagtaacaaccgcaaactctataaaaaagtggtggagctggctcaggataaggggtcatactttgggtccctggtgcaggactataaagtttatagtttagaaatgatggcgcggcagacaagcagtaccgagatgctacaagagattagaacaatgatgactcagctgaaatcgtatctgctgcagagtactgaactgaaggctctggtcgatccagcacttcacagcgaagaagaactcgaagcaatcgttgaaagcgcgctgtataaatgcgtcctcaaacctctcaaagaagcgattaactcgtgcctacaccagatccattccaaagacggttctctccagcagctaaaggagaatcagctagtaatcctggctactaccacaaccgacctgggagttacaacctctgtgcctgaagtgccgatgatggaaaagatcctgcagaagtttacctccatgcataaagcatactcccctgagaaaaagataagtatactgttgaagacatgcaagctaatttatgattctatggccctggggaaccccgggaagccctacggggccgacgatttcctgcctgttttgatgtatgtgcttgcacggagtaatctgacagaaatgctgctgaacgtggagtatatgatggagcttatggaccctgcgctgcagctgggggagggcagctattatctgacaaccacatacggcgcactagaacacattaagagctatgacaagatcactgtgacccgccagctgtcagtggaggtgcaggattccatccacaggtgggaaaggcgtagaactctgaataaggctagggcatctcggagcagcgtgcaggattttatatgtgtcagttatctagaacccgaacagcaagcacggaccctggcttccagggccgatactcaagcccaagccctgtgcgcgcaatgtgccgaaaagttcgctgtcgagagaccccaggctcaccggctgtttgtgctcgtagacggccggtgtttccaactggctgatgatgccctcccacactgtataaagggatacctcctcagaagcgagcccaagagggatttccattttgtgtaccggcccttagacggtggaggcggcggagggggaggctcaccaccatgtttggtcgttcgtgagccaaattttctctag

SEQ ID NO: 16608 - DNA, 1728 bp, synthetic construct
  source 1..1728: mol_type = other DNA; note = Synthetic coding sequence
atgtcaagtgatgaggaaaagtactccctaccggtagtccagaacgattcatctagaggtagtagcgtgtcatccaacctccaagaggagtacgaggaactgctccactacgctatcgtgactcctaacattgagccctgcgccagccagagctcacaccccaagggagaactggtccccgacgtccggatcagcacaatccatgatattctacattctcaggggaacaacagtgaggttcgagagacagcaatcgaggtgggcaagggatgcgatttccacatatcttcccattcaaagacggacgagtccagcccggttctctctcctagaaaaccatctcacccggtgatggactttttcagcagccacctcctggccgatagctcctctccggcgaccaactcgtctcatactgatgcccacgaaatcttggtgtcggactttttggtttctgatgaaaatctgcagaaaatggagaacgtgctcgacctatggtcatccgggttgaagaccaatataattagtgaattatccaaatggaggctgaacttcatcgactggcacagaatggagatgaggaaagagaaggaaaagcacgcagcccacttgaagcagttgtgtaatcagatcaacgaacttaaggagctgcagaagactttcgagattagcataggtcgtaaagacgaagttattagctccctttctcacgcaatcggcaaacagaaggagaagatagaactgatgcggactttctttcactggaggattgggcacgtgcgagcccgtcaggatgtgtacgagggcaagctggccgatcagtattatcagcggacgctcctcaaaaaagtgtggaaggtatggcgcagcgtggtgcagaaacagtggaaggacgtggtggaacgcgcatgtcaggcacgagcagaagaagtgtgtatccagatctctaacgactacgaagccaaggtggctatgctgtcaggggccttagaaaacgccaaggccgaaatccagaggatgcagcacgaaaaagaacactttgaggactccatgaaaaaggccttcatgcgaggcgtttgtgcactgaacctggaagccatgacaatcttccaaaataggaatgatgctggcatcgactcaaccaataacaagaaggaggagtacgggccaggggtgcaaggaaaagagcactcggcccaccttgatccatcagccccaccaatgccactgcctgtcacctcaccactcttgcctagccctcctgccgccgttggaggggccagcgcaaccgcggttccgagtgcagcatccatgaccagcactagagcggcttctgcctcttccgtacacgttcccgtgtcagcccttggtgccggaagtgcggccactgcggccagcgaagagatgtacgtgcctcgggtggtgacttccgctcagcagaaggcgggtcgcaccattaccgcccgcattaccgggcggtgtgacttcgccagcaagaaccgaatttcctcatctcttgctataatgggtgtgtccccgccaatgtctagtgtagtagtagaaaagcatcatcctgtcactgtgcagaccatccctcaggcaaccgcggctaagtacccccgcactatccaccccgaatcttctaccagtgctagcagaagtctgggcactcgaagcgcacatacccagtccttgacgagcgtacactctatcaaggtggtcgactag

SEQ ID NO: 16609 - DNA, 2091 bp, synthetic construct
  source 1..2091: mol_type = other DNA; note = Synthetic coding sequence
atggcgaactacaggaatacatctgaaattccactcgtgttagttggaacacaggacgcgatttcttccgctaaccctcgcgtgatcgacgacgcaagggccagaaagctgagtaatgatctgaagcgctgcacctactacgagacttgtgccacgtacggcctaaatgtggagagggtgtttcaagacgtagcccaaaagattgtagccacacgcaagaagcagcaactgagtatcggtccttgcaagtctctgccgaattcacccagccattctagtgtttgttcagctcaggtatctgccgtccatatcagtcaaacctccaatggaggcggctccctgagcgattattcctcatcggtaccaagcactcccagtacttctcaaaaggagctacggattgatgtgccgcctactgcgaacactccaacaccggtcaggaagcaaagcaagcgcagaagtaatctctttacaagtaggaagggctctgatcctgataaggagaagaaaggcctcgagtctcgggctgatagtattggatctggcagggccatccccatcaaacagggaatgctactcaagcgctcaggtaagtccctcaacaaggaatggaaaaaaaaatatgtgacactgtgcgacaatggagtgcttacttatcatcccagcttacatgactacatgcagaacgtgcacggtaaagaaattgatctcctacgcacaaccgtgaaggtgcccggcaaacggccccctcgtgcaactagcgcctgtgcccctatttcctcccctaagacaaacgggctgtctaaagacatgtcctccctccacatttctccgaacagtggtaacgtcacttccgcctcggggtcacaaatggcctccggaatatcactggtgagcttcaattcaagacctgacggtatgcatcagagatcttatagcgttagcagcgcagatcagtggtccgaagctacggtcattgccaacagcgccatctcgtccgataccggcctgggggattccgtgtgttcatcgccctctatttcatccactacaagccccaagctggaccccccccctagtccacatgccaacagaaaaaagcaccgccgaaaaaagtccacatctaattttaaagccgatggtttatctgggacagcagaggagcaagaggagaacttcgaattcataatagttagtctgaccgggcagacttggcacttcgaagctactacctacgaggaaagagacgcatgggtccaagccatcgaatcacagatccttgcatccctgcagtcttgcgagtcctcaaaaaataaaagcagactgacgtctcagagcgaagcaatggctcttcagagtataaggaacatgcgcggaaacagccactgcgtagactgcgagacccaaaacccgaactgggctagcctgaatcttggagctttgatgtgcatcgagtgttcaggaattcataggaacctggggacccacctgtcgcgcgtacgatccctggacctggacgactggcccgtggaacttattaaggtcatgtcatctataggcaacgaactggccaactccgtatgggaagaatccagtcagggccgtacaaaaccctctgttgattctacacgagaagagaaagaaaggtggataagggcaaagtatgagcagaagctttttctggctccgttgccatgcacggagcttagcctgggccagcaccttctgagagcgaccgccgacgaggacctgcggactgctatcttattacttgctcacgggtcaagggacgaagttaatgaaacttgtggcgagggcgacggacggactgccttacatctggcctgtcggaagggaaatgtggtgctggctcaactgctgatctggtatggggtagatgtgaccgctcgggacgcgcacggcaatactgctttagcttatgcgagacaagcctctagtcaggaatgtatcgatgtactgcttcagtatggttgtcccgatgagcgttttgtacttatggcaacacccaatctgagccgcaggaacaacaatagaaataactccagcggacgggtgccaacaataatatag

SEQ ID NO: 16610 - DNA, 270 bp, synthetic construct
  source 1..270: mol_type = other DNA; note = Synthetic coding sequence
atgagtgaacaaggagacctgaatcaggcaatcgctgaagaggggggtaccgaacaggaaaccgccacgcccgagaacggaatagttaagtctgaaagcctggacgaagaggagaagctggagctgcagagaaggctcgaggcccagaatcaagaacgccgcaagagtaaaagtggagctggtaagggaaagctcacccggagcctggcggtttgtgaagagtcctctgcccgccccggtggtgaatcactccaagaccagacgttgtag

SEQ ID NO: 16611 - DNA, 1785 bp, synthetic construct
  source 1..1785: mol_type = other DNA; note = Synthetic coding sequence
atgacagacacacgccgtagggtgaaagtttacacccttaatgaagataggcaatgggacgaccggggtacaggccacgtttccagtggctatgtggaaaggctcaagggaatgtcactgttggtacgcgcggagtctgacggatctctgctcctcgagagcaaaatcaatccgaatacagcttaccagaaacagcaagaggacgagaagttcctgacggatctgttcgctcagctgacggacgaagcaaccgatgaagaaaaacgacaggaactcgttaatttcctcaaggaattctgcgccttctctcagaccctgcagcctcagaatcgcgatgcctttttcaaaaccctcagtaatatgggaatcctccccgccctcgaagtgatattagggatggacgatactcaggtgaggagcgccgccaccgatatattttcttacctggtggaatacaatcccagcatggtgcgggagtttgtaatgcaggaagcccagcagaatgatgacgtttcgaagaaactcacggagcaaaagatcaccagcaaggatatcctcctcattaacctcatcatagagcacatgatctgcgacacggacccggagttggggggggctgtccagctgatggggctgctccgcacactggtggaccccgagaatatgctcgctacagccaataagactgaaaagacagagttcctcgggttcttctataaacattgcatgcacgttctgactgcccctctcctcgctaatacgactgaagacaagccgagtaaagatgactttcagacggcacagctgcttgcactcgtcctggaactgttaacgttctgtgtggagcaccacacctatcacataaagaactatattatcaataaggatattcttagacgagtgttggtgctcatggcttctaaacacgccttcctcgcactttgtgcactgaggttcaaacgtaagattatcgggctcaaagacgagttctacaatcggtatatcatgaaaagcttccttttcgagcctgtcgtgaaagctttcctgaataacggatcacggtataacctaatgaactctgcaattatcgagatgtttgagtttatacgcgtggaggacatcaagagtctgacagcgcacgtgattgaaaactattggaaggctctggaggacgtggactacgtgcagaccttcaaaggactcaagctcaggtttgaacagcagcgggagcgccaggataatcctaagttagatagcatgagatcgatattgagaaaccataggtacagacgcgacgcccggactctagaggatgaggaggaaatgtggtttaatacggacgaagacgatatggaagatggcgaggctgtcgtgagcccttccgataagacgaaaaacgacgacgatatcatggaccccatcagtaagttcatggaaaggaagaaactgaaggaatccgaagaaaaggaagtcctgttgaaaacaaatctctcagggcgccagagtcccagctttaaactctccctgagctcgggtacaaaaacgaacctcacatcacagtcctctacaactaatctacctgggtcgccaggcagcccaggtagtcctggtagccccggctccccagggagcgtgcccaagaataccagccagacagcggccattaccactaaaggtgggctagtcgggctggtcgattatcctgatgatgacgaggacgatgatgaagatgaggacaaagaagacaccctgcccctgtcaaagaaagcaaaattcgacagctag

SEQ ID NO: 16612 - DNA, 522 bp, synthetic construct
  source 1..522: mol_type = other DNA; note = Synthetic coding sequence
atgtttaccgaaggtgaagagatgtacctgcaggggtcaacagtttggcatcccgactgtaagcaaagtaccaagactgaagagaaactgagaccaactcggacctcctccgagagtatctacagccggccaggcagctccattcccgggagtcccggtcataccatctatgccaaggtggacaacgagattctggactacaaggacttggccgcgatcccgaaagtgaaggcaatctacgacatcgagcgtcctgacctcattacatacgagcccttctatacgagtggctatgatgataagcaagagaggcagtccttgggcgagtccccgaggacactgtccccgacacccagtgcggagggatatcaggacgtccgggatcggatgatccacagaagcacctcacagggctccatcaacagcccagtttacagtagacactcctacacacccaccacatcaagatccccacaacactttcatagaccggaccaaggcatcaacatctaccgcaagtag

SEQ ID NO: 16613 - DNA, 1620 bp, synthetic construct
  source 1..1620: mol_type = other DNA; note = Synthetic coding sequence
atggccacatcagcacccctgcggtccttggaagaggaggtcacttgctctatctgcttggattacctgcgcgacccagtgactatagattgcgggcatgtgttctgtcggagctgtactacggacgtgagacccatctcagggtccagacctgtctgcccactctgcaagaaaccattcaaaaaagagaacattaggcccgtatggcagcttgccagcctcgtggagaatatcgagcgtctcaaagtggataagggccgccagcccggagaagtaactcgggaacagcaggatgccaaactgtgcgagagacaccgagaaaagctgcactactattgcgaggacgacggcaagttgttgtgcgtcatgtgtcgggagagcagggaacatagacctcacactgcggtactcatggaaaaggcagcccagcctcaccgcgagaagatcttgaatcatctgagcacgctgagaagagaccgagataaaatacagggatttcaagccaaaggcgaggcagacatcttggctgcacttaagaagttacaggaccagaggcagtacatcgtggccgagtttgaacagggtcaccaattcctgcgagaacgtgaggagcacctcctagagcagctggccaagctagaacaggaactgaccgagggaagagagaaattcaagagtaggggtgtgggtgaattggcccgtctcgccctggtgatttcggaattggaaggaaaggcacagcagccagcggccgagctcatgcaagataccagggacttccttaatagatatccacgtaagaagttttgggtcggtaagccgatcgccagagtagttaaaaaaaagacaggggaattttccgacaagctcctgagcctccagcgcgggctgagggaatttcagggaaagttgttgcgagacctcgaatataaaacagtctctgttaccctggatcctcagagtgcaagcggctatctccagttgagcgaggactggaagtgtgtgacctacaccagcctgtataagtctgcctacctccacccacagcagtttgactgtgagcccggagtattggggagtaagggcttcacctggggcaaagtatactgggaagtggaggttgaaagagaaggctggagcgaggacgaggaggagggtgacgaggaagaagaaggggaagaggaagaggaagaagaggaggccggatacggagatggctacgatgattgggagactgacgaggacgaggaatctttgggagatgaagaggaggaagaggaagaagaagaggaggaggtgctggagagctgcatggtgggtgtcgccagagattcagtcaagagaaaaggtgatctctccttgcggcctgaggatggagtttgggcactgcggttatcctctagtggaatatgggccaatacgagcccagaagctgagcttttccctgcactgcgcccacgtcgcgtgggaattgcattggattatgagggaggaacagttactttcactaatgccgaaagtcaggagctaatctatacattcactgccacattcacccgcaggcttgttccattcctgtggttgaaatggccagggactaggttactactccgaccttag

SEQ ID NO: 16614 - DNA, 2112 bp, synthetic construct
  source 1..2112: mol_type = other DNA; note = Synthetic coding sequence
atgttccgctacgagtctctggaagactgccccctcgacgaggacgaggatgccttccaaggccttggcgaggaagacgaagagatcgaccagtttaacgatgatacctttggctccggcgccgtagacgacgattggcaggaagcacatgagaggctagcagagctggaggaaaaactgcccgtggcggtcaacgagcagacaggcaatggcgagcgtgacgagatggacctgctcggcgaccacgaagagaatttggcggagcgcctgagcaaaatggtgatcgagaatgagctcgaagatcctgccattatgagagcagtccagactagacctgtgcttcaaccacagccaggcagcctgaatagctccatttgggacggcagcgaagtgctgaggcgtattcgtgggcccctccttgcacaagagatgcctaccgtcagcgtgttagaatacgccctgccccagcgcccaccacagggccccgaagacgacagagatttgtccgaaagagccctcccacgacggtcaacaagtccaataatcggtagcccacccgtccgggctgtgccaatcgggactccccctaaacagatggccgtgccttcattcactcagcagatactgtgcccaaagcccgtccatgtccgacctcccatgccaccccgatatccagccccttacggtgaaaggatgtccccaaatcagctgtgcagcgtgccacttcagccaggcaggatgtccccgtcgcaatttgcccgggtgcctggcttcgtagggtccccgctggccgcgatgaatcctaaactgcttcagggtcgggtgggacaaatgctcccccccgcgccaggtttcagggcatttttctccgcaccccctagtgcaacacctccacctcagcagcatccacctggaccaggacctcacctgcagaacttgcggtcacaggcccccatgtttcggcccgatactactcacctgcacccccagcaccgcaggctcctgcatcagcgccagcagcagaatcgcagtcagcaccgaaatctgaacggtgccggcgaccgggggtcccatcggtcatctcatcaagaccatctgagaaaggacccttatgcaaacctcatgttgcagcgagagaaagattgggtgtctaagatccaaatgatgcagctgcaaagcactgacccatatcttgatgacttctattatcagaattacttcgagaaactggaaaagctgtcagccgcggaggaaatacagggggatggtcccaagaaagaacggacaaagcttattaccccacaggtggctaaattggagcacgcctataaacctgtgcagttcgaagggagtctcggcaagctcacggtttcaagcgtgaataaccccagaaagatgatcgacgccgttgtgacaagtcgttccgaagatgacgaaactaaggagaagcaggtgcgcgataagcggcggaaaaccctcgtcattatcgagaagacgtattcgttattgctcgatgtggaagactacgagcgccgctatctcttgtcccttgaggaggagcgcccagctctgatggacgatcggaaacacaaaatttgtagcatgtacgataatctccgaggcaaactacctggacaagaaagaccgtccgatgatcacttcgttcagattatgtgtatcaggaagggaaagaggatggtcgcgcggatactgccttttctgtcaactgagcaagccgccgatatcctcatgaccacagctagaaatcttcctttcttgataaagaaggacgcccaagacgaggtgctcccttgcctgctgtcaccattctcactgctgctgtatcatctgcccagtgtgtccatcactagccttctcagacagctgatgaacctgccctcttcagacccagccactgagtccacacagaataatcaatggactgaggtgatgttcatggctaccagggaacttctacgaatcccacaggccgcgctggctaagcccataagcatccctacgaaccttgtgtctcttttctctcggtatgtagaccgtcagaaactgaatctgctggagacgaaactgcagttggtgcagggcatcagatag

SEQ ID NO: 16615 - DNA, 957 bp, synthetic construct
  source 1..957: mol_type = other DNA; note = Synthetic coding sequence
atgtccgcacacaaccggggcaccgagttagaccttagttggatatctaaaatccaggtgaatcacccagctgtcctgcggagagcagagcagatccaggcaagacgcacggtaaagaaggaatggcaggccgcttggttattgaaggccgtgacattcatcgatcttactactctgtcaggcgatgacacttcgagcaatattcagcgattatgttacaaagcaaaatatccaatccgcgaagacttattaaaagcactcaatatgcacgacaagggtattactactgctgccgtatgcgtctatcccgcaagagtatgtgacgcggtcaaagctctgaaagctgcagggtgcaacattcctgtggcctcggtggccgccggattccctgctggccaaactcacctcaagactagattagaggaaattcgcctcgcagtggaggacggggctactgagatcgacgtcgtgattaaccggagtcttgtcctgactggccagtgggaagccctgtacgatgagattcggcagtttagaaaggcctgtggggaggcccacctcaagactatcctggccacgggggagcttgggaccctcacaaatgtttacaaagcgagcatgatcgctatgatggcaggcagcgacttcatcaagacctcaacaggaaaggaaactgtaaatgccacattcccagtggcgatcgttatgctgcgcgctatcagggacttcttctggaaaactggaaataagatcgggtttaagcccgcaggcgggatacgctctgcaaaggacagcctggcttggctgtctctggttaaagaggagctgggtgacgagtggctgaagcctgagttgtttcgaattggagcgtcaacgcttctgtccgatatcgaacgacaaatataccatcacgtgaccggcaggtacgctgcttatcacgatctgcctatgtcctag

SEQ ID NO: 16616 - DNA, 1188 bp, synthetic construct
  source 1..1188: mol_type = other DNA; note = Synthetic coding sequence
atggcctcagcagctagcgttacttctctggccgacgaagtgaattgccccatctgccaggggactctacgggaaccagttacgattgactgcggtcataacttttgcagggcctgtttgacgaggtattgtgagattccagggcccgatctcgaggaatcccccacgtgtcctttgtgtaaggagccttttcgcccaggctcatttcgcccgaactggcaactggcaaacgttgtggagaacatcgagaggctgcagctggtcagcactctcgggcttggcgaggaggatgtctgccaggaacacggagagaaaatctacttcttctgcgaggacgacgagatgcagttgtgcgtggtctgcagggaagctggggaacatgcgacccacacaatgcgcttcctggaagatgccgctgcgccttacagagagcagattcataaatgcctgaaatgtctgagaaaggaacgagaagaaatacaggaaattcaatccagggaaaacaaacgaatgcaggtgctcttaacccaggtctctaccaagcgtcaacaagtcatctcggaatttgcgcatcttcgcaaattcttagaggaacaacagagcattcttttggcacagttggagtcccaggacggggacattttaaggcagagggatgaattcgacctattagtggctggtgaaatttgtagattctctgctttgatagaggaactggaagagaagaacgaaaggcccgcaagggaacttttaacagatataaggagtactctgatccgatgcgaaaccagaaagtgtcgcaagccagtggccgtgtctccagaactggggcagcggattcgggatttcccacagcaggcactgcctctccagagagaaatgaagatgttcctcgaaaagctctgctttgaactcgattatgaacccgcccatatcagcctcgacccccagacaagccatcctaagctgcttctctccgaagatcaccagcgggcccagttttcctataagtggcaaaactcaccagataatcctcagaggtttgatcgcgccacttgcgtcctggcacacacgggcatcactggcggccgccatacctgggtgtggatggccagggtccctggggacagcggctgctgccagttttgcagcccacctagtgtcctcgggaccgaggtggccgcttag

SEQ ID NO: 16617 - DNA, 3288 bp, synthetic construct
  source 1..3288: mol_type = other DNA; note = Synthetic coding sequence
atggcagagggagcagccggaagggaggacccggctcctcccgatgccgctggcggggaggatgatcctcgtgtggggcccgatgccgctggcgactgtgtcactgcagcaagcggcggacggatgagggatagacgctctggtgtcgcgttacccggcgcagcggggacaccagcagattctgaagcgggtctgctggaggcagctcgcgcaacccctcgcaggagtagcatcataaaagacccatcaaaccaaaagtgtgggggcaggaagaaaacagtgagtttctcatcgatgccctcagagaagaagatcagcagcgctaacgattgcatttcattcatgcaggcaggttgcgaacttaagaaggtgcggcctaactcccgtatttataaccgattctttacattggatactgacctgcaggcacttagatgggagcccagcaaaaaggatctggaaaaggccaagctggacatcagcgccatcaaagaaatcaggctgggcaagaacaccgaaacattcagaaacaatggcctggccgatcaaatttgtgaggactgcgcattttccatactgcatggagagaattacgaatctctagaccttgtggctaacagtgctgacgtggctaacatctgggtgagcgggttgcgttacctggtctctagaagcaaacagcccttggactttatggagggcaatcagaacactccacggtttatgtggttaaaaacagtcttcgaggccgccgacgtagatggtaatggaatcatgctcgaagacacttctgtggagcttatcaaacaactcaacccaacgctcaaggaggcaaaaatcaggctgaagttcaaggagattcaaaagagtaaggaaaagttgacaacaagggtcacagaggaagagttttgcgaggcgttttgcgaattatgtacaagaccagaggtttattttttactcgtccagataagtaagaacaaggagtaccttgatgcaaacgacctgatgctcttcttagaggccgagcagggtgttacccatataacagaggatatctgcttggatatcattaggcgctatgagttaagtgaagaggggcgccaaaagggctttctcgctattgacgggtttacacagtacctcctgtcgtcagaatgtgacatttttgatccagaacagaaaaaggttgcacaggacatgacccaaccactttcccattattacataaacgctagccacaacacttatctcatcgaggaccagttccggggaccggctgatatcaacggctacatcagggctcttaaaatgggatgtcgctcagtcgaacttgacgtgagtgatggaagtgacaatgagcctattttatgcaataggaacaatatgacgacgcacgtctcctttcgcagcgtaatagaagtcatcaacaagtttgcattcgttgcatctgagtacccactgattttgtgtctcggcaaccactgttctctgcctcaacagaaggttatggcccagcagatgaaaaaggtttttggaaataaactgtacacggaagccccactaccttctgaaagttatctacccagccccgagaaattgaaacggatgataattgttaaaggaaaaaaactgccaagtgaccccgatgttctggagggagaggtaaccgacgaggacgaggaggcagaaatgtctagacggatgtctgttgactacaatggcgaacaaaaacagatcagattgtgccgggaactgagtgatctcgtcagcatatgcaagagcgtgcagtatagagacttcgaactatcaatgaagtcacaaaattattgggagatgtgcagcttttccgagaccgaagcttccaggatcgccaatgaatatccagaagacttcgtgaattataataagaaattcctcagtagaatttatccctctgccatgcggatagatagctcaaatcttaaccctcaggacttctggaactgtggctgccaaattgtcgcgatgaattttcaaactccaggcccaatgatggatctgcatactggttggtttcttcagaatgggggatgtggctatgtgcttagaccaagtattatgagagacgaagtctcctatttttctgctaatacgaaaggtatcctccctggtgtctcgccccttgctttacacattaagatcatcagcgggcaaaattttccaaagcccaagggtgcttgtgcgaagggcgacgttattgacccctacgtgtgcatcgagattcatggcattcctgccgactgttctgagcagcgaaccaaaacagtgcagcaaaattcagataatcccatattcgacgaaaccttcgagttccaggtcaatctgcctgaactcgccatgattcggttcgtcgtcctggacgatgactatatcggcgatgagttcatcggccaatacacaatccccttcgaatgcctgcagcctggataccgccatgttcctctgagaagctttgtgggtgacatcatggagcatgtgactttatttgtgcacatcgcaattacaaacagatccggcggtggcaaggctcagaaaagatcattgtccgtacgaatgggtaaaaaagtgcgcgagtatactatgctgcgaaatataggtctgaagacaatagacgatatcttcaagatcgctgtgcacccattgagggaggcaatcgatatgagggagaatatgcagaatgccatcgtatctatcaaggagctttgtggtctgccaccgatcgctagcctgaaacagtgcctgctcacactgtcatctaggctgattacttctgataataccccatccgttagtctggtgatgaaagatagttttccctacctcgaacccctcggcgccattccagatgtgcaaaaaaaaatgctaacagcgtatgatctgatgatccaggagagtcggtttcttattgagatggctgacacagtgcaggaaaagatagtgcagtgccagaaggctgggatggaatttcatgaggaactgcataacttgggagcgaaggaagggcttaaaggccgaaaattgaataaggcaaccgaaagctttgcttggaacatcacggttctgaaaggtcagggggatttgctcaaaaatgctaaaaacgaagcgattgagaatatgaaacagattcagcttgcatgtttgtcatgcgggctgtctaaggcccccagctcatctgccgaggccaagtcgaaacgttcactggaggctatcgaagaaaaggagtcctcggaagaaaatggtaagctatag

SEQ ID NO: 16618 - DNA, 543 bp, synthetic construct
  source 1..543: mol_type = other DNA; note = Synthetic coding sequence
atggagcagccgaagggtgtggattggaccgttatcatccttacctgtcagtataaagatagtgttcaggtgttccaaagggagctggaggtgcgccagaagcgggagcaaattcccgccgggacactcctgctcgcggttgaagacccagaaaagcgtgtgggaagcggcggagccacactgaatgccctcttagtggccgccgagcatttgagcgcgagggctggcttcactgggcgcgatttccctttcgatgactgtggtagggcgttcacatgcttaccagtggaaaaccccgaagcccccgtcgaggctcttgtgtgcaatctcgattgcctcttagacataatgacgtaccggctggggcccggtagtccgcccggtgtttgggtttgctcgaccgatatgctgctcagtgttccagccaaccccggtgaaccagaaaccacttgggactgcctgcccagcagtcagcctcagcaggaggcttcttccgcgctcttagcccacccagcatctggacctgcgccgctcccctactag

SEQ ID NO: 16619 - DNA, 429 bp, synthetic construct
  source 1..429: mol_type = other DNA; note = Synthetic coding sequence
atgaacgaagtggtgcacacctcccctactataggttcaaatgtcgaggaaatcgtgattaacaatacaaggttcctcatgtgggacatagggggacaagagtccctgaggtcatcttggaacacctactacactaacactgagtttgtgattgtggtggtagatagcacagatcgtgaaagaatttccgtcaccagagaggaactctataagatgctggcccacgaggatttgaggaaggccggcttactcatttttgcgaataaacaagacgtcaaagaatgcatgacggtcgcagagatcagccagttcttaaagcttacatctataaaggaccatcagtggcacattcaggcttgctgcgcactcacaggagagggcttatgccagggcctggagtggatgatgtcaagacttaaaattcgttag

SEQ ID NO: 16620 - DNA, 342 bp, synthetic construct
  source 1..342: mol_type = other DNA; note = Synthetic coding sequence
atggagggcgtcctgtacaagtggacaaattatctatccggctggcagccaagatggttccttttatgtggcggaatcctgtcttactatgattccccggaggacgcatggaagggctgtaagggaagcatccagatggccgtctgtgaaatacaggtccactcggtcgataatactagaatggacctcataatccccggggagcagtatttctatcttaaggcccgcagtgtcgcggaacgacagcggtggttggtggctctggggtccgcaaaggcatgcctcacagattcaagaacccagaaggagaaagggaatctgctcaaaacgttaaagacctag

SEQ ID NO: 16621 - DNA, 1119 bp, synthetic construct
  source 1..1119: mol_type = other DNA; note = Synthetic coding sequence
atggccagcaatcataaatcaagcgcagcgcgtcccgtgagtagaggaggcgttgggctgacaggaagacccccaagcgggataagaccactgtccggaaatatccgcgtggctactgcaatgccacccggaactgctagaccgggctcaaggggatgtcccatcggaacaggtggggtgctgtcttcacagatcaaagtcgcgcatagacccgttacacaacaaggtctgacaggcatgaagaccggaacaaaggggccacagcgtcagatcctcgacaaatcatactaccttggcctgctgagatccaagatttcagagctcactactgaagtcaacaagcttcagaaaggtatcgaaatgtacaaccaggagaactccgtctacctctcctatgagaagcgggctgagaccttagccgtggagatcaaggagctccagggacaactcgccgactataacatgctggtggataagctgaatactaacaccgagatggaagaagtgatgaatgactacaacatgctgaaagcccagaacgatagagagacccagagcctggacgtgatcttcaccgaaaggcaagccaaggaaaaacagatcaggtcagtcgaagaagagatcgagcaggaaaagcaagcaaccgacgatattatcaagaacatgtccttcgagaaccaggtgaagtacctggagatgaaaacgaccaacgagaaacttctgcaggagttggacactctccagcagcagctcgactcccagaacatgaagaaggagtctttagaagccgaaatcgcccacagccaagtgaaacaagaggccgtgctgcttcatgagaaactgtacgagctcgagagtcaccgcgatcaaatgatcgctgaggacaagtctatcgggtccccaatggaagaaagagaaaaactgctgaagcagattaaggacgacaaccaggagattgcatctatggaacggcaactgacagatacaaaggaaaagattaaccagttcatagaggaaatccgacagctcgacatggatctcgaagaacaccaggaccccactaactacggatggaagattctggagaagaacaccgggtcctttaagaagcaggtgtag

SEQ ID NO: 16622 - DNA, 345 bp, synthetic construct
  source 1..345: mol_type = other DNA; note = Synthetic coding sequence
atgtggtcgttaactgcttcagaaggagagagcacaaccgcccattttttcctcggtgccggcgacgagggtctgggcacacgcggaataggcatgaggccagaagagtctgattcggaattactcgaggacgaagaggatgaggtgccccccgaaccacagatcattgttggcatttgtgctatgaccaagaaaagtaagtccaagcctatgactcaaatcctggaacggctctgccgcttcgactatcttactgtcgtcatcctgggcgaggacgtgattctcaacgaacctgttgagaactggccttcctgtcattgtctcattagttttcattctaaatag

SEQ ID NO: 16623 - DNA, 327 bp, synthetic construct
  source 1..327: mol_type = other DNA; note = Synthetic coding sequence
atggctatggccccgagcccttcgctggtgcaggtctacacctcgcctgccgctgtggccgtctgggaatggcaggacggtctgggcacctggcacccttatagcgccacagtctgctcttttatagagcaacagttcgtccagcagaaaggccagagattcggtcttggcagtcttgcacattctattccattggggcaggcagaccctagcttagccccttatataattgatctccccagctggacccagttcagacaagataccggcaccatgagagctgtgcgccgccatctcttcccccaacatagcgctccgggtcgatag

SEQ ID NO: 16624 - DNA, 549 bp, synthetic construct
  source 1..549: mol_type = other DNA; note = Synthetic coding sequence
atgcgggagtgtatcagtatccacgtgggccaagctggcgtgcagattggcaacgcgtgttgggagctgtactgcctagagcacggaattcagcccgacggccagatgccctccgacaagactatcggcggaggagatgatagctttaatacttttttttctgagaccggagccggcaaacacgtccctagggctgtcttcgtggatctggagccaactgtgatcgactggtgccccacagggtttaaggtagggattaactaccagcctcccacagtcgtgcccgggggcgatcttgcgaaggtgcagcgcgccgtgtgcatgctttcaaatacaaccgcgattgccgaagcctgggcaaggctcgatcacaaattcgacctgatgtacgcaaaacgagcatttgttcactggtatgtcggggagggcatggaggaaggggaattcagcgaggctcgcgaagatatggcagcattggaaaaggactatgaagaggtgggggttgattcagttgaaggagaaggagaggaggagggcgaggagtattag

SEQ ID NO: 16625 - DNA, 483 bp, synthetic construct
  source 1..483: mol_type = other DNA; note = Synthetic coding sequence
atggaggccgagcgtccacaggaggaagaggatggcgagcagggcccacctcaagatgaagaaggttggcccccgcctaactccacaactaggccctggaggtccgcccctccctcaccacctcccccggggactcgccacaccgccctcggacctagatccgccagtttactgtctctgcagacagaacttttgctcgatctcgtcgccgaagctcagagcagacgactggaagagcagagagccacattttatacacctcagaatccgagctcgctggccccagcccctctgcgccctctggaggatcgcgaacaactgtactctactattctttcgcatcagtgccagcgcatggaagcccaaaggtccgaaccccctctgcctcctgggggacaagaactactggaattgctattgcgtgtgcaagggggcggtagaatggaggagcagcgtagcagaccccccacccacacgtgttag

SEQ ID NO: 16626 - DNA, 3483 bp, synthetic construct
  source 1..3483: mol_type = other DNA; note = Synthetic coding sequence
atggcgtgtcgtcgaagatactttgtcgagggcgaagctccaagctccgagacaggaactagtctggatagcccatccgcgtatccacaggggccattggtgccaggttcttccctgtctcccgatcactatgaacacacaagcgtgggggcatatggcctgtactcgggaccaccaggacagcagcagaggacacgcaggcccaagctgcaacactctactagcattttgagaaagcaggccgaagaggaagcgatcaagcgctcaaggtccctgtcagaaagctacgagctcagctcagacctgcaagacaagcaagttgagatgctggagcggaaatacggcgggcgtcttgtgaccaggcacgctgcccggaccatccagacagcttttcggcagtatcaaatgaacaagaacttcgagagactgcgatctagcatgagcgagaacagaatgtcaagaaggatcgtgctcagcaacatgcggatgcagttttcgtttgagggaccagagaaggttcactcttcctacttcgagggcaagcaggttagcgtcaccaacgacggatcacagcttggagcactggtttctcccgagtgtggggatctatctgaacctactacactgaaaagcccagcccccagttccgacttcgctgatgccatcactgagctcgaagacgccttctccagacaggtgaaatctctcgccgagtctattgacgacgcgctcaattgtcgcagcctgcacaccgaagaagccccagcattagacgccgcgagggcccgagacactgagccccaaaccgcactgcacggtatggaccacaggaagttggatgaaatgacagcctcatactctgatgttaccctctacatcgacgaggaagaactgtctcccccgctgccactgtcccaggcgggtgacaggccttccagtaccgagtctgacttgcggctaagagctgggggggctgccccagattattgggctctcgctcacaaggaagataaagcagatactgatactagctgtagaagtacaccgtcgcttgaacggcaagaacaacggctgagagtagaacatcttccccttctgacaattgaacccccctcggacagctccgtagatctgagcgacagatctgagcgcggaagtctgaagaggcagagcgcttacgaacgctccctcggagggcagcaggggagccctaagcatggcccccactctggggctcctaaatcactgcctagagaggaacctgaactcagaccacgccctcctcgtcccctggactcccacctcgccatcaatggctcggctaaccgacagtccaagtctgagtccgactactccgacggcgacaacgattcaataaatagtactagcaactccaacgataccatcaactgctctagcgaatctagttcccgggactcgttgagagaacagactctgagtaagcagacctaccacaaagaggcccgcaacagctgggacagccccgcgtttagcaacgacgtaattagaaaacgccactataggatagggcttaacttattcaataaaaagcccgagaagggggtgcagtacttaatagaaagggggtttgtccctgatacccccgtcggcgtggcccatttcctcctgcagcgcaaaggcctcagtagacagatgatcggggaattcctaggcaaccgccagaaacagttcaatagagacgtactcgactgtgttgtcgatgaaatggacttcagcactatggagcttgacgaagccctcaggaaattccaagcacacatacgtgtacaaggcgaggcccagaaggtggagcgcctgatagaagccttctcccagaggtattgcatttgcaatcctggagtagtgagacagtttagaaatcccgacaccatctttattctcgctttcgccatcattctactcaatactgacatgtacagccctaatgttaaaccagagcgaaaaatgaagctggaggactttattaagaaccttaggggcgtcgacgacggggaggacatcccgcgcgagatgctgatgggtatttacgaacgaattaggaaacgagaattgaagacaaacgaggatcatgtgtcacaggtacagaaggtggagaaactgatcgttgggaagaagcctatcgggtcactccacccgggcctgggatgcgtcttatcactcccacacagacgcttagtctgttactgtcggctgttcgaagtgccagaccccaacaagccccagaagttgggcctgcatcagcgagagattttcctgtttaacgatctcctggtggttacaaagatctttcagaagaagaagaattctgttacatactcctttagacagtctttttccctgtatggcatgcaagtgttgctcttcgagaaccaatactatcctaatggaatacgcctcacgtcgagcgtgcccggcgcggacatcaaggtgctgattaattttaatgctcccaatcctcaggacagaaagaagtttacagacgacttgagggagagcatagccgaagttcaagaaatggagaagcataggatcgagtccgaactggaaaagcaaaaaggtgtggtaagaccttcaatgtcccaatgctcgtctctgaagaaggaaagtggcaatgggactctgagtcgggcctgcctggacgattcctacgctagtggcgagggactgaaacgctccgctctctccagcagtctccgagatctgtccgaggctgggaagcgcggcaggaggagcagtgcagggtcattagaatccaatgtggaaggctctatcattagcagtccccacatgaggcggcgggctacaagtactagagaatgcccttcgcggccgcaccaaaccatgcctaatagttcctctctgctggggtctcttttcggttccaaaagaggtaaaccacccccccaggcccatcttccaagtgccccagctctagctaccccaccccctacagggggccccgccagcttggcggcattgtgtggatggccaccacccggcgcacctcgaggggcggcagctgggaggcatgcgcgggcttctcaccccgtactgccacacgccgaaccgtcgccagtgccaccttcacccccccctcctccaacccccgcccacccagccaggactcccgtgccacctcgccctccgtggggacccccttccctcaggggcccctgtccacggcccccagccgctgctctgggacctaggggggcccactccgctccgccctgggctgctccttgtccagctgccccgcaccagcaacaaggacagacccaaagacaccagcacaactgcgtcgacagcctgggcagggggccccggctgcctgaaactcccgcacatcataccgggcacgccaggggcagccctgcagcacaccagacaagaggaacttcagtggcaatcagtccgctgtgcccttctaggcctaattag

SEQ ID NO: 16627 - DNA, 378 bp, synthetic construct
  source 1..378: mol_type = other DNA; note = Synthetic coding sequence
atgaagaaggagcatgtgttacattgccaattttcagcttggtatccattcttccgcggagtcacaatcaagtccgttattctgcccctgcctcaaaacgtgaaggattatctgctcgacgatggcactttggtggtgagtgggagggacgacccccccacgcacagtcaacctgactccgatgatgaggccgaagagattcagtggtccgacgatgaaaataccgcaacgctgactgatgcctattggattgccatgaacagcagcctcaaatgtaaaaccctatcagacattttccttttgttcaaatcaagcgactttataacaagggacttcactcagcctttcattcactgcacagacgattccccagattag

SEQ ID NO: 16628 - DNA, 414 bp, synthetic construct
  source 1..414: mol_type = other DNA; note = Synthetic coding sequence
atgtccctgttcgggactacatcagggtttgggactagcggcacctcaatgttcgggtcagcaacgacagacaatcataaccccatgaaagatattgaagttaccagcagccccgatgattccatcggatgtttgagctttagcccccctaccttgccagggaatttcctgatcgctggatcttgggccaacgatgttagatgctgggaagtccaagattctggacagactatccctaaggcgcagcaaatgcacaccggccccgttttggatgtctgctggagtgatgacggctctaaagtgtttaccgcaagttgcgacaagacagcaaagatgtgggatctatcctccaaccaggccattcagatcgcccagcacgacgccccagtgaagacaatccactggatcaaatag

SEQ ID NO: 16629 - DNA, 3222 bp, synthetic construct
  source 1..3222: mol_type = other DNA; note = Synthetic coding sequence
atggaagaacgaaagcatgagactatgaaccccgcccacgttctgttcgatagattcgtgcaggccaccacctgcaaaggcacattgaaagcgtttcaggaactctgcgaccacttggagttgaagcccaaagattatcgatcgttctatcacaaactcaagtctaagctcaactactggaaagctaaggctttatgggctaagttagataagagaggtagccataaggattacaaaaagggtaaagcttgcactaatacaaaatgcttgatcattggagccgggccttgtggcctccggactgccattgacctaagtctgcttggcgcaaaggtggtcgtgattgaaaaaagggatgcattctcacgaaacaacgtgctgcacctgtggccctttacaatccatgacctgcgcggtctgggagctaaaaaattttatggtaaattctgtgccggggctattgaccatatatctatccggcaactgcagctgatcctcttgaaagtggctttgattcttggcatcgaaattcacgtgaatgtggaattccagggtctgatccagccaccggaagatcaagaaaatgagcggatagggtggagggccctggtgcaccctaagactcatcctgtgtcagagtacgagtttgaggttattatcggtggggatgggaggagaaataccctggaggggttccgcaggaaggaattcagaggcaagttggcgatagcgataacagcgaattttataaacagaaataccaccgctgaggcaaaggtcgaggagattagcggtgtcgccttcatctttaatcagaaattcttccaggaactgcgcgaagctaccggtattgacctcgaaaatattgtctactacaaggatgacactcactattttgttatgactgcgaaaaaacaaagcttgctagataaaggggtaatcctccatgactacgcagataccgaactgcttctatcccgggaaaatgtagaccaggaggctctcctgtcatacgcacgcgaggcggcagactttagtacacagcagcagctgcctagcctcgactttgctatcaatcactacgggcagcctgacgttgcgatgttcgacttcacttgtatgtacgcaagcgagaatgcagctttggtccgggaacagaatgggcatcagttactggtggccctggtcggggactcactactggagcccttctggcctatgggcaccggaatcgcccgaggcttcctcgcggcgatggacagcgcttggatggtgcggtcatggagtctgggtacatcacctctggaagtcctcgccgaacgggagtccatttaccgactcctcccacaaacaacacctgaaaacgtgagcaagaatttctcccagtattcaattgaccccgtaacccggtatccaaacatcaatgtgaattttctgcgaccatcccaggtaaggcacctgtatgacacaggggagaccaaagacatccatttggagatggagagcctcgtgaattcccgcaccacaccaaagttaacgaggaacgagagcgtggctcgatcttcaaagctcctgggctggtgtcagcgacaaacggatggttacgccggcgtgaatgtgaccgatttgactatgagctggaagagcggtctcgctctgtgtgccattatacacagatataggccggatctgatcgacttcgactcattagatgagcagaatgtcgaaaagaataatcaactggcatttgatattgcagaaaaagagctcgggatctcaccaatcatgacaggcaaggagatggccagcgtgggtgagccagacaagctgagtatggtaatgtaccttacccagttttatgaaatgtttaaagactccctgccaagcagcgataccctggatctcaacgctgaggaaaaggctgttcttatcgctagtactcgcagccccattagcttcttgtccaaattaggccaaaccatctcgcggaagagaagccccaaggataagaaagagaaagacctagatggagctggcaagaggagaaagacctcccagtccgaagaagaggaagccccccgagggcatagaggcgagagacccacattagtgtccaccctcactgatcgccgaatggatgtggctgtagggaatcagaataaagttaaatacatggccacacaactgctagccaagtttgaggaaaatgcccctgctcagtccatcggcattaggagacagcagcgtgagaaggaatgcagccgcacatgtccgaagaaggtgatcaccctgagtccacccccgacaccgcctccttgccgggcgcatggcggccagcagacataccgggatttagacgccgataaccggggaaagcaatccccccatcacgagcgccctgaaccggaaccgcctaggcgcttctttgtggaccagtgggaactgagcttgtctcttcgctcttccgctcgtccggccagtccaagcagcgactctctcagacagaaatacattaagatgtacacaggaggcgtgagcagcctggcagaacagatcgcaaatcagctgcagcgaaaagaacagcccaaggcactgctcgacaaaaaagagcttggaagcatgaaaaaggagttcccgcagaatctcggcggttccgacacctgttatttttgtcagaaacgcgtttatgtgatggaaagactgtccgcggagggcaagtttttccaccggagttgcttcaagtgcgaatactgtgccactacccttagactgagtgcatacgcttacgacattgaggacggaaagttctactgtaagccccattactgttataggttgtctggctatgctcagcgcaaacgtcccgctgtagctccactctccggaaaggaggctaagggcccgctgcaagacggcgccaccactgacgcaaacgggcgcgccaacgccgtcgcttcttctactgaaagaaccccaggcagcctgacctcacttttcgggtgggtcgcacgccactcacttggactctgcgataaggccaaaggtatgagccaacacctgcaaagcaatatctcttcctttggccaacaggtggcacagaacccactggatagtttcttcatgtgtcagctactggcgtttggagtgcccttcctatacggactgagtgaggtgttggttcaaattaggggagagtttcattggcaagcagtagcccaatag

SEQ ID NO: 16630 - DNA, 543 bp, synthetic construct
  source 1..543: mol_type = other DNA; note = Synthetic coding sequence
atgtttttatcctgcggaagtcttcatcagcgtgggcccgagacagacgggactgtgtttcgaattcatacaaaggctgagggttttatggatgtggatatccccctggagctggtgttccacttgcccgtgaattatccgagttgccttcctggcatctccatcaacagcgagcagttgacaagagcacaatgtgttacagtcaaggaaaacctgttggagcaggctgagtccttgctgagcgaacccatggttcatgaacttgtcctgtggattcaacaaaatttgcgtcacattctgtctcaaccagagactggctccgggtctgaaaaatgcacctttagtacaagcacaacgatggacgacggcctctggatcaccctgttacatctggaccatatgcgagccaagaccaaatacgtcaagattgtagaaaaatgggcatcagatttgcgtctgactgggcggctgatgtttatgggcaagatcatcctcatccttttgcagggagaccggaacaatctgaaagtgcccaaaagttag

SEQ ID NO: 16631 - DNA, 1521 bp, synthetic construct
  source 1..1521: mol_type = other DNA; note = Synthetic coding sequence
atgaaaagaagaagcgtgacaatgactgatggtttgacggcggacaaggttacaagatccgatggctgccccacctctacatctcttccgagacccagagactccatccggagctgtgccctgtccatggatcagatccctgatctccattcccctatgagcccaatttcagagagcccgtcttctccagcctactctacggttacacgtgtgcacgccgctcccgctgcaccatctgccaccgcactccccgcatcccctgtggcccgccggagttccgaaccccagctctgtccgggttcagcaccaaaaacccatggcgaatcagataaagggccccacacatcccccagtcacacgctggggaaagccagcccatcccccagtctctcttcatacagcgaccccgattctggccactattgccaattgcagccccctgtcaggggctccagagaatgggctgcaactgaaacgtctagtcagcaagctcgttcttacggggagaggttgaaggaactgtcagaaaacggggcccccgagggggactgggggaagacattcaccgtccctatagtggaagttacctcaagctttaacccagctacctttcagtctctcctgattccaagagacaaccgacccctcgaggtggggttgctacgaaaggtcaaagagctgctggcagaggtggatgccagaactctcgctcggcatgttaccaaagtggattgcctcgtggcccggatattaggcgtcacaaaggaaatgcagacgctcatgggggtgcggtgggggatggagctactgactctccctcatggtcgtcaacttaggctggacttgctcgagagatttcatactatgtctatcatgcttgctgtagatattctgggttgtaccggaagtgccgaggagagggctgctctgctacataagaccatccagctcgccgctgaactaaggggcacaatgggaaacatgttctcgttcgccgccgtgatgggagctcttgatatggcacaaatctccaggctggaacaaacatgggtcaccctgaggcagcgtcataccgagggagctattctctacgagaaaaaactgaagccctttcttaaatcattgaacgaggggaaagaaggacctcctctgagcaacacaactttcccgcacgtgcttcccttaattaccctgctggagtgcgactctgcccccccagaggggcccgagccatgggggagtaccgagcacggcgtggaggtggttctggcacatttagaagccgcccggaccgtcgcacaccacggcggactgtatcatacaaacgctgaagttaagctacagggcttccaagcccgacctgagctactcgaggtattctcaacggaattccagatgcgcctactgtggggaagccaaggggcatctagcagtcaagcccggagatatgaaaagtttgataaagtgcttacagctctctcacataagctagaacccgccgtgaggagtagcgagttatag

SEQ ID NO: 16632 - DNA, 369 bp, synthetic construct
  source 1..369: mol_type = other DNA; note = Synthetic coding sequence
atggcaacatccgcccctcttcggtcactcgaagaggaagtcacgtgttcaatttgtctagactacttgcgggatccggttacaatcgattgcggccacgtgttttgcagatcgtgtaccaccgacgtgagacccattagcggtagtaggccagtgtgccctctctgtaagaagccctttaagaaagaaaacattcgacccgtctggcagctggctagcttagttgagaacatcgagaggctgaaggtggataagggcagacagcctggcgaggtgacacgggagcagcaagatgcgaagttatgtgagcgtcatagagaaaagttgcactactattgtgaagatgatggaaagctgttgtgtgtgtag

SEQ ID NO: 16633 - DNA, 369 bp, synthetic construct
  source 1..369: mol_type = other DNA; note = Synthetic coding sequence
atgcctgagattaacacaaatcatctggacaagcagcaggtccagctgctcgcagaaatgtgcatcctaatcgatgaaaacgacaataaaatcggtgcagagactaagaaaaattgtcacctgaacgagaacatcgaaaagggcctgctgcaccgtgcattcagtgtgtttctcttcaacactgaaaacaagttactgttgcaacagaggtcagatgccaagattacctttccgggttgttttactaatacttgttgttcccaccctctgtctaaccctgccgaactggaagaaagcgatgccctcggcgttcggcgggctgctcaacggagactgaaggccgagctcggcattccccttgaagaatag

SEQ ID NO: 16634 - DNA, 408 bp, synthetic construct
  source 1..408: mol_type = other DNA; note = Synthetic coding sequence
atggctgcgctgcggccattggtaaagccgaagattgttaagaagcggacaaagaaatttatcaggcaccaatccgatcggtacgttaagattaagaggaattggagaaaaccacgggggattgataacagagtgcgcagacggtttaaaggccagatccttatgcctaatattgggtatggatctaacaagaaaactaagcatatgctgccctcaggattcagaaagtttcttgttcacaatgttaaggaattggaagtgctcttgatgtgcaataagagttactgtgctgaaatcgctcacaatgtatcatcgaagaatcgcaaagccatcgtcgagcgggccgcgcaactggccatccgggtgactaatcccaacgcccgccttagatctgaggagaacgaatag

SEQ ID NO: 16635 - DNA, 3282 bp, synthetic construct
  source 1..3282: mol_type = other DNA; note = Synthetic coding sequence
atgggtacaggtgatttcatctgtatatcaatgacaggtggggctccttggggctttagactgcaaggcgggaaggagcagaaacagcctcttcaggtggccaagatacggaaccagtctaaggcttccgggagcggcctgtgcgaaggggacgaagtggtttctatcaatggcaatccctgcgccgacctcacctatcctgaggtcattaaactgatggaatcgataactgacagtcttcaaatgctcatcaaacggcctagcagtggaatatccgaggctctgatctctgagaatgaaaataaaaacctcgagcatctcacgcatggaggatatgtcgagtctacgactttgcagatacgccccgctaccaagacacagtgcactgaattcttcttggcaccagtgaagacggaagttccgctggcagagaatcaaagatctgggccagattgcgcggggagtctaaaggaggagactggccccagttaccaacgcgccccccagatgccggactcacagagaggacgggtggcagaggaactgatcctgcgcgagaaagttgaggctgtgcagcctggcccggtcgtcgagttgcagctcagcctaagccaggaaagacataagggcgcctctggccctttggttgctcttcccggggctgagaagagtaagtctcccgaccccgatcctaatctttcccacgacagaattgtgcacatcaatagcattcccactaatgaaaaggcagatccatttttgagaagctctaagataattcagatcagttctggaagggagctccgggttattcaggaaagcgaggccggagacgctggcctgcccagggtggaagtgatcctggattgcagtgatagacagaaaactgagggttgtagactgcaagctggcaaggagtgcgtggactcaccagtggaaggaggtcagagcgaagctccgcccagtttggttagcttcgcggtttcctccgaaggaacagagcagggcgaggacccccgttcagaaaaagaccacagcagaccccataaacacagagccaggcatgcgaggctgagacgaagcgaatctctcagcgaaaagcaggtaaaggaggctaagtctaagtgtaagagcatcgctctgctcctgaccgacgcgccgaatccaaattccaaaggcgtgttgatgttcaaaaagagaagaagaagggccagaaaatataccctggtgagctacgggactggggaactggagagggaggccgacgaggaggaggaaggtgacaaggaagatacttgcgaggtggccttcttaggggcctcagagtcagaggtggatgaggagctgttgtcagacgtggacgacaacactcaggtggttaacttcgactgggattctggactggtagatattgagaaaaagcttaataggggcgataagatggagatgctgccggacacaacaggcaaaggtgcgttgatgtttgctaagaggcgggagaggatggatcagatcactgcccagaaggaggaggataaagtcgggggcaccccttctagagagcaggacgctgcgcaaaccgatgggctgcgtacgactaccagttaccagcgcaaagaagaagaatcagtgcggactcagtcatctgtgtccaaatcatacatcgaagtgagccacggcctcgggcacgtgcctcagcagaatgggttctccggcacatccgaaaccgccaacatccagagaatggttccaatgaacaggacagcgaaaccttttcccgggtccgtgaatcagcctgctactccattttctccaacccgaaacatgacaagtcctatcgcggattttccagctcctccaccatatagtgcagtcacccctcccccggatgctttttcccgtggagtttctagccctattgccggaccagctcagcctcccccctggccccagccagccccatggtcacagccggccttttatgattcttccgaacgcatcgcgagtagagatgagcgtattagtgttccagctaaaagaacagggattctccaggaggcgaaaagacgaagtactactaaacctatgttcacctttaaggagcctaaagtgagtccaaacccagagctcctgtccctgttacagaactctgaaggaaagcggggaaccggggctgggggggactctggacctgaggaagattacctgtcgctgggtgccgaagcgtgtaactttatgcagagcagctccgccaagcagaaaacaccgcctcccgtggcccctaaacccgccgtcaaaagctcctccagccagcccgtgactcccgtgtcaccggtgtggtcacctggtgtagcaccaacgcagccgcccgcgttcccaaccagcaatccatctaaaggcaccgtggtgtctagcatcaaaatcgcccagccttcctaccctccggcacgccccgccagcacattgaacgtcgctggtccctttaagggaccccaggccgctgtggcgagccagaattatacccctaaacctaccgtctctacgccaacggtgaacgcggtccaaccaggcgcagttggtcctagcaacgaattgcctggaatgagcgggagaggagcgcagttatttgctaaacgacagagcaggatggaaaaatatgttgtcgacagtgataccgtgcaagctcacgccgcaagagcacaatccccgaccccctcgttgccagcctcctggaaatattcttcaaacgtgagagctcctcctcctgtggcctacaatcccatccattcaccttcataccctcttgcagccttaaagagtcagccctctgcagctcaaccttccaagatgggaaaaaagaaaggcaaaaagccattgaacgctctggatgtgatgaaacatcagccttatcagcttaacgcgtctctgtttaccttccagcccccagatgcaaaagacggtctgccacaaaagtcctctgtcaaagtcaactccgccctggctatgaagcaggccctccccccccgccccgtcaacgctgcatctcccaccaacgtgcaggccagctcagtatacagcgttcccgcatatacctcgccaccatccttcttcgccgaggccagctctccggtcagcgctagccctgttcctgtcggtatccccaccagtcccaagcaagagtctgcctcttcctcttatttcgtagcaccccgacccaaatttagcgccaaaaagtccggcgtgaccattcaggtgtggaagccatccgtggtcgaggaatag

SEQ ID NO: 16636 - DNA, 600 bp, synthetic construct
  source 1..600: mol_type = other DNA; note = Synthetic coding sequence
atggccatcgtgcaaaccttgcccgtccccctggagccagcccccgaagccgcgactgctccgcaggcacccgtgatgggttctgtcagcagccttatctccggacgcccgtgtcccggtggccctgcccctcctcgccatcacgggccacctggtccaactttttttcgtcagcaggatggattgctgcgcggtggctacgaagctcaggaacccctttgcccagccgtgccaccacggaaggctgttcccgtgactagctttacatacatcaacgaagacttcagaactgagagtcccccttcgccaagctccgacgtggaggacgcccgcgaacagcgcgctcacaacgcacacctgcgaggaccacccccgaaactgatccctgttagcggaaagctggaaaagaatatggaaaagatactgattcggcctactgccttcaaacccgtgcttcctaagcctaggggggcccccagtctgcccagctttatgggcccacgcgcaaccggactctccggctctcaggggtctctgacacagctctttggcggtccggcatcgtcaagctcgtcctcctcttcctctagcgccgcatag

SEQ ID NO: 16637 - DNA, 612 bp, synthetic construct
  source 1..612: mol_type = other DNA; note = Synthetic coding sequence
atgccctccactcccgcttccaccatctctgcccgtgaagagctggtgcaacggatccctgaggccagcctgaacttccagaaagtgccacccgggtccctgaactctcgagactttgaccagaacatgaacgatagctgtgaggatgcactagctaataaaacccgtccacggaaccgcgaggaggtaatctttgataatcttatgctcaatcctgtaagccagttgtctcaggcaatacgcgaaaacaccgagcacctggcagaaaagatgaagattttgtttcaaaacaccggcagggcctgggaggacctagaggcgcgaattaacgccgaaaacgaggtaccaattctcaaaacctcaaacaaggaaatctccagcattcttaaagaactaagacgcgtgcagaagcagctggaggttattaacgcaatcgtagacccctcaggaagtcttgacctactgctgcctaccctgtcgtcatttgtgccaccaccacccgcgtttgcctgggaactagtgcttgtttgtcgagcctcccgtcgagtccattgcactttcgtactcagatggtcctgtggctgcctttctgaaaacggttactttatctag

SEQ ID NO: 16638 - DNA, 321 bp, synthetic construct
  source 1..321: mol_type = other DNA; note = Synthetic coding sequence
tgaccaaccacctcgagacccgctctggatgtaaagggcggcactagccccgccaaagaggatgcaaaccaagaaatgtcaagcgtggcttactctaacctcgccgtcaaagacagaaaggcagtcgccatcctgcattaccctggtgtggctagcaacggtaccaagagccctgccattattgatagtgacccagtggacgaagaggtgctcatgagtttggtggtggaactcggcttagatcgcgcaaatgaactgcctgaactgtggcttgggcagaatgagttcgatttcaccgctgactttccatcctcctgctag

SEQ ID NO: 16639 - DNA, 456 bp, synthetic construct
  source 1..456: mol_type = other DNA; note = Synthetic coding sequence
atggccgctttccgagacatcgaggaggtgagccaggggttacttagtctgcttggggcaaaccgggctgaagcacagcagagacggctgctcggccgacatgagcaggtggtcgaaagattgctggagactcaagacggcgccgagaaacaactgcgagaaattttaaccatggagaaagaggtggcacagtctctgttgaacgctaaagagcaggagcgtcaggagaaggaagtggatgaggatactaccgttacaattcccagcgccgtctacgtggctcagctttatcatcaggtatcaaaaatcgagtgggattatgagtgcgagcctggcatggtcaaaggaatccatcacggtcctagtgttgcccagcctatccacctggattctactcagctgagccggaaatttatctctgactacttgtggtctctggtcgataccgagtggtag

SEQ ID NO: 16640 - DNA, 444 bp, synthetic construct
  source 1..444: mol_type = other DNA; note = Synthetic coding sequence
atgttgaggtgtggccagatgatattcgcgcaggctctggtctgtcgacacctaggccgggactggaggtggacccagcgaaaacgacaacctgacagttatttttctgtactcaatgcgttcattgatcgcaaggactcctactactcaattcaccagatcgctcagatgggagtgggggaaggcaagtccatagggcagtggtacgggcccaatactgtggcacaagttctgaagaaattagcggtctttgacacatggtcctcccttgccgtgcatatcgcaatggacaacacggtcgtgatggaagagatcaggcgactgtgcagaacatccgtcccatgtgccggcgccacagcatttcccgcggattccgatagacattgcaatggcttccccgcgggagccgaggtcactaatcgaccaagcccctggagaccctag

SEQ ID NO: 16641 - DNA, 1482 bp, synthetic construct
  source 1..1482: mol_type = other DNA; note = Synthetic coding sequence
atggagaagtatgaaaatttaggcttagtcggcgaggggtcatatgggatggtgatgaagtgccggaataaagatacagggaggattgtcgccattaagaagtttctggaatctgacgatgataaaatggtgaagaagatcgctatgcgtgagatcaagctgctcaagcagctccgccatgagaacctcgtgaacttgctggaagtgtgtaagaagaagaaacgttggtatttggtcttcgaatttgtggaccataccattttagatgatttggaattattcccgaatggattggactaccaggtggtacagaagtatctttttcaaatcataaatggtattggattttgtcactcccataatataatccaccgggacatcaaacctgagaatatcctcgtttcacagagcggggtcgtgaaactgtgtgacttcggattcgctagaacccttgcagcacccggcgaagtatatacagattatgttgccacgagatggtatcgggcacctgaactcctcgtaggcgacgtcaagtacgggaaggccgtcgacgtttgggcaatcggttgcctcgtgacggaaatgtttatgggcgaaccccttttcccaggcgacagtgacattgatcagctctatcacatcatgatgtgcctaggcaacctgattccaagacaccaggagttgtttaacaagaaccccgttttcgccggggtgaggttgccagagatcaaagagcgggaacctcttgagcggcggtatccaaaactttccgaggtagtgatcgaccttgccaagaaatgtttgcacatcgatcccgacaaacggcctttctgtgcagaactgctccaccatgacttcttccagatggacggattcgcagaaagattctctcaggagcttcagcttaaggtccagaaggacgccaggaacgtcagtttatccaagaagtcacagaacaggaaaaaagaaaaagagaaggatgacagcctggtcgaagagaggaagaccctcgtggtgcaggacacaaacgccgacccaaagatcaaggattacaaattgttcaaaataaaagggtctaagatcgacggagaaaaagctgaaaagggtaacagagctagcaacgcctcctgcctgcacgattcaagaaccagtcacaacaagatcgtaccatctacttcactaaaggattgctctaatgtctccgttgaccacactaggaatccttctgtagccattccccccctgacgcataatctgagtgccgtagccccctcaattaactcaggaatgggtaccgagaccatccctattcaaggataccgcgtcgacgaaaagaccaaaaaatgtagcatcccttttgtaaaacccaatagacacagtccgagcggtatatacaatatcaacgtcactacccttgtttccgggccacccctctcagacgatagcggtgcagatctcccccaaatggaacatcaacactag

SEQ ID NO: 16642 - DNA, 6189 bp, synthetic construct
  source 1..6189: mol_type = other DNA; note = Synthetic coding sequence
atggatggatgcctggacacggaaacccctacagtgtccatccaggagaatgttgacgtggcaagtcttaagcctatcagcgacagcggcatcaactttactgacgccatctggagtcccacatgcgaacgacggacgtgcgagtgccatgaatctattgaaaagaacaaggataaaactgatcttccacaatccgtggtgtatcagaacgaagaggggagatgggtgactgatctagcttactataccagctttaattcaaaacagaacctgaatgttagtctgtcagacgaaatgaacgaagactttaggtccggttccgaagccttcgatttaattgcgcaggacgaggaagagttcaacaaagaacaccagtttatccagccctctttcggctattttatcaggagtcctgagaagcgcgagcccattgccttgatccgcaaatccgacgtctcaagaggaaacctggagaaggaaatggcacatctgaaccatgacctgtactccggcgacctcaatgagcagtctcaggcgcagctcagcgaagggagcatcacgttacaggtggaagcagtggaatctacgtcccaggtggacgaaaacgatgtcaccctgacagcagataagggtaagactgaagataccttctttatgtcgaacaagccccaaaggtataaggacaagctgccagactcgggcgactctatgctcagaatcagtactatcgcatccgctatagctgaagcctccgtgaacacagatccatctcagctcgccgccatgatcaaggctctctctaataagacgagagacaagacatttcaggaggacgaaaaacagaaggactactctcacgtgcgccattttttgccaaacgacctcgagaaaagcaatggtagcaatgccctggacatggagaaatatctgaaaaagaccgaggtgtctcgttacgagtccgccctcgaaaacttctcccgagcctcaatgagcgatacctgggatctgtcccttcccaaggagcagacaacacaagacattcatccggttgatctgtccgcgacttccgtcagtgtgcgggctccagaggaaaacacagcggctatcgtatacgttgagaacggtgagagcgagaatcaggaatctttccgcactatcaactcttccaacagtgtaacaaatcgcgagaacaattcagcagtggtggacgtgaagacttgctcgatagacaataaattacaggatgtcgggaacgacgagaaagctacaagcatatcgactcccagcgatagctactctagcgtccgtaaccccaggatcacctctctgtgtctactaaaagattgcgaggaaataagagacaaccgcgaaaaccagaggcagaatgagtgtgtgtctgagatctccaatagcgagaagcacgtaactttcgagaaccaccgcattgtgtcacccaaaaatagcgatcttaaaaacacaagtcctgaacacggtggacggggttctgaggatgaacaggagtctttcaggccttccaccagcccactatcacattcgagcccttcagagatatctggaacgtcctcatccgggtgcgccctcgagtcattcggatcggccgctcagcagcagcagcctccttgtgaacaggagctttcgccacttgtgtgctctccagcgggagtgtcccgacttacttatgtgagcgaacctgagtcgtcttatcctaccactgccaccgatgatgcattggaagacaggaaaagcgacataacaagcgaattaagtaccacaatcatccagggctcccccgccgccctggaggagagggcgatggaaaagctcagagagaaggtgccattccaaaatagggggaaggggaccctctcttcgattattcagaataatagcgatacgagaaaggcaacagaaaccaccagcctatcatcaaagcccgagtacgtgaagccagactttaggtggtctaaagatccgtcgtccaagtcaggtaatctgctggagaccagcgaagtagggtggacatccaaccctgaggagctggaccccatccggctggcacttctcgggaagtctggactgagctgccaggtcggcagcgccacttctcaccctgtgtcatgtcaggaacccattgacgaagaccaacggatctcacccaaggacaagagtactgccggacgagaatttagtggtcaggtaagtcaccagaccaccagcgaaaatcagtgtactcccataccttcttccaccgtgcactctagcgtagctgacatgcagaatatgcctgcagccgtgcatgccctgctgacgcagccgtcactgtctgctgctcctttcgcgcagcggtacctcggaacactgccttctaccggatcaactaccttgccccagtgccacgctgggaatgcaacagtgtgcggattctccggtgggctcccatatccagctgtggccggcgagcccgtacagaactcagtcgctgttggaatatgcctggggagcaatatcggctccggctggatgggtacaagttctctctgcaatccatacagtaacacactgaatcaaaacctgctgagcacaaccaaaccctttccagtgccctctgtggggacaaattgtgggattgagccctgggacagcggggtcacaagcggccttgggtccgtcagagttccagaggaactaaaactaccacacgcatgctgcgtgggtatcgcttcgcagacccttctgtccgtcctaaacccaacagatagatggctccaggtaagtatcggcgtgctgtccatcagtgtgaatggggagaaggtggatctgtctacctatcggtgtctcgtgttcaaaaataaagccatcatccgcccccatgctaccgaagagattaaggtcctctttattcctagttcacccggggttttccgctgtacttttagtgtggcatcctggccctgctcaacagatgcagaaacgatcgttcaagctgaagctttggcgtcgaccgttaccctgacggctatagctgagagtcccgttattgaagtggagaccgagaagaaagatgtccttgattttggcgatctgacctacggtggttggaaggcactgccacttaaactcataaaccgcacccatgccaccgtgcccattcgcctaatcataaatgctaatgctgtggcgtggagatgtttcactttctcaaaggagtcggttcgggctcccgtggaagttgccccttgcgccgacgtggttactcgactggcaggaccttcggtggtgaatcacatgatgcctgcgtcttacgacggtcaagatcccgagttcttgatgatctgggtgttgttccactctcccaaaaaacagatctcatcctccgatattcttgactccgccgaagaattctcagctaaagtcgatattgaagtagattccccaaatcctacgccggtcctgcggtctgtgtccctcagggcccgggcaggcatcgctagaatccatgcacccagagatctccagaccatgcacttcttggctaaagttgcaagcagtcgaaaacagcatctgcctttgaaaaacgcaggcaatattgaggtgtatctggacattaaggtccccgaacagggaagtcacttttcagtggaccccaagaatttgcttttgaagccaggggaagaacacgaggttattgtgtcctttacccccaaggatcctgaagcttgcgaagagaggatcctcaagatctttgtgcagccctttggcccgcaatatgaagttgttctcaaaggagaagtcatttcctctgggagtaagcctttgagcccggggccatgccttgacataccatcgatattgtctaataaacagttcctggcatggggcggcgtcccactgggacggactcagcttcagaaacttgctctcagaaacaacagcgcctctacgacccagcatctccgactgctgatccgcggccaggaccaagactgctttcagttgcagaataccttcggtagcgagcagcggctgacatcgaattgtgagataaggattcacccaaaagaggacatcttcatcagcgtgctgtttgctccaacaaggctttcctgcatgctggcaaggttggaaattaaacagctgggcaaccgctcccagcctggaatcaagtttacaatccccttaagtgggtacgggggaactagtaatctgattctggagggcgtgaaaaagctgagcgacagctacatggtcacggtgaacggcctggtacccggtaaggagagcaaaattgttttcagcgtgaggaatactgggagcagggccgcgtttgttaaagcagttgggttcaaagactcgcagaagaaggtgcttctggatcccaaggttctgcgaatcttcccagacaagtttgtcctgaaggaacgcacacaggaaaatgtgactctgatttataatccctccgatcggggcatcaataacaagacagctactgaattgtccaccgtgtacctgtttggcggagatgagatttctcggcagcaatataggagagctctgctccacaagcccgaaatgatcaaacaaatcctgccagagcattccgttttacagaacatcaactttgtcgaggctttccaggacgaactgttggttaccgaagtgtatgacctgcctcagaggccaaatgacgtccagctgttctacggatcgatgtgcaaaatcattcttagcgttatcggcgaattcagggactgcatttcatctagggaattcctgcagcctagttcaaaggcctcccttgaaagcacctctgacttgggcgccagcggcaagcacggcggaaacgtatccttggatgtcttgcctgtgaaaggaccacagggctcccctctgctgtctagggcagcaaggcctcccttagaccagctcgcctcggaggaaccctggacggtcctgcctgaacacttgatattggtggcccctagcccttgtgatatggctaagacaggaaggtttcagattgtgaataactccgtcagattgctaaggtttgagctgtgttggcccgctcactgcctgaccgtcactccccagcacggctgcgtggcccccgagtctaaactgcagattctggttagtcccaattctagcttgagtaccaaacagtcgatgtttccgtggtcgggcctcatttacatccattgcgacgatggacagaaaaagatcgtcaaagtgcagatccgagaggatctaacccaggtcgagctcctgactcgtctgacctctaaacctttcggcattctgtcacccgtatctgagccgtccgtctctcatttggtgaaacctatgacaaagccaccatccaccaaggtcgagatcaggaataagtccatcaccttcccaactacggagcccggggaaacatctgagagctgcctggagctggaaaatcacgggaccaccgacgtaaagtggcatctgagcagcctggcccccccatacgtcaaaggggtggatgagagtggggatgtgtttagagccacctatgccgcgttccggtgcagccctatcagcggtttgttggagtcacatggaattcagaaggttagcatcaccttcctaccgagagggaggggagattacgcccagttctgggatgtagagtgtcaccctctgaaagagcctcatatgaagcacactttaaggttccagctgtctggccagtctatagaggcagaaaacgagccggaaaatgcttgcctgtccaccgactccctcattaaaattgaccacctcgttaagcctagaagacaggctgtgtcagaggcctcagccagaatccccgaacagcttgatgtgaccgcgcgaggagtctacgcaccagaggacgtatacaggtttaggccaacgtcagtgggggagagtcgcacccttaaagtcaatctccgaaataactcgttcattactcattccctgaagttcctgtctcctagggaacctttctacgtcaaacactcgaagtactcccttcgcgcacagcactacattaatatgccagtccaattcaagcctaagagcgcagggaaattcgaggcactgctggtgatccagaccgacgagggcaagagcattgccattcggttaatcggcgaagcccttggcaagaattag

SEQ ID NO: 16643 - DNA, 1545 bp, synthetic construct
  source 1..1545: mol_type = other DNA; note = Synthetic coding sequence
atgtctatctcttcagacgaggtcaatttcctcgtgtacaggtatcttcaagagagcggttttagtcattccgcattcacatttgggatcgaatcccacatctcccagagtaatatcaacggcgcgttagtgccccccgcagcactgatctctattattcaaaaaggtctgcagtatgttgaggccgaggtgtctatcaacgaagatggcacgctgtttgacggacgccccattgaaagcctgtcactaatagatgccgttatgcctgatgtggtgcaaacccggcagcaagcgtacagggataagctggctcagcagcaggccgcagcggccgcagccgctgcagccgctgcatcgcagcaggggagtgccaagaatggcgagaacacggctaacggcgaagaaaacggcgctcatactatagcaaataatcacaccgacatgatggaggttgatggagatgtcgaaatccctcccaacaaagccgtggtactccgcgggcatgagtcagaagtcttcatttgcgcatggaaccctgtctcagatctactagcctccggcagtggcgacagtacagctagaatctggaatctgagcgagaactccacgtccggcagcacccagctcgtacttagacattgtattcgggaaggaggccaggatgtcccaagcaataaagacgtgacctccctggattggaatagtgaaggcaccttactggctaccggtagctacgacggatttgcccggatttggaccaaggacggcaacttggcctccacgctcgggcagcataaaggtcctatctttgccctaaaatggaacaagaagggaaactttatcctttccgctggtgtagacaagaccactatcatctgggacgcgcacacaggggaggctaaacagcagttcccctttcacagcgcgcctgctttagacgtcgactggcagtctaataatacgttcgcaagctgttccacggacatgtgtatccacgtctgcaagttagggcaggacaggcccatcaagacttttcaaggacacactaacgaggtaaacgctatcaaatgggatcctacaggtaacctccttgccagttgttctgatgacatgacacttaagatctggagtatgaaacaggacaactgcgtgcacgacctccaggcccataataaagagatttacaccattaagtggtccccaacgggacccgggacaaacaatcccaacgctaacctgatgctcgcctccgctagctttgattcgaccgtgagactctgggacgtggatcgaggcatctgtattcacactcttaccaagcatcaagaacccgtgtactccgtggctttttctcccgacggccgttatcttgccagcgggtccttcgataaatgcgtgcacatctggaatactcagactggagcattagtgcatagctatcgcgggaccggggggatctttgaagtgtgttggaacgcggcgggggataaagtgggggcatcagctagcgacgggagcgtttgcgtattggatcttcgtaagtag

SEQ ID NO: 16644 - DNA, 2034 bp, synthetic construct
  source 1..2034: mol_type = other DNA; note = Synthetic coding sequence
atggaagaaacaatgaagttagccacgatggaggacacagtcgaatactgcctgttcctgatccccgacgagtcacgggattcagacaaacataaagagattttgcagaagtatatagaaaggattatcacccggttcgcccccatgctcgtaccatacatctggcagaaccagccatttaacctcaagtataagcctggcaaaggcggtgttcctgctcacatgtttggcgtgaccaaattcggagacaatattgaagatgaatggtttatcgtctacgtcattaaacaaattactaaggagtttccagaactggtggcacgtatagaggataatgacggcgagtttttgcttatcgaagccgcagactttctgcccaaatggctagatccagagaactcaaccaatcgggtctttttttgccacggcgagctctgcatcatcccagcgccccgaaagagtggtgcagagtcttggctgccaaccaccccccccacaattcctcaggctctgaatattataactgcacattccgagaagatcctcgcgtccgagtctatccgagccgctgtgaataggcggattcgagggtaccctgagaagatccaggcatccctgcaccgggctcattgttttcttccagccggaatcgtagctgtactaaagcagcgccccaggcttgtggctgccgccgttcaggccttctacctgcgggatcctattgacttgcgggcatgcagggtttttaagacttttttaccagaaacacggataatgaccagcgtgacctttactaaatgcctttacgctcagctggtgcagcagcgatttgtccccgatagacggtccgggtataggctgccacccccatccgacccacagtacagggctcacgagctcggcatgaagctagcccacgggttcgagatcctctgctccaagtgcagtccccatttttccgattgcaaaaagtctctcgttaccgctagccccttgtgggcgtcttttctcgagagcctgaagaagaatgattactttaaagggttgattgaagggagcgctcaataccgggaacgtctggagatggccgaaaattactttcaactttctgtggactggcccgagcggttggaggtgcagtggcgcgaccctggactcctgcaggccccaccaccaggatttaccccatttatctgcctcagtctcctgtcaacatgggacaattctagtctggccatgagccccggcgaggagatcctcacgttgttgcagactatcccattcgatatcgaggacctgaagaaggaagctgccaacctgcctcccgaggatgacgaccagtggctcgatctgagtcccgaccagcttgaccagcttttgcaagaagccgtcgggaagaaagagagcgaaagcgtaagcaaagaagaaaaggagcagaattacgacttgaccgaggtatccgaatcgatgaaggctttcataagcaaggtcagtacacacaagggcgcagaacttccacgggagccatccgaagcgcccataacgttcgacgcagattcctttttgaactactttgacaagattctgggcccccggcctaatgaatctgatagtgacgatttggatgacgaagacttcgaatgccttgattccgacgatgatctggattttgagacccacgagcccggagaggaggctagcctcaaaggaacattggataaccttaaatcttatatggcacaaatggaccaggagcttgcccacacttgcatctccaaatccttcaccacccggaatcaggtcgagccagtttcacagacaaccgataacaattcagacgaggaagacagtgggaccggagaaagcgtgatggcaccagtggatgtggatttgaatctggtgtctaacatcctcgagtcgtactcctctcaagccggtctggcaggacccgctagtaacctgctgcagagcatgggcgtgcagctccctgataatactgatcaccggcccacttccaagccaacaaagaactag

SEQ ID NO: 16645 - DNA, 1821 bp, synthetic construct
  source 1..1821: mol_type = other DNA; note = Synthetic coding sequence
atggaagagtcgcccctttcacgggccccttcacgcgggggcgtgaactttttgaatgttgcgcggacatacattcccaacacgaaagtcgaatgccactatactttgccccctgggacaatgccctccgctagtgattggatcggaatattcaaagtggaggccgcttgtgtgagagactatcatacgttcgtctggtcgtccgtgcccgagtctacaacggacgggtctccaatccacacaagcgtgcagttccaggagccacgccctatggacgagctcgtcacactggaggaggctgatggaggaagcgacatattgctcgtggtgcccaaagccacagtgctgcagaaccagctagatgagtctcagcaagaacgcaatgatctcatgcagctaaaactgcagctcgagggacaggttacggagctcagatctcgcgtgcaggagctcgagcgcgctttggctaccgcaaggcaggaacataccgagctgatggaacaatataaagggattagcaggtctcatggggaaatcaccgaagagcgtgacatcctcagccgacagcaaggagatcacgttgcaaggattttagaactggaggatgatatccagaccattagtgaaaaagtcctcacgaaagaggtggagttggatcgtctgcgtgatacagtcaaagctctcacccgagagcaagaaaagctgctaggtcagcttaaagaggttcaggcggataaggagcaatctgaggccgaactggaaccactaaaagaacaacttaggggggctcaagagttggctgccagttcacaacagaaagccacactactgggcgaggagctggcaagcgcggccgcagccagagacagaaccatcgctgagttacatcggagcaggctcgaagtggcagaggtgaacggccgcttggcagagttggggctccatctgaaggaagagaaatgtcagtggtctaaggagagagcaggcctgctccagagcgtagaggcagagaaagataagatccttaagctgagcgcagaaattttaaggcttgaaaaggctgtgcaggaggagagaactcaaaatcaggtgttcaaaaccgagctggcccgtgagaaggattcctccctggtgcaactgtctgagtctaagcgggagttgactgaacttcgctccgcactgcgggtccttcaaaaagaaaaagaacagctccaagaagaaaagcaggaactccttgaatatatgcggaaactcgaagccagactggagaaggtcgcagacgagaaatggaatgaggacgctacaactgaggacgaggaggctgccgtgggcctaagttgtccagccgctttgacagatagcgaggacgagtctcccgaggacatgaggcttccaccatacggactgtgtgagcggggagacccagggagttcccccgccggtccacgggaggccagtcctctcgtcgtgatttctcagccagcccccatctcaccccatctgtctggcccagccgaagactcctcatcagactctgaggcggaggacgagaagagtgtcctcatggccgctgtgcaaagcggaggtgaggaggcgaatttgctgttgccagaactgggaagtgcgttctatgatatggcctctggtttcaccgtaggcaccctgagcgagactagtactggcggcccagcgacccccacctggaaggaatgtcccatttgtaaagagcgcttccctgccgagtcagataaggacgccctagaggatcacatggatggacactttttcttttctacccaggacccgtttactttcgagtag

SEQ ID NO: 16646 - DNA, 2997 bp, synthetic construct
  source 1..2997: mol_type = other DNA; note = Synthetic coding sequence
atgaacagaagaagaaaatttctattagcttccgtattggcactgcagaacagctcattcatatacccttcatgccaaaagtgcttctccaggataatcctggtctccaagagatctaactgtccgaagtgcggctcaactggggagtcgggaaacgccaactaccgatataagttgtctttaaaggtagcagagagtaataagctcttcgtgattacagttttcggtagctgtctggacacatttttcgggctaacagctaccgggctgcatcggtatatacaggaccccaacaaaataccagagaccttggataatgatacaacccagaatcttttgacaaaagccgtcgaaacttgctttgtgggacagtcgttcatctttggcgtaacgaattttgagaatcagcctggacagggctcagatgcaagtaactttctccagcagtgttctgatcataagcgcaaagccaaagcactggtagcatgccagattgtgttgcccgacccgggaattgccggatttaccgtgatcgattacttccaccagttgctccagactttcaatttcaggaaactacagtgtgactctcaggcaccaaacaaccaccttctcgccctcgatcattccaactccgatctatcctctatttatacttcggactctacaagtgatttcttcaaaagctgcagtaaagacacgtttagcaaattctggcaaccttcattggagtttacctgtattgtcagtcagctcacggacaatgacgatttttcagccagcgaacagtccaaggcattcggaacgctgcaacagaaccggaagtctatttctattgcagaagccaccggcagctctagctgtcacgaccccattcaggattcctggtccctcgtgtcctatatggacaagaagtctaccgccgaaaaattggggaaagaattgggcttacaggccaaagagctcagtgccgtgcacagctcccatcacgagataggggttaacgatagtaatctcttcagcctggagatgcgagagccgctggaatcgtctaacaccaagtccttccacagtgccgttgagatcaaaaaccgtagccagcacgaactcccttgtttccagcatcacgggatagacacaccaacctctctgcagaagagatcagcttgctgtcctccctctctgttgcgactggaagaaactgcaagctcctcccaggacggagacccccaaatttgggacgaccttccctttagcgaaagcttaaataaattcctggcagttctagagagcgaaatcgctgtgacccaggcggatgtgtctagtcgcaaacatcacgtggacaatgatatagacaagttccacgcagaccactctcgcctgtccgtgactccccaacggactacaggcgcactgcacaccccaccaatagcactccgctcttcccaggtcatcgtgaaggcgaattgttccaaggatgattttttgtttaattgtaaaggaaatctgagtccttccgtcgagaaagagagccaacccgacaacaaggtcgaagctgtgtcggtgaaccataacggacgcgatatgtctgaatactttctacctaacccatacttatcggcactttcttcctcttctaaggatctggaaactatcgtcacattgaaaaaaaccatccgaatttctccccaccgagagtcagaccactcttctcttaataacaaatacctgaatggttgcggagaaatttccgtgtccgagatgaatgagaaactgacaaccctatgttatcgcaaatataatgacgtgagcgacctctgcaaactggaaaataaacagtattgtaggtggtctaaaaaccaggatgatagcttcactatctgccgcaaactgacttatcccctggaaaccctgtgcaatagccctaataggtccacgaacacactaaaagaaatgccatgggggcatatcaataacaacgtgacccagtcatactcgatcggttacgagggttcttacgatgccagtgccgatttgttcgacgatattgctaaggaaatggatatcgcaaccgaaatcactaagaagagccaggacattcttctgaagtggggcacctccctcgcagagtctcatccatcagagtccgacttcagcctgagaagcctgtccgaggactttattcagccgtctcagaagctctctctgcaaagtctcagcgattccaggcactcaagaacatgcagtccaacaccccacttccagtcagacagcgagtacaacttcgagaatagccaggactttgtgccttgctcccagtctaccccaatttcaggctttcatcagacccggatccatggtatcaatagggcgtttaaaaaacctgtgttctacagtgatctcgacggtaactacgagaagatacgtatcttcccagagaatgataaacagcaggcttcccccagttgccccaagaatattaagactccgagccagaagatcaggagccctattgtgagcggcgtgagtcaacccgatgtgttcaatcactaccccttcgctgaatgccatgagacagatagcgatgaatgggttcccccaaccacccaaaaaattttcccatcagatatgctcggattccaggggatagggctgggcaagtgtctcgcagcttaccactttcccgaccagcaggagttgccccggaagaagcttaaacacatcaggcaggggaccaacaaaggacttattaagaaaaagctaaagaatatgctggcagcggttgtgaccaagaaaaagactcataaatataactgcaagtccagtgggtggatctccaaatgtccagatatccaggtgttagctgccccgcagctccaccctatactcggacccgactcgtgttctgaagtgaagtgctgtctaccattcagtgaaaaagggcctcccagcgtgtgcgagacaagatccgcctggtcccccgagctattttcctag

SEQ ID NO: 16647 - DNA, 471 bp, synthetic construct
  source 1..471: mol_type = other DNA; note = Synthetic coding sequence
atggccgactctccggggggctataaggagtgcggtacgaatgaaggcccacaggaggacgagaacggatcttcagcttccggatcatcgaaggtgcggcagctgtggtctgaagattcctgtgaatccggtaagttacctgccaccaggaccgtctactgcatgaacgaggctgagatagtagacgtggccctgggcatcctgatcgaatcccgaaaacaagaaaaggcgtgcgagcagcccgccctggctggcgccgacaatcctgagcattcacctccttgctccgtgtccccacatactagtagcggctctagctctgaggaagaagattctggaaagcaagccctcgcacctggactctctccaagccagaggcctggagggtcctcgagcgcctgttctcggtcccctgaagaagaagaagaggaagatgtgcttaaatacgtcagagagatttttttcagctag

SEQ ID NO: 16648 - DNA, 1377 bp, synthetic construct
  source 1..1377: mol_type = other DNA; note = Synthetic coding sequence
atggctgaactgcagatgctgctggaagaggaaatccctggcggccgcagagccctctttgattcctacacaaacctggagagggtggcagactactgtgagaataattatatacagagcgccgataaacagagggccctcgaggagacgaaggcctacactacccaaagtttagctagcgtggcgtacctaatcaatacgctcgcaaacaatgtcctgcagatgctggacattcaggcttctcagctcagaagaatggagtcctcaatcaaccacatatctcaaactgtggatatccataaggagaaggtcgcccgcagagagatcggtattcttacgacaaacaagaataccagtaggacccacaagatcattgcgcctgctaacttggagaggcccgtgagatacatcaggaagccaattgactatacgatactggacgacatcggacacggcgtgaaagtctccacccagaacatgaaaatgggcggcctcccacgcaccacgcctccgactcagaagcccccgtcacctcccatgagcggcaagggtacactgggctcatcaggatcatctggggggagtcatccgagtagcaggtcatcctcccgagagaactccggatccggctccgttggcgtcccaatcgccgtcccaaccccctcccccccgtcggtgttccctgcgcctgccggttctgcgggaacgccaccattacccgccacaagcgcctctgcaccagcgcccctcgttcccgccactgttccaagctccacagcccccgacgctgccgccggcggcgcccagacacttgctgatggctttacctcacccacacctccggtggtgagttccaccccacccacaggccaccctgttcaattctattctatgaatagaccagccagtcggcatacccctcctacgatcgggggatcgctgccttaccgccgtcccccctctattacgtcgcaaacctcactccagaaccagatgaatggagggcctttttattctcaaaacccggtttctgataccccgccaccccctccacccgtggaggagccagtgtttgacgagtctccccctccacctccccctcccgaggactacgaggaagaggaggctgctgtggtggagtactccgatccgtatgctgaggaagatcccccgtgggctccacggtcatatctcgaaaaagtggtggcgatttatgactatactaaggataaagaggatgagctgtctttccaagagggcgctattatttacgtgataaagaagaatgacgacggatggtacgagggcgttatgaacggcgtaacagggcttttccccggcaactatgttgaaagcattatgcattattccgagtag

SEQ ID NO: 16649 - DNA, 5223 bp, synthetic construct
  source 1..5223: mol_type = other DNA; note = Synthetic coding sequence
taaaaaatttatccagaggagattactcccttactgcccgccatctccggcgaaaaaatagctgaagaccaaacatgtttttttctccagatactgctgaagtatatggttatccaagcggcctccctcgaatggaagaataaggaaaaccaagacacagggtttaagttcctgtttacgctcttcaggaagtactacctgcctcacttatttccctcctttactaagctaactaacatatacaagccagtgctcgacataccgcatttgagacccaagcctgtatacatcaccaccactcgcgataacgaaaacatatattctactaagattccctatatggctgcccgggtggtctttatcaagtggatcgtaacctttttcctggaaaagaagtatttgactgccactcagaatactaagaacggggtagatgtgcttcctaaaatcatccagaccgtcgggggcggtgccgttcaggagcgcgcccccgagcttgacggcggaggccccaccgagcaggacaaatctcacagtaatagctctactctctctgatcgacggctctctaactcttcactgtgctccatcgaagaagaacaccgcatggtttacgagatggtccagcgaatacttttgtccacacggggctacgtcaactttgttaacgaggtctttcaccaggcgtttttgctgccaagttgtgagattgcagtgacgcgtaaggtagtccaggtttaccggaaatggattctccaggataagcccgtgttcatggaggagcctgatcgtaaagacgtggcgcaggaggacgccgagaagcttggcttttctgagactgacagtaaagaagctagttcagaatcctctgggcataagaggtcctcatcttgggggcggacatattcctttacctccgcgatgtcccggggatgcgtaaccgaggaggagaatactaacgtcaaggctggcgttcaggccctgctccaagtctttctgactaattctgctaacatatttctgctcgaaccatgcgccgaagtaccggttctcctcaaggagcaggtggacgcctgtaaagccgttctgatcattttcaggaggatgatcatggaacttaccatgaacaaaaagacttgggagcagatgctgcaaatcctcctcagaatcaccgaggccgtcatgcagaaacctaaggacaagcagataaaagacctgttcgcccaaagcttagccgggctcctttttagaactttgatggttgcttggattagggctaacttatgtgtttacattagtcgggagctgtgggatgatttcctgggcgtcctgtcgagtctgaccgagtgggaggaactgattaatgagtgggcaaatatcatggactccctgacggctgttctcgcacgcacagtatacggcgtggagatgactaacctccctctggataagcttagcgagcagaaggagaaaaagcagagaggaaagggatgtgtgttagatcctcaaaaagggacaactgtgggtagatcgttcagcctcagctggaggtcccatcccgatgtgacagaacctatgagattcaggagcgccaccacaagcggcgcaccaggcgtggagaaggcgcgaaacatagttcgtcagaaggcaacagaggtcgaggaatgtcagcaatcagaaaacgctccggcggcgggatcgggccatttaaccgtagggcagcagcagcaggttcttcggagttcttcaacttctgatattcctgagcccttgtgttccgattcctcacagggccagaaggcagagaatacacaaaacagcagtagcagcgaacctcagccgatccaagagaacaagggccacgtgaagcgagaacatgagggtattacaattctggttaggcgcagcagctcccctgctgaactcgacttgaaggatgacctacagcagactcagggcaagtgccgagaaaggcagaagtccgagtccactaactccgatacaacactcggctgtacaaatgaggcagaactaagcatggggccatggcagacttgcgaggaggacccggagctcaacacgccgaccgatgtagtagcagatgcagacgcccgccattggctgcaactttcgcccaccgatgcgagcaacctgacagacagctcggaatgcctgacagacgactgttcaattatagcgggaggcagcctgaccgggtggcacccagacagtgccgctgtgctttggcggagggtgctgggcattttaggggatgtgaacaacatccagtcccctaagattcatgccagagttttctgctacctgtatgaactgtggtataaactggcaaaaattcgggacaacctcgccatttccttggataatcagtcaagccccagtcccccagttctgattcccccactgcgcatgttcgcatcctggctctttaaagctgctacgctcccaaatgaatataaagaaggaaaactacaggcataccgtctgatctgcgctatgatgaccaggcggcaggatgtactccccaattcagacttcctggtgcatttttacctcgttatgcatctgggactgaccagtgaagaccaggacattctgaacactatcataagacattgcccaccacgtttcttctctctgggtttcccgggctttagcatgttggtcggcgacttcatcacagccgccgcccgcgtgctgtctacagatattttgaccgctccacgcagcgaagcggtaactgtgctaggttcactcgtgtgctttcccaacacttatcaggagatacctctccttcagagtgtgccagaggtcaatgaagccattactgggaccgaagacgtgaagcactacctgattaacatcctgctgaagaatgctactgaagagcccaacgagtacgcgcgctgtattgcagtttgtagcctgggcgtttggatatgtgaggagctagcacagtgtactagccatccccaggttaaagaagccattaatgtaatcggtgtgacattgaagtttccgaacaaaattgtggctcaggttgcctgcgatgtccttcagctgcttgtgtcctattgggagaagctccagatgttcgagacctctctaccccgtaaaatggccgaaatcctggtcgccacagtggctttccttctgcccagcgccgagtacagcagcgtcgagactgacaagaaattcatagtgtctctcctgctgtgcctgctggattggtgtatggccctgcccgtctccgttctattacaccccgtgtcaaccgcagtcctagaggagcagcactccgcgagggcccctctacttgactacatctatcgtgtgctgcactgttgtgtgtgcggttctagcacctatacacaacagtcccactacatcctgaccctggctgatctgtcctctacggattatgatccctttctacctctcgccaacgtgaagtccagtgaacccgttcagtatcacagttcagcagagctgggaaacctgctcacagtggaggaggaaaagaaaagacggtctcttgagctgatcccccttaccgcaagaatggtgatggcacatctagtgaatcacctgggtcattatcccctgagcggcggcccggcaatactccacagcttagtctccgagaaccatgataatgcacacgttgagggatctgagctgagcttcgaggtgtttcggtcacccaatttgcaactctttgtgttcaacgatagcacccttatcagctaccttcagacgcccaccgaaggacctgttggagggtccccagtcggaagcttatccgacgttcgggtcattgtgagagacatctcgggtaagtactcgtgggacggtaaggtgttatacggaccgttagagggttgcctcgcacctaacggccgcaaccccagtttcctgatctcctcctggcaccgggacacttttggccctcagaaggactccagccaggtagaggagggagacgacgttctggataagctgttggagaatatcggtcatacttcgccagagtgtttattaccatcgcagttgaatctgaacgaaccgtctcttacaccctgtggcatgaactacgatcaggaaaaggagataatcgaggttatcctgcgccagaacgcacaagaagatgaatatatccagagtcataacttcgacagcgcaatgaaggtcacgtctcaggggcagccctcccctgtcgagccacggggccctttttatttctgtagattgcttctagacgacctcgggatgaattcctgggatcgtagaaagaacttccatcttctgaagaaaaactctaagctgctgcgtgaactgaaaaatctggattccaggcagtgtcgcgagactcataagatcgctgttttttacatcgcggaaggacaagaggataaatgctccatcctgtctaatgaaagggggtcccaggcttacgaggatttcgtagcaggcctggggtgggaggtcgacttgagtacccactgtgggtttatgggtggactgcagcggaatggaagtactgggcagaccgcaccctattacgccacaagcacagtggaggtgatcttccatgtcagcactcgcatgccttctgactccgatgattccttgacgaaaaagcttcgccacctggggaacgacgaggtccatattgtatggagcgagcactcccgggactatagacggggtataattccaacagcatttggtgatgtttccattattatatatcctatgaaaaaccatatgttcttcatcgctatcaccaagaagcccgaggtgccctttttcggccctcttttcgatggcgctattgtatcgggtaaactcctcccttctctagtgtgtgcgacatgcatcaatgcatcacgagcagtgaagtgtctaattcctttataccagtctttctacgaggagcgtgcactctacctggaagcgatcatccagaatcatcgcgaagtgatgacattcgaagattttgccgcacaggtctttagtccctctccttcctatagcttgagtggaaccggcgctcttgctagctccctgtcagctgatttggaagagcccttatcagaagaggaaacggaacatccactcctacccctcccacgtgccacaaagcctcgtataagtagaaagtttcggtgctgcacttccgcgctgtctagatcgtcacactag

SEQ ID NO: 16650 - DNA, 1836 bp, synthetic construct
  source 1..1836: mol_type = other DNA; note = Synthetic coding sequence
atgccgcaccttgatatgaagacacatgtgtgtccgagtgtggaggggcccaaaaaaaaaggagggattacctgtttttgttgtggaggccccttcagggccgcagacagatccaagaccaggagccctaaactgagccacagccctcagcctccctccctgggggatcctgtggagcacttgtccgagacaagtgcagattccctggaagccatgtctgagggggatgctccaacacctttttctagaggctccagaacacgtgcctccctcccagtggtccgctctaccaaccagactaaggaaaggtctcttggagtgctctacctgcaatatggtgacgagacaaaacagctcaggatgccgaacgagatcacctccgccgatactattagagctctgttcgtgtctgcattcccgcaacagttgaccatgaagatgctggagagccccagtgtggcgatttacatcaaggacgagtctcgcaacgtgtactacgagctcaacgacgttcgaaacattcaggatcggagtctgttgaaagtgtacaataaagaccctgcacacgcctttaaccacaccccgaaaaccatgaatggtgacatgagaatgcaacgggagctcgtgtacgctcggggagatggccctggagcgccccggcctggatccaccgcccacccaccgcatgcgattcctaattcacctccctccaccccagtccctcactctatgcccccctccccctccagaattccatacggtggtactcgctctatggtggtccctggcaacgctaccattcctagggaccgtatctctagcctacccgtcagcagacctatcagccctagtcccagcgctatcctggagagaagagatgtaaaaccagatgaggacatgtctggcaaaaacatcgccatgtatcgcaatgaaggattctacgccgatccgtacctgtatcacgaggggcgaatgtctatcgcatcatcacacggcgggcatcctctggatgtgccggatcatataattgcataccacagaactgctattaggtcagcctccgcctattgcaacccatccatgcaggctgagatgcacatggagcagtcgctgtatcggcagaagtctcgcaaatatcctgactctcatctgccaacccttggtagcaagacccctcccgcatctccccaccgagtgtcagatctcaggatgatcgatatgcacgcccactataacgctcatgggcctcctcacactatgcagccagatagggcttctccttctaggcaagccttcaagaaggaacctggaaccctcgtttatatcgagaagccccgatctgctgcgggcctctctagccttgtagacctggggccaccattaatggagaagcaagtctttgcttattccactgcgacaattcccaaagaccgagagaccagtgagaagatgatgaagactactgctaatcggaaccacactgactcagcgggcaccccgcacgtcagtggagggaagatgctctcagctttggagtcaactgtgcccccatctcagcccccgcctgtgggaacgagtgctattcacatgagcctcctcgaaatgcgcagaagcgtggctgaactgcggttacagctccagcagatgcgtcaattgcagctgcagaatcaggagttgcttcgcgctatgatgaaaaaggcggagctggaaatcagtggaaaggtcatggaaaccatgaaacggctggaggatcccgtccaaaggcagcgcgttctagttgaacaagagcgacaaaaatacctccacgaggaggaaaagatcgttaaaaagctttag

SEQ ID NO: 16651 - DNA, 189 bp, synthetic construct
  source 1..189: mol_type = other DNA; note = Synthetic coding sequence
tgagagaatcctctggtctactgcgatggccatggctgctccgtggctgtccatcaggcttgttatggaatagtccaagtgcctaccgggccttggttttgccgaaagtgcgagtcccaagagcgcgcggcccgggtggttggccctatgtggttcgtcccatgcatcttccagagatataatttgtag

SEQ ID NO: 16652 - DNA, 1869 bp, synthetic construct
  source 1..1869: mol_type = other DNA; note = Synthetic coding sequence
atggccatggcaccatctccaagcttggtgcaggtttatacatccccagcagccgtggctgtgtgggagtggcaagatggactcgggacctggcacccttattcggccacagtatgttcttttatcgagcaacaatttgtgcagcaaaaggggcaacgcttcggcctggggtctctggcacacagcataccccttggtcaggcagaccctagcctggccccctacatcattgacctaccctcgtggacacagttcagacaagataccggaactatgcgcgccgtgcgcagacatctgttcccacagcatagcgcaccggggcgcggagtcgtctgggagtggctgtctgatgacggaagttggactgcatatgaagctagcgtctgcgactacctggagcagcaagtcgcgcgaggcaaccagttggttgacttggcccctcttggttacaactataccgtcaactatacaactcacactcagaccaataaaacatcatcgttctgcaggagtgtcagacggcaggccgggcctccctaccccgtgacgactatcattgctcctccagggcacaccggcgtggcctgttcttgccaccagtgcctctcaggctcgagaacaggacctgtaagcggaagatatagacactccatgactaatctgcccgcctatcccgtgccccagcatcctcctcataggactgccagtgtattcggaacacatcaggccttcgctccctataataagccttccctgtcaggagccaggtctgctccacggctcaacacaactaatgcttggggtgcagcacctccatctctgggtagccagcccctctacagatcctctctgtcccatttgggcccccagcacctgcctcctggatccagcactagtggggcggtgagcgcaagtctgcccagcggtccctcatctagtcccggctcagttcccgctaccgtgccaatgcaaatgccaaaaccaagccgggtgcagcaagccctcgcgggcatgacaagtgtgttaatgtctgcaattggcctgcccgtatgcctctctcgtgcccctcagccaactagccccccagccagccgcctcgcatcaaagagccacggaagcgtcaaacggctcaggaaaatgagcgtgaagggcgcaactccaaagcctgagccagagcccgagcaagttattaaaaattacaccgaggagcttaaggttccgcccgacgaggattgcatcatctgcatggagaagctgtccactgctagcggttacagtgatgtgaccgacagcaaggccattgggagcctcgccgtgggccatctgaccaagtgcagccacgcgttccatctgctctgtctactcgccatgtactgcaatggcaataaagacggctcccttcaatgcccctcgtgtaagaccatttatggcgaaaagacagggacccagccccagggcaagatggaagtacttagatttcagatgtcattacctggccatgaagattgtggtaccattttgattgtctatagtatccctcatgggattcagggccccgagcatcccaaccccgggaaacctttcacagcccgcggattccctcgccagtgctacttacctgataatgcccagggcaggaaggtgctggaactgctgaaagtggcatggaagcggagattgatcttcacagtcggcacatcctccacgactggagagacggatacagtggtgtggaacgagattcaccataagacagaaatggataggaatattaccggacatggctacccggaccctaactacctgcagaatgtgctggccgaactggcggctcagggcgtgaccgaagattgtctggagcagcagtag

SEQ ID NO: 16653 - DNA, 546 bp, synthetic construct
  source 1..546: mol_type = other DNA; note = Synthetic coding sequence
atgggcgggaggagtgcacaggcgggtcttggcacccggatcacccctatgatggaacttaaaccaaacgccggaagtgaccgggcatgggtgtggaatacacatgccgattttgccgatgagtgtcctaaacccgagctccttgcaatcaggttcttgaacgccgagaatgcacagaagtttaaaactaagttcgaggagtgtagaaaggagatcgaggaaagggagaaaaagggtgatgtggtcccttgggtcggagggctcctgtgcagattgactctgcacctcacaatcctgcccggaggatgttttttttgtctccccgacaagcacagccgggtcctttggccaccccacgtcagccgggttatgcaattgcctggcgacaccggagcaagttggggcgctttatctacttgccagtgttgttggcctcaaagcaattgggccgggatcggtgttagggctctgcctggggcacatcagaaagtgctttacgacggacccaggtttgttagccagcgggcttggtcacctctgccttag

SEQ ID NO: 16654 - DNA, 378 bp, synthetic construct
  source 1..378: mol_type = other DNA; note = Synthetic coding sequence
atgtccagctctggatacccacccaatcagggggccttcagtaccgagcaatccagataccccccccattcagtccaatatacctttcccaacactaggcatcagcaggagttcgcagtgcccgattatcgaagctcccacttggaagtgtcccaggccagtcaattattacagcaacaacagcagcagcagctcagacgccgtccaagtttgttatccgaattccacccagggtccgaccgacctcaggaacggaggacgtcctatgagccctttcacccgggccctagcccagtggatcacgactctctagagtccaagagaccccgcttggaacaggtttcagactcccacttccagcgcgtctccgccgcctag

SEQ ID NO: 16655 - DNA, 318 bp, synthetic construct
  source 1..318: mol_type = other DNA; note = Synthetic coding sequence
atgttaagatgtggacaaatgatatttgcgcaggcactggtttgcagacacctggggagggattggagatggactcagcgcaaaagacaaccagacagctatttttccgtgcttaacgcatttatcgaccggaaggacagttactactccatccaccagatcgcgcagatgggggtgggagaaggaaaatccattggccagtggtatggtccaaacactgtcgcccaggttctcaaaaagcttgctgtattcgacacatggtcttctctcgcagttcatatcgccatggacaataccgtggtgatggaggaaatctag

SEQ ID NO: 16656 - DNA, 1305 bp, synthetic construct
  source 1..1305: mol_type = other DNA; note = Synthetic coding sequence
atggacattgataaagatcttgaggccccactgtacctgacaccagaagggtggtcgttattcttacagcgttactaccaagtagtccacgagggcgccgaattacggcacctggacactcaggtgcaacgctgcgaagatatcctgcaacaactccaagccgtggttcctcagatcgacatggagggcgatagaaatatttggattgtcaagccaggcgcaaaatccaggggtagggggataatgtgcatggaccatcttgaagagatgctgaagctggtaaacgggaatccagttgtgatgaaagacggcaagtgggtggtccaaaagtatatcgaaagaccgttgctgatattcggaaccaagtttgacttgcggcagtggtttttagtgacagactggaatccattaaccgtgtggttctacagggattcctacattagattctccacgcagccttttagccttaagaatctcgacaacagcgtccatttgtgcaataatagcatccagaaacacctcgaaaattcctgtcaccggcaccccctgctgccaccagacaatatgtggagctcgcagcggttccaagcccaccttcaggagatgggcgcccctaatgcctggagcactataatcgtgccaggtatgaaagacgctgtcattcacgccctccagacaagccaggacaccgtccagtgccggaaggcaagcttcgaactgtatggtgcagatttcgtctttggtgaggacttccagccatggcttatcgaaatcaacgcaagtccaactatggcccccagcactgccgtgacggcccggctttgtgccggcgtgcaggctgacacattgagagttgttattgaccgcatgctcgaccgtaattgtgataccggtgcctttgaactgatctataaacagcccgctgtcgaagtgcctcaatatgttggcatcagattgttggtggagggattcaccataaagaagccgatggctatgtgccaccggagaatgggcgtgcgccctgctgtccctctcttgactcaaaggggcagtggtgaagccaggcatcattttccctctctgcatacaaaagcacagctgccatcaccgcatgtgctcagacatcagggtcaggtactcaggcggcaacacagcaagctggttggcactaaagctctgtctaccaccggcaaggcgctgcgcaccttacccacagccaaggtctttatctcattacctcccaatctggactttaaagtcgccccctctatcctcaaaccacgaaaggtgggcctggatctgtag

SEQ ID NO: 16657 - DNA, 576 bp, synthetic construct
  source 1..576: mol_type = other DNA; note = Synthetic coding sequence
atggccattggaaagaggctggcaacattacctacgaaggaacagaagacgcagagactgatcagtgagctctctcttttgaaccataagctgcccgctcgtgtgtggctgcctaccgccggctttgaccaccacgtcgttagggtgccccatacccaggcagtggtgctaaattccaaggacaaggctccatacctaatttacgtggaagtgcttgagtgcgagaacttcgatacaacctcagttcccgcccggatccccgagaacaggattcgcagtacccggagcgtggagaatctccccgagtgcggcatcacccacgaacagagggctggctcttttagcacggtccctaattatgataacgatgatgaagcctggtccgtcgatgatattggcgagctgcaggtagaactgcccgaagtgcacacgaactcttgcgacaacataagccaatttagcgtcgacagcataacatcccaggagagcaaggagcccgtatttatagccgcgggtgatatcaggcggcgcctgtctgaacaactggcccacacccctaccgcctttaaacggtag

SEQ ID NO: 16658 - DNA, 903 bp, synthetic construct
  source 1..903: mol_type = other DNA; note = Synthetic coding sequence
atggcaaaatggggtcagggaaacccacactggatcgtggaagagagagaggatgggacaaatgtaaataattggcgctggcgtaccgagcgggatgcgacatcattaagtaaagggaagttccaggagttactggtcggcatcgtggtggaaaatgatgcagggcgaggggagatcaatgagctcaagcaagtggagggtgaagcctcttgcagctcccggaaaggcaagctgatttttttctacgagtggaacatcaagctgggctggaagggtattgttaaggagagtggtgtaaaacacaaggggctgatcgagatccccaatctatccgaagagaacgaggtcgatgatacagaagtatccctgagcaaaaagaaaggagacggcgtgatcctgaaggaccttatgaagactgcggggactgcaaaggtgcgggaagctctgggcgattatctgaaggcgctgaagactgaatttactactggaatgatcctacccactaaggcgatggccacacaggagctgacagttaagcgcaagctctctggaaatacactgcaggttcaggctagttccccagtagcattaggggtgaggatccccacagtcgcccttcacatgatggagctgttcgatactaccgtcgagcagctgtactcgattttcaccgtgaaagagctgactaataaaaagataattatgaagtggcggtgtgggaactggcctgaagagcattatgcgatggttgcactgaattttgttccaaccttaggacagaccgaactccaattgaaggagttccttagtatttgcaaggaagaaaacatgaagttctgttggcaaaaacaacattttgaggaaattaaaggatccctccagctgacaccactaaacggttag

SEQ ID NO: 16659 - DNA, 1137 bp, synthetic construct
  source 1..1137: mol_type = other DNA; note = Synthetic coding sequence
atgaaggacgtccccggattccttcaacaaagccagaactctggcccgggccagccagccgtctggcataggcttgaagagttgtatacaaaaaacttcatgaagactctcagcgtaaaccttaacactggtaaatccctctccagcgtgtttcattttgaaaatgagtgtattgacgctcggaggtgtagtaaggccggcggattctattttagggtgaaccctttgtcgctcgtcgagattatcctgcatgtcgtcagacagatgactgaccctaacgtagccttgacatttctcgaaaaaaccagagagaaagtgaaaagctctgacgaggctgtgatcctgtgcaagacagccatcggcgctttgaagttaaacatcggcgatctgcaggtcacaaaagaaacaatagaggatgtggaagaaatgcttaataatctgcccggggttacaagcgttcattcccgattctacgatctctcctccaagtactaccagaccatcgggaaccatgcgtcatattacaaggacgctctgaggttcctgggttgtgtcgacatcaaggacctgcccgtgagcgagcaacaggagagggcgttcacattaggactggccggcctgttgggagagggcgtttttaactttggagaactgcttatgcaccctgtcttggagtctctgaggaataccgacaggcaatggctgattgacacattgtatgcattcaactcaggcaacgtcgagcgttttcagaccttaaagacagcatgggggcagcagcccgatctggctgctaatgaggctcagctccttcggaagattcagcttctctgtctgatggagatgacttttactaggccagccaaccatagacaactcaccttcgaggagatcgccaagtccgccaagatcacggtgaatgaagtcgaactactggtgatgaaggctctttcagtcggcttagtgaaaggctccattgacgaggtcgataagcgcgtccatatgacgtgggtgcaacctcgggtcctggaccttcaacagattaagggaatgaaagatagattagaattctggtgcacggacgtaaagagtatggaaatgctcgtggaacaccaggcccatgatatacttacctag

SEQ ID NO: 16660 - DNA, 603 bp, synthetic construct
  source 1..603: mol_type = other DNA; note = Synthetic coding sequence
atgctcttggaacagaatctgatcacagtggacatgcaaaagcatagtctcaccttttggtggttagtggagtgctggccccaggtgtttaacaagctaatccgccgatataagtatctcgaaaagggctttgaagacgaagtcaagaagttgctgctgttcttgaaaggcttttcagagtccgagaggaacaaactggctatgctgaccggtgtgttgctcgcaaacggcaccctgaacgcgtctatcctaaactccctgtataatgagaacctcgtcaaggagggcgtgtctgcagctttcgcagttaagctgttcaagtcctggataaacgagaaagatattaatgcagtggcggcctccctgcgaaaggtttccatggataatcgactgatggagttgtttcccgctaacaaacaaagcgttgagcatttcactaagtacttcaccgaggccggcctgaaagagctcagcgagtatgtacggaaccagcagacaatcggagcaagaaaggaacttcagaaagaacttcaggagcagatgagtcgaggtgacccatttaaagacatcatcctgtatgtaaaagaggagatgaaaaagtag

SEQ ID NO: 16661 - DNA, 1446 bp, synthetic construct
  source 1..1446: mol_type = other DNA; note = Synthetic coding sequence
atggccagtgctgcatcagtgaccagtctggctgatgaggtcaattgtcccatctgccaaggtaccctgagggaacctgtcactatcgattgtgggcacaatttttgcagagcctgccttacgcggtactgtgagattcctgggccggacctggaagagagccccacctgccccctgtgcaaggaaccttttagacctggctcattcagacccaactggcagctcgccaatgtggtggagaacatcgagaggctacaactcgtatcaaccctggggttgggagaagaggatgtatgtcaggagcacggagagaagatctatttcttttgcgaagatgacgagatgcagctttgcgtggtgtgtagagaggcaggggagcacgcaactcatacgatgagatttctggaagatgctgccgccccatatcgggaacagatccacaaatgcttgaagtgcttacggaaagagagagaggagatccaagaaatccaatcccgagaaaacaagcgaatgcaggtactgctcacgcaggtttctacaaagcggcagcaggtcattagcgaattcgcacacctgagaaaatttttggaggagcagcaatccatacttctggcccaattagagtctcaggacggggatatccttcgacagcgggatgaatttgacctcctggtggccggtgagatctgtcgttttagtgctttgattgaggaactcgaggaaaaaaatgaaaggccagctcgagaactcctgacagacatcagatctacactcattcggtgtgaaacccgaaagtgccggaaaccggttgccgtcagccccgagctcgggcagagaatacgggatttccctcagcaagcactgccattgcagagagaaatgaaaatgtttctggagaagctttgtttcgagctcgactatgagccagctcacatatcgctcgaccctcaaaccagccaccccaaactgctgctgagtgaagatcaccagcgcgcccagttctcctataaatggcagaactcgcctgataaccctcagaggttcgaccgcgccacctgcgtactcgctcacaccggtattacaggcggcaggcacacctgggtggtctcgatcgacctggcacacggaggatcctgtaccgttggagttgtgagcgaagacgtgcaacggaaaggggagctcagactgagacccgaggagggagtttgggcggtacggctagcatgggggttcgtgagtgctttgggcagcttccccacaaggctgactctcaaagagcagccgcgccaggtgagagtatctctggactatgaggtcggctgggtgacgtttacgaacgcggttaccagagagccaatttacacattcaccgcaagttttacccgcaaagtcatcccgttttttgggctgtggggacgtggcagttctttttccttgagttcttag

SEQ ID NO: 16662 - DNA, 261 bp, synthetic construct
  source 1..261: mol_type = other DNA; note = Synthetic coding sequence
atgggaaaaatggtaagtgtgattaacactgtagataccagccatgaggatatgatccacgatgcccaaatggactactatggcacccgtcttgccacatgttcctccgacagaagtgtaaagatcttcgatgttcgcaacggcggtcaaattctgatcgctgacctgcgagggcatgagggcccagtctggcaggtggcttgggcccaccccatgtacggtaacatcttggccagctgcagctatgaccgtaaagtatag

SEQ ID NO: 16663 - DNA, 660 bp, synthetic construct
  source 1..660: mol_type = other DNA; note = Synthetic coding sequence
atggaaccgagcgcacagcagctccagttagctgcatctctacctgccaatctctcaaatttttgtcagggttctgaaatgcccacaacaagccgaccggcattggatgtgaagggggggactagtcccgcgaaagaggacgctaaccaggagatgtcaagcgtagcttattcaaatctcgctgtaaaagacagaaaggctgtggcaatactgcattaccccggggtggcgtccaacgggaccaaggccagcggtgcacccacttctagcagcgggtcaccaattggctcaccaacaacaacaccgccaactaaaccaccttcatttaacctgcacccagcccctcaccttcttgctagcatgcacctgcagaagctgaatagtcaataccagggcatggctgccgccacacccggacagcctggtgaggcgggacccctccagaattgggattttggtgcacaggctggaggcgccgagtccttgtcaccttctgccggagcacagagccctgcaattattgacagcgaccctgtggatgaagaggttttaatgtccctggtggtggagctgggcctggaccgcgccaatgagctcccagagctgtggttaggccagaatgagtttgatttcaccgctgattttccctcctcttgctag

SEQ ID NO: 16664 - DNA, 396 bp, synthetic construct
  source 1..396: mol_type = other DNA; note = Synthetic coding sequence
atgttatgctggggctactggagcctgggtcagccaggaatttctaccaacctgcagggaatcgttgccgaaccccaggtgtgcggctttatctctgaccgaagcgttaaggaagtggcctgcggaggcaatcacagcgtatttctcctggaggacggcgaggtttacacgtgcggcttgaacactaaggggcagctgggccatgagagggaagggaacaaacctgagcagattggagctctggctgatcagcacatcatccacgtggcctgcggcgagtcccacagtctggctctcagtgatcgagggcagctatttagttggggggccggaagtgatggacagcttggtctgatgacaaccgaggactccgtcgctgtcccgcgactgatttag

SEQ ID NO: 16665 - DNA, 3099 bp, synthetic construct
  source 1..3099: mol_type = other DNA; note = Synthetic coding sequence
atggaaggggctctgacagctagggacaaagtcggtgtgcaggacttcgtgcttttagatgcatacacctcagaatctgccttcgtcgacaacctgcggaaaagattttctgaaaatctgatctatacttatattggcaccttattagtgtccgttaatccctatcaggaactgggcatttataccgtgtcacagatggaactctaccagggcgtaaactttttcgaactacctccacacgtgtatgcaatcgctgataacgcctacagaatgatgtgcgctgagcttaacaaccactttatccttatcagcggcgaaagtggcgccgggaaaaccgaagcaagcaaaaagatactggaatacttcgcagtaacttgtccaatgacacagtcattgcagatcgccagggatcgtttgctcttttctaacccagtccttgaggcttttgggaacgctagaacactcaggaacgacaacagtagcagattcgggaaatacatggacattcaattcgatttccagggcattccagtggggggacacataatatcctacttgattgaaaaatctcgcgtggtgtaccagaatgagggcgagcggaattttcacattttttatcagctgctggccggaggcgaagaagaaagactgtcttatttgggcctcgagagggacccgcagctgtataaatatttgagtcagggccattgcgcaaaagagagtagcatctccgataaaaatgattggaagacagtgtcaaatgccttttcggtcattgactttacggaggcagacttggagaatctttttggaatcatcgccagtgtgttgcatttagggaatattggcttcgaagaggatgaccaagggtgcgccactattcccgatacgcatgaaatcaagtggattgctaagcttttgggcgtgcacccctctgtattgctagaggcgctcactcacaggaagatagaagcgaaaacagaagaggtcatctgtcctctcaccctggaactgtccgtgtatgcccgcgatgcaatggccaaagcagtgtacggccgcacattcacttggctggttaataagataaacagcagcttggtaaacaaggtggggcagcggatcttggacccactgttgctcctaacttggaaaacagtgatcgggttgcttgacatttacggctttgaggtctttgacaagaatggattcgagcagttctgtattaactactgcaatgaaaaactacagcaactgctgattgaacgtaccctcaaggccgagcaggccgagtatgagatggagggcatcgaatgggaaccaatcaagtacttcaataacaaaatcatctgcgacctcgttgaagagaggcacaagggaatcatatcgatcctggacgaggagtgcatcaggcctggcccagcaacagacctctccttcctggagaaactcgaggagaaggtcgggaagcacgctcattttgaaacccgaaaactagcagggcctaaagggagaaaaaggattggatggatggaattcagattactgcattatgccggggaggtaacctactgcactaaaggcttcctggagaagaataatgatttgctgtacaggcaccttaaagaagtcctgtgtaagagcaaaaacatcattctccgggaatgcttcctgctggctgaactggagaacagacgacgcccgccaactgtggggacacagttcaagaacagtctgagttcacttttagaaactctgattagtaaggagccgtcttatatccgctgcatcaagcccaacgaccgtaaggagcccagcaagttcgatgattttctcatccggcatcaaataaaatacctggggctcatggaacatttgagagtccgtagagccggtttcgcctaccgccgcaaatacgaacacttcttacagcggtataagagtctgtgtcctgatacttggccccattggcatggtcctccagctgaaggcgtggagcggttgattaagtatatcggttacaaacctgaagaatataaactgggaaaaaccaagatctttatccggttccccagaacgttgtttgctaccgaagatgcgtttgagttctctaaacaccagcttgtcgctcgcatacaggctacatataagagatgtctcggcagacgcgagtatgtcaaaaaaagacaggctgccatcaaacttgaggctcattggagaggcgccctggctcgcaaggcgatacagagacgaaagtgggccgttagaatcataaggaaattcataaaagggtttatatccaggaacaagccgctctgtccagacaatgaagaattcattgtgtttgtccgaaagaactacatacttaatctgaggtatcaccttcctaagaccgtgctggacaagtcttggctgcgacctcctggcattctcgagaatgcatctgatcttttgcgaaagatgtgcgtacgcaatctggtgcagaaatattgtcgcggcatcaccgcagagcgtaaggctatgatgcaacaaaaggtagtcacttcagagatctttagggggaggaaggatgggtatactgagtctctgaaccagccgtttgttaacagccgaattgacgagggggatatcaacccgaaagtgctccagctaattagccacgaaaagatccaatatggcgttccggtgattaagtacgatagaaagggcttcaaagcccgccaacggcagttgattcttacacagaaggccgcatatgtggtggaactggccaaaataaaacaaaaaatagagtacagcgctctgaagggggtctcaacctctaatctgtctgatgggattctcgtaatccatgtgagccctgaagactccaagcagaaaggcgatgctgtgctccagtgcggccacgtgttcgaggccgtcacaaagttggtgatgctcgtaaaaaaggaaaacatcgtcaacgttgtgcagggatcgctccagtttttcataagtcccggcaaggagggtacgatcgtgtttgataccgggctggaggaacaggtgtataagaataaaaatgggcagctgaccgtggtctccgtgcggaggaagagttag

SEQ ID NO: 16666 - DNA, 1176 bp, synthetic construct
  source 1..1176: mol_type = other DNA; note = Synthetic coding sequence
atgtgtagccagctatggttcctaactgaccggcgcattcgtgaagactacccccaagtacagatcttacgtgcactgaggcaaaggtgtagtgagcaggacgtgagattccgggctgtcctcatggaccagatcgccgtaactatcgtcggggggcatctcgggttacaacttaaccaaaaagcgcttactacattccctgacgtagtcctggtgcgagtgcctaccccttctgtgcagtcagacagtgacataaccgtgctgcgccatctagagaagttaggttgtagacttgtcaatcgacctcagtcgatccttaattgtatcaataaattctggactttccaggagctagctgggcacggggtgcccatgcccgacactttctcctacgggggacatgaggacttctccaaaatgatagatgaggcagagccactcggttatcctgtagtggtcaagagcacacgtgggcaccgaggtaaagcagtatttcttgccagagacaagcaccacctcagcgatatctgtcacctgatccgacatgatgtgccatacttatttcagaagtacgttaaggaatcccacggcaaggatataagggtcgtggtagtgggaggacaggtgattggatccatgctccggtgctcaaccgacggcagaatgcagagcaattgcagccttgggggcgtcggcgtcaagtgcccccttaccgagcaagggaagcagctcgcaatccaggtgtcgaacatcctggggatggacttctgcggaattgacttattaattatggatgatgggtccttcgtggtgtgcgaggccaacgcaaatgttggattcctcgccttcgatcaagcatgcaacttggacgtcggcggtatcatcgccgattacacaatgagcctgttgccaaatcggcaaaccggcaaaatggcagtgctccccggtttgtccagtccacgcgagaaaaatgagcctgacgggtgcgcatctgcgcagggggtcgccgagtcggtgtatacaatcaattcaggatcgacttcttcagagtctgaaccagagctgggcgagatacgcgacagcagcgcaagcacgatgggcgcacctcccagcatgctgcctgagcctggctacaacatcaataacagaatcgcatcagaacttaagctgaagtag

SEQ ID NO: 16667 - DNA, 1065 bp, synthetic construct
  source 1..1065: mol_type = other DNA; note = Synthetic coding sequence
atggacatggatcacattatgacgtgggcgaccgatgtggctaaagggatgcattatctgcacatggaggccccagtgaaagtgattcacagggacctgaaatcacgcaatgtggttatagctgccgatggcgttctgaagatttgtgacttcggcgcatcccggttccacaaccacacaactcatatgagcttggttggcacgtttccctggatggcccccgaagttattcagagcctgcctgtctctgaaacttgtgacacgtattcttacggcgtggtactatgggagatgctcacccgcgaggtgcccttcaagggtctcgaaggactccaggtggcatggcttgttgtggagaaaaacgaacgcttgactatccccagctcatgcccccggagcttcgctgagctgctgcatcagtgctgggaggccgacgccaagaagcgtcctagtttcaagcaaatcatctccattttggagtctatgagtaacgacacctccctccctgataagtgcaatagctttctccacaacaaggctgagtggaggtgcgaaatcgaggctacgctggaacgcttaaagaagttggagcgtgacttgagtttcaaagagcaagagttgaaagagcgggaacggcgcctgaagatgtgggaacaaaagctcacagagcagtcaaatacaccccttctgctgccactagccgcgcgtatgagtgaagaatcatacttcgagtctaaaaccgaagaatccaatagcgctgagatgtcttgccagatcacggccacaagtaacggggaaggccacgggatgaacccatcactgcaggccatgatgttgatgggatttggcgatatattttctatgaataaggcaggagcggtcatgcactccggcatgcaaatcaacatgcaggccaaacagaattcctctaaaaccacttcaaaacggcgcgggaagaaggtgaatatggcattgggattcagtgactttgacctgtcggagggagatgacgatgatgacgacgacggcgaagaggaggataacgacatggacaactcagagtag

SEQ ID NO: 16668 - DNA, 1707 bp, synthetic construct
  source 1..1707: mol_type = other DNA; note = Synthetic coding sequence
atgttggagaggccccccgccttagccatgccaatgccaacagagggtacaccacccccgttatctggaacacctatcccagtccccgcatatttcagacacgccgagcctggatttagtctcaaacgaccacgcggattgagtaggtcacttcccccaccacctccagccaaaggctcaatccccatttctaggcttttcccgccacgcacacccgggtggcaccaattgcagccgcgacgcgtgtcctttaggggggaggcatctgagacacttcagagcccaggttatgatccctctcgcccagaatcgttcttccagcagtccttccagcgactttcccggctgggccatggcagttacggcgaggtatttaaagtgcgtagcaaagaagatggtaggttgtatgcagtcaaacgctcaatgtcacccttccggggtcccaaagacagagccaggaagttggccgaggtgggatctcacgagaaagtggggcagcacccctgttgtgtccgcttagaacaggcgtgggaagagggaggaatcctgtatctccagacagaactgtgtggcccttctctccagcagcattgcgaggcatggggggcatcactccccgaagcccaggtctggggttacctcagagacactctgctggcgctggcccacctacactcacagggccttgtgcacctggatgtaaagcccgccaacatattccttgggcctaggggtaggtgcaagctgggagatttcggtcttctggtcgagcttggcactgccggcgcgggcgaggtgcaggagggcgaccctaggtacatggcacccgagctgctccagggctcttacggaacagcagctgatgtgtttagcctgggactgacaatccttgaggtggcctgcaacatggagcttccccacggtggcgaaggatggcaacagttgaggcaaggctatcttccgccggagttcacagcgggactgtcatccgaactccgaagcgtactggtgatgatgctggaacccgaccccaaattgagagccacggcagaagctcttcttgccctcccagtattgcggcagccacgagcctggggcgtactgtggtgcatggcagctgaggcacttagccggggatgggctttatggcaggcgttactggccctgctatgctggctgtggcacggcttggcgcaccctgcgtcatggctgcagcccctggggccacctgcaacgccacctggaagccctccttgtagtctgctgttggatagctcactctcttccaactgggacgatgactcgctgggacctagtctgagtcctgaggcagtgcttgctcgcaccgttggaagcacctccacccctcgctcccggtgcaccccccgggtccttaccccactcaggttgtccccggccgctgagcccagcgctccaggactgggccccgcagctgaggccccctgttgcgttgagcagcgtggattcctgtctaggcacatacctcgaagcttcagcgctttccaggctgcaccccccaagagtgcgtgcaatgccctccatctccacggccacactcagccatccgcctttgtgtggtccctgacttgcagctcacatcacggccggacattcgaagctaggaccaaagtggatcctctttttaaaatttgtggtggctttctgactgttttcgctgatctgtag

SEQ ID NO: 16669 - DNA, 642 bp, synthetic construct
  source 1..642: mol_type = other DNA; note = Synthetic coding sequence
atggcagagaccgaggagaggtcactcgacaatttcttcgcaaagcgggataaaaaaaagaaaaaggagaggagcaatcgcgccgctagtgccgcaggcgcggctggctccgctggcgggagctctggagcggccggggccgctggaggaggcgctggcgccggaactcggcccggagacggcggcaccgccagcgcgggcgcggcaggtccaggcgcggccactaaagccgtgacaaaagatgaagatgaatggaaggaactggagcagaaggaggtggactacagtggcttgcgtgtgcaggcaatgcagatcagttccgagaaagaggaagatgacaatgagaaaagacaggatccgggcgataactgggaggagggtgggggcggaggcggtggcatggagaagtctagtggaccatggaataagacagcaccagtgcaagctccacctgctcctgttatcgtgaccgaaacgcccgaacctgccatgactagcggggtctaccgcccacccggcgcccggctgaccacaactcggaagactccccaaggcccccctgaaatctattctgacactcagtttccctccctgcagagcacggctaaacatgtggagtcccgcaatcgctacctgaaatag

SEQ ID NO: 16670 - DNA, 4140 bp, synthetic construct
  source 1..4140: mol_type = other DNA; note = Synthetic coding sequence
atggcttcctctcctacaaaagggcttaccatgtctgtaccggttgcccctaagaaatcctgttacacacagctcagagataaccgcaatgcagcccgaaataacaatgaatctatcctcagtttgggagacaccaacgccaaccagattatgctggaagtatcatcctcacatgacgagtctaaaacgtgcgatcttggcgacgagatcggtaacaccaatagtagcgagcccgaaaacagaacacacttccacaaggagtttcaccaactgcagggtttcggcaagggctctcaggctggttctgcttcccttaaggattttagactttctagcaccatccagcgggagcttaacgaggaacatacagtcgagcgcggcactgatagcctgcagaccacaaggtcaattcagggaccgagcctctcttcctggaggaatgtgatgtcggaggcttctcttgatgtgttggccaagagggatgcagagatccccaggcatgtccccaaggacaagctcgccaagacgctggataatgaggagttgaggcggcactctctagaacgggcctcctcgagtgttgctgcagttggaagtctgacgccgcaacatccacaaccactttcgctcgactctcgcgaagccagaggccaaatccccggaggaggagaagggccgcaaaagactctgccagatcatgccgtccccgccgcattccctgccaccgactccaccagcgaaggaaagtcagtccgccacccgaagcccagtacaagcgagagtaaacaatcgaccccatcagagacacagacagtcggcgcccacgtcttgcaggtttgttctgagcacacctcccactcagctcaccctgaacccgccctgaatctgacactggcttctaaagagattccttccaagctggaggcccagcttggccaagggaaaggcgaggcaaagttagaccttaagtacgtgccccctagacgcgtggagcaggaaggaaaagctgcccaggagggctacttgggctgtcacaaggaggaaaatcttagtgcactcgaaggcagggacccttgcggtgaggcacatccagaggccaccgatgctcttgggcacctgctcaattccgacttacaccacctaggcgttggacggggaaattgcgaagagaaaagaggcgtgaatcccggagaacaggattcattacacaccacccctaagcagggatcagccagccttggaggcgccgataatcagccaaccggcaaaattagcccatgtgccggtgagaagctgggcgagcggacatctagctccttctcacctggagatagccacgtggcattcataccaaacaacttaaccgattcaaagcccctggacgtgatcgaagaggaacggaggcttgggtccgggaacaaggactccgtgatggttcttgtgttcaatccttccgtgggcgagaataaaaccgaagtcccagagcccctcgacccccaatccggccggtccgaggcccgagagagtaaggaagtgaccacttcagtggccgaaaatagaaacttactggaaaatgcagataagattgagagtaccagcgcccgcgcagatagtgtcctcaatataccagccccgctccaccccgagacaacagttaatatgacttaccagcccaccacacccagctcaagcttccaagatgtcagtgtctttgggatggacgcaggaagtccgctagttgtccctcctccgacagattccgcgcgtctgcttaacacgagcccaaaggtcccagacaagaacacctgccccagtggtattccaaagcccgttttcacgcactcgaaagataccccctcttctcaggaaggcatggaaaactaccaggtcgagaagaccgaggagcgtacggaaacgaagcccatcattatgcccaagcccaagcacgtccggcctaagatcatcacctacattagaaggaacccacaggctctcggccaggttgacgcctccctcgtcccagtcggtctaccatatgcacctccaacatgcactatgccgctaccccacgaggagaaggccgcaggtggcgaccttaagccctccgcaaatctttatgagaagttcaagcctgatctccagaagcccagggtcttttcaagcggcctcatggtcagcggtattaaaccacccgggcatcccttttcccagatgtccgagaaatttctgcaggaggtaacagatcaccctgggaaagaagagttctgctctccgccctacgcccattacgaggtacctcccaccttttaccgttcagcaatgctcctgaagccgcagctcggcttaggagctatgtctcggctgccgtccgccaagtctcgtattctgatagcctcacaaagatccagcgctagtgccatccaccctccaggtcccatcacaaccgccaccagcctgtattcgagtgacccgagcgcagatttgaaaaaggcctcatctagcaacgcagcaaagagcaatttgcccaaatcaggcctccggccgccgggttattcacggcttccggcggccaaactggctgcgttcggcttcgtcaggtccagtagtgtgtcaagtgtaagctccacacagagcggcgactcggcacagccagagcagggccgccccgccacgcggtctacgttcggaaatgaggaacagccagtcctgaaggcttcactgccttccaaagacactccgaaaggagctggacgggtcgcaccccctgccagttccagtgtgactgctccacgccgctctctcctgccagcacctaaatcgacaagcaccccagccgggactaagaaagatgcacagaaggaccaggacacaaacaaacctgctgtgagctcccccaagcgggtggcggccagcaccaccaagctacacagccccggataccctaaacagcggactgccgcagcacggaatgggtttccaccgaagccagatccacaagctagggaagcggaaaggcaactggtgttgcgacttaaggagagatgtgagcagcaaactcgccagctcggggtggcacagggggagctgaaacgagctatctgcgggttcgatgctctggcggtcgctacccagcactttttccggaagaacgaatccgccctggtgaaggaaaaagaactgagcattgaactcgccaacattcgggatgaggtcgcttttcacacagctaaatgtgaaaagcttcagaaggagaaagaggaactggaaagaagattcgaggacgaggtgaagcggctgggatggcagcagcaagcggagttgcaggaacttgaggagaggctgcagctgcaattcgaagctgagatggcccgcctgcaggaggagcacggagaccagctgctttcaattagatgccaacaccaagagcaggtcgaagacctgaccgcttcacacgacgccgccctcctagagatggagaacaaccatactgtcgctattacaattctgcaggatgaccacgaccacaaggtccaggaactaatgtccacccatgagcttgaaaagaaggaactggaggaaaactttgagaagctaagactttctctgcaggaccaggtggataccctgacctttcagagtcagtcactgcgggatcgcgcccgacggtttgaagaggccctcagaaagaacacggaggagcagttggaaattgcgttagccccttaccagcacttggaggaggatatgaagagcctcaaacaggttcttgagatgaaaaatcagcagattcatgagcaggagaaaaagattctagaactcgagaagctggctgagaagaatattatcctcgaagagaaaattcaggtgctacagcagcaaaatgaggacctgaaggctcgcatagatcagaacactgtggtaacaagacaactgagcgaagaaaacgcaaatttacaagagtatgtagagaaggagacccaagaaaaaaaaaggctgtctcgcacaaatgaggaattgctttggaagcttcagactggcgaccctacgtcgcccattaagctgtcgcctacaagccccgtgtaccgtggcagctctagtggaccttcttcccccgcacgggtgtccaccacaccccgatag

SEQ ID NO: 16671 - DNA, 1041 bp, synthetic construct
  source 1..1041: mol_type = other DNA; note = Synthetic coding sequence
atgcagcatctgaagtccaagaagcgtgaagagaggtggatgcgcgcctctaagcgtcaaagcgaaaaggagatggaagagctgcaccataatattgacgacctactgcaggagaaaaagagcctcgagtgcgaagtagaagagttgcaccgcacagtccaaaagagacagcaacagaaagacttcattgacggtaatgtggaatccctcatgaccgagttggagatcgagaagtcattaaagcaccatgaggacattgtggatgaaattgagtgtattgagaaaaccctactgaagcggcgaagcgaattgcgcgaagcggatagactgctggcagaagcagagtctgagttgtcttgcaccaaggagaaaacaaaaaatgccgtcgaaaaatttacagacgccaagaggtctctattgcaaactgaatctgacgccgaggaacttgagcgtcgggcccaggagacagccgtgaacctcgtgaaggccgaccagcaactgaggagtcttcaggccgacgccaaggacctagaacagcacaagattaagcaggaagagatcctcaaggagattaataaaatcgtggccgcaaaagatagcgatttccagtgcctcagcaagaagaaagagaagcttaccgaagagctgcagaaactgcagaaggatattgaaatggctgagagaaacgaagaccatcatctccaggtactcaaggaatctgaagtgttgttgcaggccaaacgggccgaactggagaaattgaagagtcaggtgacttcgcagcagcaggaaatggcggtattagatcgccagctcgggcacaagaaagaagaacttcatctgctacaggggtcaatggttcaggctaaagccgatcttcaggaggcactgcggttgggcgaaactgaagtcaccgaaaaatgtaaccatattagggaagttaagtctcttctggaggagctgtcatttcagaagggggaattgaacgtgcagattagtgagcgcaagacacagctgacccttataaagcaggagatatag

SEQ ID NO: 16672 - DNA, 369 bp, synthetic construct
  source 1..369: mol_type = other DNA; note = Synthetic coding sequence
atggccacaagcgcacctctgcggtcccttgaggaggaggtgacatgctccatttgcctggactatcttcgagacccagtgacaattgactgcgggcatgtcttttgccggtcttgtaccacggacgttcggccgatctccggatcccgccctgtgtgccccctgtgtaaaaagccatttaagaaagagaacattagacccgtgtggcagttggcatccctggttgagaacattgaacgactgaaggtggacaagggcagacaacccggggaagttacgagagaacaacaggacgccaagctgtgcgagcgccatagagagaagctgcattattattgcgaggatgacggaaagttactctgcgtttag

SEQ ID NO: 16673 - DNA, 291 bp, synthetic construct
  source 1..291: mol_type = other DNA; note = Synthetic coding sequence
atgagtatctccagtgacgaggttaatttcctggtctataggtacctgcaggaaagtggcttttctcacagcgcgttcacatttggcatcgagtctcacatctcgcagtctaatattaacggcgctttggtccctcctgccgctcttatatctatcatacaaaagggcctgcagtacgtggaggccgaggtgagtattaatgaagatggaactcttttcgacggacggcccattgaatccctctctcttatcgacgccgtgatgcctgacgtagttcagactcggcagtag

SEQ ID NO: 16674 - DNA, 2913 bp, synthetic construct
  source 1..2913: mol_type = other DNA; note = Synthetic coding sequence
atgctccagcaagtaaatggacacaatcctggatctgacgggcaggcccgggagtatctgcgcgaggatctgcaagagttccttgggggcgaagtactgctgtacaaactggacgacttaacccgcgtgaaccccgtgactctggaaactgtgttgcgatgcctccaggctcgctatatggctgacaccttctacacaaatgcaggttgtaccctcgttgccctgaacccttttaaaccggtcccccagctgtactcgcctgagctaatgcgcgagtaccatgctgcccctcagccgcagaagctgaaaccccacgtgttcaccgtgggcgagcagacttataggaacgtcaagtcacttatcgagccagtgaaccaatcaattgtcgtgtccggcgaatctggtgcaggaaagacctggacctctcgctgtctcatgaagttttacgcagtggtggctacctcccctgcatcctgggaatcccacaaaattgctgaaagaatcgaacagcgcatcctgaacagcaaccctgtgatggaggcttttggtaatgcctgcacactccggaacaacaacagctccaggtttggcaaattcatacagctccagctcaaccgcgcccagcagatgacaggggccgctgtgcagacttacctacttgagaaaacacgggtggcttgccaggcatcatctgagcgaaattttcatatcttttaccaaatctgtaaaggggcttccgaggatgagcggttacaatggcacttacctgagggtgctgcattttcctggctgcctaacccagaacggagcctcgaagaggattgtttcgaggtaaccagagaggccatgctgcacctcggaatcgacactccgacccagaataatatcttcaaggttctcgcaggcttgctccacttaggaaatatacagttcgccgctagcgaagacgaggcgcaaccttgccaacctatggatgatgcaaagtactcagtcaggacagccgcatccctgctgggtctgccagaagacgttcttttggaaatggtccagatacgaacaatcagggccggacggcaacagcaagtgttccggaaaccttgtgcccgcgccgagtgtgatacaaggcgtgattgtctggctaagctgatttacgcgagactctttgactggttagtttccgtgataaacagctcgatctgcgctgatactgactcttggacaacgtttatagggctcctagatgtgtacgggtttgagagcttccctgacaatagtcttgagcagctgtgcatcaattacgccaatgagaaactgcaacagcatttcgtggcccattacctgcgggctcagcaggaggaatatgctgtcgaggggctggaatggagcttcatcaactatcaagataatcagccatgtctggatctgattgagggatcccctattagcatatgtagcctgataaatgaggagtgtcggttaaatagacccagctcggccgctcagctacagactcgcatcgagacagccctcgccgggtcaccgtgtctgggacacaataagctatctcgtgagccgagcttcatagtagttcactatgctggcccagttcgataccatactgcaggtctggtggaaaagaacaaagatccaattccacccgagcttaccagacttctccaacagtcgcaggatccccttcttatgggcctgttcccaacaaaccccaaagagaagacacaggaggagccaccgggtcagtccagagccccagttctaaccgttgtgagcaaatttaaagcatctcttgaacaacttttgcaggtgctccacagtactacccctcactatatccgatgcattaagcctaactcacagggacaggcacagactttcctgcaggaggaggttctgtcccagttagaagcctgcgggttggtcgaaactatacatatcagtgccgcgggctttcctatcagagtgagccaccgaaatttcgtcgagagatacaaactcttgcgcaggttacatccgtgcacctcttccggacctgatagtccctaccccgcgaaaggactgcctgaatggtgtccccattctgaagaggctactctggagcctctgattcaagacattctccatactttaccggtgctgacgcaggccgctgccatcacaggggactccgcggaggcaatgcctgcccctatgcattgcggaagaacaaaagtgttcatgaccgactctatgctagagcttctcgaatgtgggcgcgctagggtgttagagcaatgtgcccggtgcatacagggcggttggcgccgccacaggcaccgggaacaggagagacagtggcgcgcagtgatgctgatccaggcagccattcgcagctggctaacgcgcaagcatattcagcgtctacacgccgccgctacagttattaagcgggcttggcagaagtggcggatccggatggcctgcctggctgcaaaggaattagatggcgttgaagaaaaacactttagtcaggccccctgctctctctctacttccccactgcagactcgcctcttggaagctatcattcgtctgtggcccctgggacttgtgcttgccaacaccgctatgggagtgggaagcttccagcgcaagctggtagtctgggcgtgtttacagctgcctcgcggtagtccctcctcctataccgtgcaaacagcccaagaccaagctggagttacatctattcgggctctcccccagggatccattaagttccattgccggaaaagtccgctccgctatgctgacatttgtccagaaccatctccttactcaatcaccggctttaatcagatcttactggaacggcatcggctcatccatgtgacctcttctgcatttaccgggctaggctag

SEQ ID NO: 16675 - DNA, 3303 bp, synthetic construct
  source 1..3303: mol_type = other DNA; note = Synthetic coding sequence
atgtcgtactaccagcgtcccttttccccctctgcttactcactaccggcaagtttgaattcaagcatagtcatgcaacatggaacaagcctagactcgaccgatacgtaccctcagcacgcccagtcgttggacgggaccacctcttcctctatccccctgtaccgcagtagcgaagaggaaaagagagtgaccgtgatcaaggcacctcattaccccgggatcggccctgtcgacgagtcaggtatcccaacagctatccggaccactgtggaccgcccaaaagattggtataaaaccatgtttaagcagatacatatggtgcataaacctgatgatgatacagacatgtataacacaccttatacttataacgctggactctataatccaccatacagtgcccagagccaccccgccgctaagacgcagacctataggcctttaagcaagagccacagcgacaatagcccaaacgcatttaaagacgcttccagcccggtgcccccaccacatgtgcccccacctgtaccacccttacgcccgagggacagatctagcacggagaagcacgactgggaccctcctgataggaaggttgatacacggaaattccgtagcgaaccccggagcatctttgagtatgagcccggaaaaagtagcattctccaacacgaacgacccgcaagtttataccagagctctattgatagaagtctggagcgccctatgagcagtgcctctatggctagcgatttcagaaaaagaaggaaatccgaacctgctgtcggccccccccgtggtttaggtgaccagtcggcgtccagaacctcccctggccgggtagaccttcccggaagttccaccactctcaccaagagttttacctcaagtagcccttcctccccgagtagggctaaagggggagatgatagcaagatatgtcctagcctctgttcttactcaggcctaaatggaaacccctccagtgagctggactactgctctacctatcgtcagcacctggatgtaccgcgggattctccccgtgccatcagctttaaaaatggatggcagatggcgagacagaatgccgagatctggtctagcactgaggaaacggtttcccccaagatcaagagtcggtcgtgtgacgatctcctcaatgatgactgcgactcgtttcctgaccctaaggtgaaaagcgaatcaatgggttcactcctctgcgaggaagacagcaaggaatcatgccccatggcctgggggagtccctacgtccctgaagtgcgatccaatggaagatctcgcatccggcatagatctgccaggaatgctccagggtttctcaaaatgtacaaaaagatgcacaggattaatagaaaagacctgatgaactctgaagtgatttgtagtgtcaaatcacggattctgcagtacgaaagtgagcagcaacataaggatttactgagagcttggtctcagtgtagcacggaagaggttccccgggatatggtgcctactcgtataagtgaatttgaaaaattgatacaaaaaagtaaatctatgcctaatctcggagatgatatgctaagcccagtcactctggaaccccctcaaaatggcctgtgcccgaaacgtaggttttccattgagtacctactggaagaggagaatcagtctggcccacctgcacgcgggagaaggggttgtcagagcaacgccttagttccaatccacattgaggtgacgtccgacgagcaaccccgcgcacacgtggagtttagcgatagtgaccaagacggcgtagtatcagaccactccgattatatacacctagaaggcagctctttttgcagtgaaagtgactttgatcacttttcttttacgagcagtgagtcattttatggaagttctcaccatcaccatcaccaccaccaccaccaccacagacatttgattagcagctgtaaaggccggtgtccagcctcctacactcgatttacaaccatgctcaaacacgagcgcgcccggcacgagaataccgaggagcctcgcaggcaggagatggaccctggtctttcgaagttagccttcctagtgagcccagttcctttccgcaggaagaaaaattctgctccaaagaagcagactgagaaggctaagtgtaaagcctccgtgtttgaggcacttgatagcgcgttaaaggatatctgcgatcagataaaggctgaaaaaaagagaggctcattgcccgataacagtatattacacaggctgatcagcgagctgcttcctgatgttcctgagagaaactccagtctgagagccctgcggcgctcgccactgcatcaacccctgcaccccttgccacccgatggtgctattcattgtcccccataccagaacgactgtggaagaatgcctcggtccgctagctttcaggacgtagatacagcaaactccagttgccatcatcaggatcgtgggggggcactacaagacagagagtccccgcggtcatatagtagtaccctgaccgacatgggccgatcagctcccagggaacgccggggaacgcccgaaaaggagaaactgccagccaaggccgtttatgattttaaagcccaaacatccaaggagctttcattcaaaaaaggcgacactgtgtacattttgcgcaagattgatcaaaattggtacgagggggagcaccacggaagggtggggatctttcccatttcctatgtggagaaattgactccgcccgagaaggcccaacccgcgcggcccccaccgcctgcccagccaggggagattggcgaggccatcgcaaagtacaatttcaacgccgatacaaacgtcgaactcagtcttaggaagggagatcgggtgattctcctgaagcgggtggaccagaactggtatgagggaaaaatcccaggcacaaacaggcaggggatctttcccgtatcctatgtggaagtggtgaaaaagaatacaaaaggagccgaggactatcccgacccgcctatacctcatagttacagcagtgaccgcatccacagcctcagttccaataagccacaaaggcccgtcttcacccatgagaacatccagggtgggggagaaccgttccaggctctgtacaactacacaccaagaaacgaagatgagctcgaactgagagagtccgatgtcatagacgtcatggaaaaatgtgatgacggatggtttgtcggcacgtcccgccgcacgaagtttttcggaaccttccctggcaattatgtcaaaagactgtag

SEQ ID NO: 16676 - DNA, 390 bp, synthetic construct
  source 1..390: mol_type = other DNA; note = Synthetic coding sequence
atggcagagcttatccagaaaaagctgcaaggtgaagttgagaaatatcaacaactgcagaaggacctaagcaagtcaatgtcgggcaggcagaagctggaagcccaactcacagaaaataatatcgtgaaggaggagttggcactcctcgatggctctaacgtggtttttaagctcttgggtccagtcttagtaaagcaggagctgggagaggcacgcgcgacagtgggtaagagactggactacatcacagctgagataaaacggtacgaatcgcagctccgcgacctggagcgacaatcagaacagcagcgggaaacgttggcgcagctccagcaagagtttcagcgggctcaagctgccaaggcaggtgcgccagggaaggcatag

SEQ ID NO: 16677 - DNA, 498 bp, synthetic construct
  source 1..498: mol_type = other DNA; note = Synthetic coding sequence
atgtccctgcacggtaagaggaaggagatttacaagtacgaagccccctggacagtctacgcaatgaattggagcgtgcgtcccgacaagcgctttagacttgcactgggaagttttgtcgaggagtacaataataaggtccagcttgtgggtctcgacgaagagtcatctgaatttatatgtcgtaacaccttcgaccatccataccctacaacaaaattgatgtggattcccgatacaaagggggtctaccccgatcttctggccacctccggagactacctaagggtatggcgcgtgggcgaaacggaaacccgcctcgagtgcctcctgaataataataagaacagcgatttttgtgcgcccttgacaagcttcgattggaacgaagtggacccctacctgttgggtacctcttccatcgataccacctgttgcttccagtggcctgtgtgtctgagtttgctgtgtacccactgctatcagaaactgctgtag

SEQ ID NO: 16678 - DNA, 1044 bp, synthetic construct
  source 1..1044: mol_type = other DNA; note = Synthetic coding sequence
atgagccttgctcagtcaccggggatctggggagaggatccagtgaagctgacactggctctgaaaatgaccagacaggatcttacaaggactcagatggagctcaacaatatgaaggcaaacttcggggatgtggtgcctcggcgggattttgagatgcaggagaaaaccaacaaggacctacaggagcagttagacactcttcgcgcctcctacgaggaagttcgtaaagagcatgagatattgatgcagttgcacatgtctacccttaaagagcgcgatcaattcttctccgagctccaggagattcagcggacctccactccgagacccgactggacaaagtgcaaggatgtcgttgctggcgggcctgagcgatggcagatgctggcagaaggtaagaattcagatcagttggtggacgtactgctggaggagatcggatcaggactgctgcgagaaaaagattttttcccaggtctcggttacggggaagctatccccgcgttcctgagatttgacggattggttgaaaacaagaagccctctaaaaaagacgtcgtcaacctcttgaaagatgcttggaaagagcggctggcggaggaacagaaagagacgttccccgactttttctttaactttctcgaacacaggttcgggccaagtgacgcaatggcctgggcgtacactattttcgagaatattaaaatttttcattcgaatgaagtgatgtcccagttctacgcggtcctgatggggaagaggtcagagaacgtgtatgtgacccagaaggagactgtagcgcagctcttgaaggagatgaccaacgctgactcacagaacgagggcttgttgaccatggagcagttcaacaccgtcctcaagtccacgttcccactgaaaacggaagaacagattcaggagctcatggaggccgggggatggcatccatcttcgagtaatgctgacctcctaaattatagaagtttgttcatggaagatgaggaggggcagtccgagccttttgtgcagaaactatggtag

SEQ ID NO: 16679 - DNA, 219 bp, synthetic construct
  source 1..219: mol_type = other DNA; note = Synthetic coding sequence
atgtggagtctgacagctagtgaaggtgagtctactaccgcgcacttcttcctgggggcaggagacgaagggctgggtaccagaggcattggcatgcggcccgaggaatcagacagtgaactgctcgaggacgaagaggacgaggtaccccccgagcctcagattattgtgggtatctgtgcgatgactaaaaagagcaagagtaaacctatgacatag

SEQ ID NO: 16680 - DNA, 1149 bp, synthetic construct
  source 1..1149: mol_type = other DNA; note = Synthetic coding sequence
atgttaagatggacagtccacctagagggcgggccgcggcgggttaaccacgccgcggtagctgtgggtcacagggtgtactcattcggcggttattgtagcggcgaagactatgaaaccctgcgccagattgacgtgcatatttttaacgcagtgtctctaaggtggactaagctcccacctgtgaagagtgcaatcagagggcaggctcctgttgtgccctatatgaggtatggacatagcacggtgctgattgacgatacagtgctcctttgggggggccgcaacgacacagaaggagcctgcaacgtactttacgctttcgatgtgaacactcacaaatggtttaccccccgagtctctggaacagttccgggcgcaagagacggacattctgcatgcgtacttggcaagatcatgtatatcttcgggggatatgaacagcaagcagactgcttctcgaatgacatccacaaattggacacttccacaatgacgtggactctcatttgtacaaagggctcccctgccaggtggcgggacttccattcagcgacaatgctggggtcccacatgtatgtgtttggtggacgcgccgacagatttgggcccttccacagcaacaatgagatctattgtaatcggatcagggtcttcgatacaaggaccgaagcatggctggattgtccacccacacccgtcctccccgaggggaggcgcagccacagtgcttttggctataatggagagctgtacatattcgggggatacaacgcgcgcctgaatagacacttccacgatttatggaagtttaatcctgtgtcattcacctggaagaaaatcgaaccaaaagggaaaggcccctgtcccaggcggagacagtgttgttgtattgtgggagataaaatcgtgctcttcggaggcacaagcccgagccccgaagagggtttgggtgatgagttcgatctgattgatcactccgatttacatatccttgattttagcccttccctcaaaaccctatgtaaactggctgttatccaatacaatctggaccagtcttgcctgccgcatgacattcggtgggaactgaacgcaatgaccaccaacagtaacatttcccgcccaatcgtgtccagccatgggtag

SEQ ID NO: 16681 - DNA, 1620 bp, synthetic construct
  source 1..1620: mol_type = other DNA; note = Synthetic coding sequence
atggccaccagtgcgccattgcgcagcttggaggaagaagtgacttgttcgatttgcctagattaccttcgggaccccgttaccatcgactgtggccatgtgttctgccgttcctgcactacggacgtgagacctatctcagggtccaggccagtgtgcccactgtgtaagaagcctttcaagaaggaaaatattcgtccagtatggcagcttgccagtcttgtggagaatatagagaggctgaaagtagacaaaggccggcaacccggcgaagtaacaagggagcagcaagacgccaaactatgtgagagacacagggagaagcttcattattactgcgaagacgatggaaagctcctatgcgtgatgtgtagggagtctcgtgagcacagaccccatactgccgtactgatggaaaaggccgctcagccgcatcgggagaagatcttaaaccatctgagcactttgagaagagaccgagataagatccaaggttttcaggctaaaggagaggctgacattttggctgctcttaaaaagctgcaagaccaaagacagtatattgtcgccgaatttgagcagggacatcagtttctacgagaacgggaagagcatctcctcgagcagcttgccaagctcgaacaagaattgacagaggggagggagaagtttaagtcccggggcgtgggcgagctcgctcggttggccctggtgattagcgagctggaagggaaagcacaacagcctgcggcggaactgatgcaagatacacgtgatttcctcaaccggtaccctcggaaaaagttttgggtaggcaagcccatcgcccgagttgttaaaaaaaaaaccggcgagttctctgataagttgttgtcccttcaacggggcttgagagagtttcagggcaagctgctccgcgacctggaatataagaccgtcagcgtgacgttggacccacagtctgcaagcggatatttgcaactgtctgaagactggaaatgtgttacttatacctccctttacaagagtgcttacctgcatcctcagcagtttgattgcgagcccggcgtgttgggttctaaaggcttcacctggggaaaagtatactgggaagttgaggtggagagagagggctggtccgaggatgaggaggagggggatgaagaagaagagggtgaagaggaggaggaagaagaggaggctgggtacggggatgggtatgatgattgggaaactgacgaagacgaagagagcctgggcgatgaagaggaggaggaggaggaagaggaggaagaagtgcttgagtcatgcatggttggtgttgctagagatagtgttaagaggaaaggcgacttaagcttacgccccgaagacggcgtgtgggccctgcggctgagcagctctggcatctgggccaacaccagcccggaggcagagttattccctgccctaaggcccagacgagtggggatcgcgctggactatgaagggggcaccgttacatttacgaacgcagaaagccaagaattgatctatacctttactgccacctttacacggagacttgtgcctttcttatggttgaaatggcccggaacaagactgcttttacgtccctag

SEQ ID NO: 16682 - DNA, 390 bp, synthetic construct
  source 1..390: mol_type = other DNA; note = Synthetic coding sequence
atggccgaacttatacagaaaaagctgcagggtgaggtagagaagtatcaacagctgcagaaagacttatcaaagtctatgagcggacgccagaagctggaggcccaactgacagaaaataatattgtgaaggaagagctggccctgctggacgggtccaacgtggtctttaagctgctgggtcctgttctggtgaagcaggagctcggcgaagcaagggccaccgtcggaaagcgcttggactatatcacagcagaaattaaacggtacgagtcacagctgagggacctggagcggcagagtgaacagcagagggaaacattggcacagcttcagcaggaattccagagggcccaggccgccaaggctggagctccgggcaaagcttag

SEQ ID NO: 16683 - DNA, 1089 bp, synthetic construct
  source 1..1089: mol_type = other DNA; note = Synthetic coding sequence
atgctgaaaaacaagggccatagttccaaaaaggacaacctggccgtgaacgccgtggccctccaggaccacatactgcatgatctgcagctaagaaatctctcagtggcagatcacagcaagactcaggttcagaagaaggaaaacaagagtctcaagcgggacactaaggccattatcgacaccggcctcaagaagactacgcagtgtcccaaacttgaagactccgagaaggagtacgtgttagatcccaaaccccccccactgaccctggctcagaaacttggtctgatcggacccccaccacctccattgagttcagatgaatgggaaaaagtgaagcagcgcagcctcctccaaggagatagcgtgcagccctgcccaatttgtaaggaagaatttgagctgcggccccaagtgcttctgtcttgcagccacgtgttccataaggcttgtcttcaggcctttgaaaaatttacaaacaaaaagacatgccctttgtgccgcaaaaaccagtatcaaactcgagtcatccacgatggtgcccgtttgtttaggattaaatgcgtgaccagaatccaagcgtactggcgcggctgcgtcgtgaggaaatggtatcgcaatttgcggaagaccgttcctcccaccgacgccaagctgaggaagaagttcttcgagaaaaaatttacagagatctctcatcgcattctgtgctcatataatacaaatatcgaagagttattcgccgaaattgatcaatgcctcgctattaatcgcagtgtcctccaacagctagaggaaaagtgcggccacgagataacagaggaagagtgggagaagatccaggtgcaggccctgaggcgggagactcacgagtgctccatttgtttagcccctctaagcgcggcaggtggccagagggtgggtgcggggagaaggtcgcgggagatggctctgctgtcctgctctcacgtcttccaccacgcctgcctgctggccctggaggaattcagcgtgggcgaccgacccccctttcacgcgtgcccactgtgcaggtcctgctatcagaagaagattctggagtgttag

SEQ ID NO: 16684 - DNA, 1266 bp, synthetic construct
  source 1..1266: mol_type = other DNA; note = Synthetic coding sequence
atgtccgctctgcggaggagtggatacggcccgtcagatgggcctagctatggacgttactacggaccaggcggcggtgatgtacccgttcaccccccccctcctctctaccctctgagacccgagccacctcagccccctatcagctggcgagtacgaggaggggggcctgccgaaaccacatggcttggagaaggcggtggtggggacggatactaccccagtggcggcgcttggcctgaaccaggcagggcaggagggagccaccagtccttgaattcctatacaaacggcgcgtacgggcctacctaccctccaggtcctggtgcaaacacagcttcctacagcggggcctattacgcacccggctacacacaaacctcctactcgaccgaagtgccttcgacctacagaagcagtggcaacagtcccacccccgtctctagatggatatacccccagcaagactgtcagactgaagcaccgcccttaagggggcaagtgccaggatatcctccctcgcaaaatccaggcatgaccctgccacactatccatatggtgacggaaaccgctctgtgcctcagagcgggccaaccgttcggcctcaggaggacgcatgggcctcacccggggcctacggcatggggggaaggtatccttggccaagctcagcaccttccgcccctcctgggaatctgtacatgacggaaagtactagtccctggcctagttcaggttcaccacagtcacctccgtcgcccccggttcaacagcctaaggattctagctacccttacagtcagagcgaccagtcaatgaatcggcataatttcccatgcagtgtccaccaatacgaaagctctggcaccgtgaataatgatgactctgacctcctggattctcaagtccagtattcagccgaaccacagctgtacggtaatgccacctctgaccaccccaataaccaggatcagagtagcagccttcctgaagagtgcgtgccaagtgatgaatcgaccccaccaagcatcaagaaaatcattcacgtgctggagaaagtgcagtatttagagcaggaggtggaagagtttgtcggaaaaaagactgacaaggcctactggttattggaagagatgctgaccaaggagctgctggagttggatagtgttgaaacaggcggtcaggattctgtccggcaggctaggaaagaagccgtctgtaagattcaggcgatcctggagaagctggagaagaaaggactgtag

SEQ ID NO: 16685 - DNA, 321 bp, synthetic construct
  source 1..321: mol_type = other DNA; note = Synthetic coding sequence
taaaacttaagggaaggtgccgagcagaaagtcgtatttatcacaggacgtgtccacccaggcgaaacgccatcgtctttcgtgtgtcagggcatcatcgactttctggtgtcccagcatcccattgcatgcgtcttacgcgaatacttggttttcaagatagcccccatgctcaatcccgatggtgtgtatctgggcaactacaggtgtctgtctttgatgaggaatgggagcagagggagacccttctttccgagctctagcgcacggatgcttcgcacaagccccattccggctcacccgctgactgggactctgtag

SEQ ID NO: 16686 - DNA, 684 bp, synthetic construct
  source 1..684: mol_type = other DNA; note = Synthetic coding sequence
taacttatcttcgcatgtttagtgccaggattcccggctgtgatgtcctccagaggtccatgtactttggaaacgcttatcaatcccagcccctccgttgcagacgtcaaaatttatcccgaggaaatcacccctttactccctgctataagtggtgagaagattgccgaagaccaaacttgcttttttctccagatcctgctgaagtatatggtgatccaggcagcctctttagaatggaagaacaaagaaaaccaggacaccggctttaagtttttattcacactattcaggaaatactacctcccgcaccttttcccatccttcactaagctgacaaacatatacaagccggtgttggacatcccccatctgagaccaaagcctgtatacatcaccacgacgagagacaacgagaacatctattcgaccaagatcccctacatggcggcaagagtggtcttcattaaatggatagtcacctttttcctcgaaaaaaagtacttgaccgctacccagaatactaaaaacggagtcgatgtgctgccaaaaattatccaaacagtcggcggaggtgccgtgcaggaacgcgcccccgagctcgatgggggtggccccaccgagcaagataaatcacactctaactcaagcaccctctcagatcgaaggcttagcaattcctag

SEQ ID NO: 16687 - DNA, 573 bp, synthetic construct
  source 1..573: mol_type = other DNA; note = Synthetic coding sequence
atggagcccccaatggaaccgtcaggaggggagcaggagcccggtgccgttcggtttttggacctgccctgggaagacgtcttgctcccacacgtgctgaacagggttccgttacgccagctgctgaggctgcagagggtaagccgtgcgtttcgctcactggtccagttacacctggccgggctacgacggtttgatgcggcccaggtgggccctcagattccacgggccgcactggcccgcctcttgcgcgatgcagaagggctgcaggaactggccttggctccgtgtcacgaatggctgtccgatgaggacctggtccctgtgcttgcccggaatcctcagcttcggagcgttgcacttgggggttgtggccagttatctcgaagggctctgggcgctctggctgagggctgtcccagactacagcggctgagcctggcgcactgtgactgggtggatggcctagctcttcgggggctggccgacagatgtccagccctcgaagagttggatttgacagcctgccggcagttgaaggacgaagcaattgtttacctggcgcagcgatag

SEQ ID NO: 16688 - DNA, 270 bp, synthetic construct
  source 1..270: mol_type = other DNA; note = Synthetic coding sequence
atgtcagagcaaggcgatttaaaccaggctatcgctgaggagggtgggactgagcaggagactgccacccctgagaacgggatagtaaagagcgagtccctcgatgaagaagagaagctcgagctccagcgacggctggaagcccagaaccaggagcgccggaaatccaaatcaggtgccgggaaaggcaagttgactcggagtctcgccgtttgtgaggaatctagcgcgaggccaggcggagagtccctgcaggatcagactctgtag

SEQ ID NO: 16689 - DNA, 381 bp, synthetic construct
  source 1..381: mol_type = other DNA; note = Synthetic coding sequence
atgacgacccgttccgttcttgacgtggagaccttcgttgccgacattttgaagggcgagaacctgtctaagaaagcaaaggaaaagagagagagtttgattaagaagattaaggatgtcaagagtatatatctgcaggagtttcaagataaaggagacgcagaggatggagaggaatatgatgacccctttgcgggtccaccagatacaatttctctggcctccgaacggtatgacaaggacgacgaggctcccagtgacggcgcccagtttccccccatagcagcccaagatttacctttcgtccttaaagcaggctatctggaaaagaggcggaaagatcactccttcctcgggttcgaatggcagaaacggtggtag

SEQ ID NO: 16690 - DNA, 678 bp, synthetic construct
  source 1..678: mol_type = other DNA; note = Synthetic coding sequence
atgctgagtgcagttgcgcgtggttaccagggctggtttcacccctgcgccagactctctgttcggatgtcatcaactggcattgaccgcaaaggcgtcttggccaatcgcgtggcagtggtgaccggtagcacttcaggcatcggttttgctatcgctcgccggctcgctcgggatggggcccacgtggttatttcgagtcgcaaacagcagaacgtggatagagcaatggccaaattacagggggagggtctaagcgtggccggtatcgtctgccacgtcggtaaagctgaagatagagaacaactcgtcgccaaggctctggagcactgtgggggtgtcgatttccttgtctgttctgctggcgtcaacccgctcgttggctcaactttggggacgagcgaacagatatgggataagattctgagcgtgaatgttaagtccccagccttgctcctctcccagttactcccatacatggagaaccggagaggcgccgtaattttggtgagcagtatagcagcttacaatcctgtggtggctctcggggtctacaatgtctccaaaaccgcactcttgggcctgacacgcacactggctctcgagctggcccccaaggacatcagggtcaattgcgtagtccctggcatcatcaagactgacttctcaaaagtttag

SEQ ID NO: 16691 - DNA, 1080 bp, synthetic construct
  source 1..1080: mol_type = other DNA; note = Synthetic coding sequence
tgagccaccgcaatgacgtccgcttggttggcccaaggaactggagagggtgttaacgatgttagaaagggggcgtgcgcttcacacgtctccactatggcaagttttctaaagggcgcacacgttacgatcaatgcacgtgcggaagaagacgttgaacccgagtgtatcatggaaaaagttgctaaggcctcgggcgcaaactacagtttccataaggaaagcggcaggtttcaggacgttggccctcaggccccagtcggctccgtttaccagaagacaaatgctgtgtcagaaatcaagagagtcgggaaagactccttctgggcgaaggctgaaaaggaggaagagaacaggagactggaggaaaagcgtcgcgccgaagaggctcagagacagttagaacaggagcgaagagagagagagctgagggaggccgcgaggagagagcagaggtaccaggaacagggcggagaggcctccccacagcgtacttgggaacagcaacaagaagtggtaagccggaacagaaatgagcaggagagtgctgtgcatcccagagagatctttaagcagaaagaacgtgctatgtccacaacaagtataagctctccccagccaggaaaactgcgatcaccctttctgcagaagcaacttacccagccagagacacactttggccgcgaacccgccgcagctattagtcggcctagagcagacctccctgccgaggagcccgctcccagcacgcctccctgtctggtgcaggcagaggaggaggccgtttacgaggagccgcctgaacaagaaactttctatgaacagcctcctttagtgcagcagcagggtgccggatctgaacacatcgaccatcatatccagggtcaaggccttagtggacagggactttgcgctcgcgctctgtacgactaccaggccgccgacgataccgaaatcagttttgatcctgagaatctaatcacaggcattgaagttattgatgaaggctggtggcgtgggtatggtcccgacgggcatttcggcatgttcccagctaattacgtcgagttaatagaatag

SEQ ID NO: 16692 - DNA, 483 bp, synthetic construct
  source 1..483: mol_type = other DNA; note = Synthetic coding sequence
atggaggcagagaggccacaggaggaagaagacggtgaacagggccctcctcaggacgaggagggttggcctccacccaatagcacaactcggccctggcgaagtgccccaccttcgccaccacctcctgggacgcggcacacagctctgggcccgcgctcagccagcctgctgtcactccaaaccgaacttctgttggacctggtggctgaggcccagagccgcaggcttgaggagcagcgagctactttttataccccacaaaatccttccagtctggcgccggcaccactgaggccactggaggaccgagagcaattgtactccaccatactctcccatcagtgtcagcgtatggaggcccagcgaagcgagccacccctgcccccaggtgggcaggagctgctggagctgctgttgagagtccaggggggtggccgtatggaggaacagcggtctaggccccctacccatacatgttag

SEQ ID NO: 16693 - DNA, 2616 bp, synthetic construct
  source 1..2616: mol_type = other DNA; note = Synthetic coding sequence
atgggagacagcgacgatgagtatgacagacgaaggagggacaaattccgccgggagagatcagattacgatcgctcccgagagagggatgagcggaggcgtggcgacgattggaacgatcgggagtgggacagaggacgcgagagacgaagcaggggtgagtatagggactatgatcgaaaccggcgggaacgcttcagtccccctcgacacgagctgagccctccccaaaaacggatgaggagggactgggatgagcacagcagtgacccctatcactccgggtatgagatgccttacgcaggggggggaggggggcctacgtacggtccacctcagccttgggggcatccggatgtccacatcatgcagcaccatgttctgccaatccaggccagactgggctccattgcggaaattgacttaggcgtgccaccccctgtaatgaaaacttttaaagaatttctcctaagcttggatgacagcgtagacgaaactgaggccgttaaacgatataacgactataagctggattttcgcagacagcagatgcaagacttttttctggcccataaggacgaggaatggtttcgcagtaaatatcaccctgatgaggttgggaagagacggcaggaagctagaggtgccctgcagaatagattacgggttttcctgtctcttatggagaccggctggtttgacaacctcctgttagacattgacaaggccgacgctatcgtgaagatgcttgatgccgctgtgattaagatggagggcggaaccgagaacgatctccgtatcctggagcaggaggaggaggaagagcaggcaggaaaacctggtgagccatccaagaaggaagagggcagggcgggagcaggactcggggacggggagcgcaagacaaacgacaaagatgagaagaaggaggacggaaagcaagctgagaatgacagtagcaatgatgacaagaccaaaaagagcgaaggtgacggcgacaaggaagaaaaaaaggaagattctgaaaaggaagctaaaaaatcgtccaagaaacggaataggaagcattctggcgatgattcttttgatgagggtagcgtgagcgagagcgagtctgagtccgagtctggccaggccgaagaggagaaagaagaagccgaagccctaaaggaaaaggagaagccgaaggaggaggagtgggaaaagcccaaagatgccgccggcctggagtgcaaaccaagacctcttcataaaacatgctccttgttcatgcggaacatcgccccgaacatcagtcgcgccgagatcatctcactatgcaagcggtacccaggttttatgcgggtggctctcagcgaacctcaacctgagcgtcgcttcttccgcaggggatgggtgacctttgatcgctcggtgaacatcaaggagatttgttggaatctgcagaatatacgtctcagggagtgtgaactaagccccggagtaaatagggatctcacgagacgtgttcggaatataaatggcatcacgcaacataagcagattgtccgaaacgatatcaaacttgccgccaaacttatccatactctagatgatcggactcagttatgggcctccgaacccggcactccccctctgcctacttctctcccgagccaaaatcctatactgaagaacattaccgattacctaatagaggaggtctctgcagaggaagaagagttactgggaagctctggcggtgctccccctgaggagccccccaaggaggggaatcccgctgaaatcaacgtggagcgggatgagaagttgatcaaggtattggataagttgctcctatacctgcgcatagttcactcactggattactataacacctgtgaataccctaatgaggacgagatgcctaacaggtgcggcattattcatgtgcgaggcccaatgccgccaaatagaatttcccacggggaggttctggaatggcagaaaacatttgaagagaaactgactcccctgttgagcgtgcgcgagtccctatccgaagaagaggctcaaaagatggggcgtaaggaccctgaacaggaggtcgagaagtttgtgacctcaaatacccaggaactcggcaaagacaagtggctgtgcccactttctggtaaaaagttcaagggccccgagtttgtgcggaagcatatattcaataagcatgcggagaaaattgaagaggtcaaaaaagaggttgctttttttaacaactttcttacggacgcgaaaagacctgcactaccagaaatcaaacctgctcagcccccaggccccgcacagtctttgactccaggcctgccttatccccatcagaccccccagggcctgatgccatatggacagccacgaccacccatcttggggtatggtgcgggagcggtaagacccgcggtaccaactggtggaccgccctatcctcatgcgccatacggcgcaggtcgtggaaactacgacgctttccgcggccagggggggtatcctggcaagccacggaatcgcatggtgagaggcgatccacgagcgatcgtcgagtaccgggatcttgacgcgcctgatgatgttgacttcttctag

SEQ ID NO: 16694 - DNA, 2025 bp, synthetic construct
  source 1..2025: mol_type = other DNA; note = Synthetic coding sequence
atgcagacttcatcaagtaggtcagtgcacctgagcgaatggcagaagaactattttgctatcacgagtggcatctgtacaggacctaaggctgacgcttacagggcccagatcctgcgcatccaatatgcctgggcaaatagtgagatctctcaggtgtgcgcaaccaaattgtttaaaaaatatgctgaaaagtattcagcaattattgacagcgataacgtcgaaagtgggttaaacaactacgcggagaacatcctgacactggccggatcccagcagaccgactcggacaaatggcaaagcggcctgtccatcaataatgttttcaaaatgtcatccgttcaaaagatgatgcaggcaggtaagaagttcaaagactccctgctggagcctgccttagccagcgttgttatccacaaggaagcaacggtgtttgacctgccgaaattttctgtttgcgggtcttcccaagagtctgactcactaccaaactccgcccatgaccgagataggacgcaggacttccctgagtccaacagactcaaactactgcaaaacgctcaaccccctatggttacaaataccgcccgcacgtgccccaccttcagcgccccagtgggcgaatccgccacagcgaagttccacgtgacacccctgttcgggaatgtcaagaaagaaaatcatagctccgctaaggagaatataggcttaaatgtcttcctctccaatcagagctgcttcccagctgcctgcgagaacccgcagcggaaatctttctatggttctggtacaatcgacgcactaagcaatccgatcttgaacaaggcctgcagtaagaccgaggataatggccctaaagaagactcttccctgcctacatttaaaactgcaaaagagcaactgtgggtagatcagcagaagaagtaccaccagccccagcgcgccagcggcagttcgtatggaggcgtaaagaagagtttgggcgccagcaggtctcgagggatcctgggcaagttcgtgcctccaatccccaaacaggacggaggagagcagaatggcggcatgcagtgcaaaccatatggagccggccctacagagcctgcccaccctgtggacgaaaggttgaagaatctcgagcctaagatgattgagctgattatgaatgagattatggaccacggtccacccgtgaattgggaagatatcgctggcgtggagtttgctaaggccaccattaaggagatagttgtctggccaatgctgcggccggacatatttactggtctgagggggccaccaaaaggaatactgctcttcggcccgcccggaaccgggaagaccctgataggaaaatgtattgcaagccagtccggggcaacctttttcagcatctccgccagttctctgacttccaagtgggtaggggagggagagaaaatggttagggctttgtttgctgtcgcacgttgtcaacagcccgccgtcatcttcattgacgagattgacagccttctatctcagcgcggcgacggtgaacacgaaagttcccgacgcattaaaaccgagttcctggttcagctggacggtgccaccaccagttcagaagatagaattctcgtggtgggagcgaccaaccgaccacaggaaatcgatgaagcagcgcggcggcgattagtaaaaaggttgtatattcccctcccagaagcgagtgctcgaaagcagatcgttatcaaccttatgagcaaggagcaatgttgtctttctgaggaagagattgagcagatcgtgcagcaatctgatgctttctctggcgccgatatgacccaactctgccgggaagcatccctggggccgattcgctcgctgcaaacagccgacatcgctaccattactcccgaccaagtgcgcccaattgcttatatcgattttgagaacgcttttaggaccgtgcggccttcagtttcaccaaaagacctggagttatatgaaaactggaacaagactttcgggtgtggtaaatag

SEQ ID NO: 16695 - DNA, 1467 bp, synthetic construct
  source 1..1467: mol_type = other DNA; note = Synthetic coding sequence
atgagcgacgaggtcttctctacaaccctggcctacactaagagcccgaaggtgacgaagagaacgacgtttcaggatgaactcattcgggccattacagcccgctcagcccgtcagcggtccagtgagtacagcgacgactttgactctgatgaaattgtgtcacttggagatttttcagatacatccgccgatgaaaactcagtcaataaaaagatgaacgatttccacatctcggacgacgaagaaaagaatcctagcaagttgctttttctcaaaaccaacaagtccaacggcaatattactaaagatgagcccgtctgtgctatcaagaacgaagaggagatggcccctgatggatgcgaggatattgtagtgaaaagcttttcagaatctcagaacaaggatgaggagttcgaaaaggacaagatcaaaatgaaacctaaaccacgaattctctctattaagtctactagcagcgagaacaatagtttggatactgatgaccattttaagcccagccctagaccccgctcaatgctgaaaaaaaaatcgcacatggaagagaaagatggtcttgaggacaaagagaccgccctttcagaggagctagagttgcacagtgccccctccagcctgccgacccccaacggcattcagctggaggccgaaaaaaaagccttttccgaaaaccttgaccccgaggacagttgcctaaccagcttggcaagctcaagtctgaagcagattctgggcgacagtttttcccccggctctgaggggaatgcctccggcaaggatccgaacgaagagatcacagaaaatcataatagcttgaagagcgatgaaaataaggagaactcattttctgccgaccatgtgaccacagctgtcgagaaatccaaagagtcccaagtaacagcggatgacctagaggaggaaaaagccaaggccgagctcatcatggacgacgaccggactgttgacccgcttctttctaaatcacagtcaatcctgatctcaacatctgcgaccgcctcctccaagaaaaccattgaggacaggaacattaaaaacaaaaaaagcacaaacaacagagcctccagcgcctccgctcggctgatgaccagcgagttccttaagaagagcagcagtaagaggcggactccatcgaccacaacatcatcccattaccttggcactcttaaagtgctggaccaaaaaccctctcagaaacaatcgatcgagcccgacagggctgataacatccgggctgctgtgtatcaggaatggctggagaaaaagaatgtttatttacatgagatgcatcgaattaaaagaatagagtccgagaatctccgcattcagaacgagcagaaaaaggcggccaagcgggaagaggcccttgcctctttcgaggcttggaaagccatgaaagaaaaggaggccaagaaaattgcggcctag

SEQ ID NO: 16696 - DNA, 564 bp, synthetic construct
  source 1..564: mol_type = other DNA; note = Synthetic coding sequence
atggtaagggaacctgggcccaggcccggcacacctgggtgttccgcctctgggcaatggactgcaactctgcgcccatatttgagcgctgtgagggctaccctccaggctgcactgtgtctggagaatttcagcagtcaggtggtagagcgtcacaacaagcccgaggtggaagtgcgttcgtccaaagaattactccttcagccagtgactattagcagaaacgaaaaggagaaagtcttgatcgagggctccattaatagcgtgcgtgtgtctattgcagtgaaacaggctgacgaaatcgagaaaatcctctgccacaaattcatgcgcttcatgatgatgcgggccgagaattttttcatactgagacgaaaaccggtggaaggctatgatattagtttcctgatcacaaactttcacaccgagcagatgtacaaacacaaacttgttgatttcgtgattcactttatggaggagattgataaagagataagtgagatgaagctgtccgtcaatgcccgtgcaagaatagtggccgaggaatttttgaagaatttttag

SEQ ID NO: 16697 - DNA, 1068 bp, synthetic construct
  source 1..1068: mol_type = other DNA; note = Synthetic coding sequence
taatctctcgcttccagtttaaggaataaggaagggacactcgggtctaaggtagggtaccttgatgtcgaggcacgggggccgggggaaggaagaggggggggcggagaatcaccaccgctgcagcctcctcctccagctcccgtgcttctgtacgatcagggcggcggcagaagaagaaggggcgaggcagaagccgaggctgaagagtgggaggcagaaagtgtactcggcactctactgcagaaacttagagaggagggttatttggcctactaccttcaggggggattcagccgatttcaggccgagtgtccccacctgtgcgaaactagcctggcagggcgcgctggatcatctatggcacccgtgcctggaccagtcccagtagtgggattgggttccctttgtttaggaagcgactgttctgatgctgagagtgaggccgacagagacagtatgagctgcgggctggattcggaaggggctacacccccccccgtgggcctgcgcgcttctttccccgtgcagattctgccaaatttatacctgggctcagcccgcgactctgccaatcttgaaagcttggcaaagttgggcatccgttatatcttgaatgttactccaaacttgccgaactttttcgaaaaaaacggggatttccattataagcagatcccaataagcgatcattggagtcagaacctctcacgtttctttcccgaggctatagaattcatcgatgaggcattgagtcagaactgtggcgtcttagtgcactgcctggctggcgtttcccgctcagtcaccgttactgtggcttatctgatgcagaagttacatttgagcctcaatgatgcatacgatctggtaaagaggaaaaagagcaatatatctcccaactttaacttcatggggcagctattagacttcgagcgaagtctccggctggaggagcggcacagccaggagcaggggagcggaggacaagcttccgccgccagtaacccgccctcattctttaccaccccaacatccgacggagccttcgagctagcccctacttag

SEQ ID NO: 16698 - DNA, 51 bp, synthetic construct
  source 1..51: mol_type = other DNA; note = Synthetic coding sequence
atgtgcacatctgagacattccaggctctggacacgtttgaggcccggtag

SEQ ID NO: 16699 - DNA, 1620 bp, synthetic construct
  source 1..1620: mol_type = other DNA; note = Synthetic coding sequence
atggctacatccgcccccttacgaagtcttgaggaagaggttacatgctctatttgcctggattacctgcgggaccctgtgaccatagattgcggacatgtgttctgtagatcctgtaccaccgatgtgaggcctatttctggatctcggcccgtgtgcccgctatgtaagaagccatttaaaaaggagaacatacgcccagtgtggcagctggccagccttgttgaaaacatcgaaaggctcaaggtggacaaggggaggcagcctggcgaagtgactcgtgaacagcaggacgctaaattatgcgagcgccaccgcgaaaaattgcattactactgcgaggatgatgggaagctactctgtgtgatgtgtagagaatcccgagaacaccggcctcacactgctgtcctcatggagaaggcagcacaaccccacagagagaagatcctgaatcatctctctactcttcgacgggatcgggacaaaatccaggggtttcaggccaagggagaggcggacattctagccgccctgaaaaaactgcaagaccagcgacagtatattgtcgccgagtttgagcagggccatcagtttttgagagaacgggaggaacacctcttggagcagctagcaaaactagagcaggaactaaccgagggacgggaaaaatttaagagccgcggggtgggtgaactggcaaggcttgctctggttattagtgaactggaaggcaaagcacagcagcctgccgccgagctcatgcaggatacccgcgatttcctcaaccggtatcctcgaaagaagttttgggtggggaagccaatcgcaagagttgtaaaaaagaagactggcgagttttccgataagctcctatctcttcaacggggtctgcgggaattccagggaaaactgttgcgggatctggagtacaaaactgtttctgtaaccttggatcctcaaagtgctagcggctacctccaactgtctgaagactggaaatgtgtgacatacacttccttgtataaaagcgcatatcttcatccccagcaattcgactgtgaacccggagtcctgggatctaagggttttacttggggcaaggtgtattgggaggttgaggtggagcgagaggggtggagcgaggatgaagaagagggagacgaagaagaggaaggtgaggaagaggaggaggaggaggaggccgggtatggggacggttacgatgattgggagacagatgaagacgaagaatcactcggcgacgaggaggaggaagaggaggaagaggaggaggaagtcctcgagtcctgcatggtcggtgtggctagggatagcgttaaacgcaagggagacttatcactgaggccagaagatggagtctgggccctacgcctgagctcttccgggatttgggccaatacctcgcccgaagccgaactgttcccagctttaaggccccgccgtgtgggcattgcgctcgactacgaaggaggtactgttacctttacgaacgcagaaagccaggaactgatatatactttcacggctaccttcactcggcgtctggtaccctttctatggctcaaatggcccgggacacgactcctcctccggccttag

SEQ ID NO: 16700 - DNA, 474 bp, synthetic construct
  source 1..474: mol_type = other DNA; note = Synthetic coding sequence
atggccacttccgccccccttcggagcctcgaggaggaagtgacttgctccatatgcctggactatctcagagatcccgtcacgattgattgcggccatgtcttttgtcggtcatgtactactgatgttaggcccatctcagggtcccgccccgtgtgccccctgtgcaagaaaccttttaagaaggagaatattcgccccgtgtggcaactagcatccctcgtagagaatatcgaacgactcaaagtcgacaagggaagacagccaggggaagtgactcgcgagcaacaggatgccaagctctgtgagcgccaccgtgagaagctacactactactgcgaggacgatggaaagctcttatgcgtgatgtgcagggagagtagagagcatcgaccgcacactgcagtattgatggagaaagctgcacagccacacagagagaaaattctcaatcacttatccacattaaggtag

SEQ ID NO: 16701 - DNA, 2553 bp, synthetic construct
  source 1..2553: mol_type = other DNA; note = Synthetic coding sequence
atggagccagaacggaagggtctgtctctggctagctcctctgacggggacggccgggaggagaacaagttgaaacagggcatctctcaagacctggcctccagttctaggctggataggtacaagatagccagacagcttacagagaaggctattaaggaaaagaaaatcttttccatctacggtcattacccagtcgtgcgggctgccctaaggaggaaggggtgggtcgagaagaaattccactttctgcccaaggtgatcccagacgtggaggacgagggcgccagggtcaatgacgacacatgcgctaaagtcaaagaaaaccaggagatggcattggaaaagacagacaacatacacgacgtaatgtcccgactggtaaagaatgagatgccatatctgctgtggaccatcaagcgcgacatcattgactatcattctctaacctatgaccaaatgctcaaccactacgccaagaccgccagtttcaccacgaaaattggcctgtgcgtaaatatgcgatcccttccgtggtacgtacctgccaaccctgactcctttttccccaggtgttattccctatgtactgaatccgaacagcaggaattcctggaggatttcagacgaacaatggctagttctattcttaagtgggtggtatcccaccagtcctgctccagaagctcaagatcgaagcctcgtgaccagagggaagaagccggctcttccgatctcagttcaagacaggatgccgagaacgccgaggccaagctacgcggccttccgggccaactggtcgatattgcttgcaaggtgtgtcaagcttatctcggtcagttagagcatgaggatatagataccagcgcagacgccgtcgaagacctaaccgaggctgagtgggaggaccttacgcaacagtattactcactggtgcacggggacgcctttataagcaattcccgcaattatttcagccagtgccaggccttgctgaaccgcatcacatcagtcaatcctcagactgatatcgacgggctcaggaacatctggattatcaaacctgccgcaaagtcacgaggaagagacattgtgtgtatggatagggttgaggaaattctcgagctggcagccgccgatcatccactgtcccgggacaacaaatgggtggttcagaagtacatagagacacctctcctcatctgtgatacaaagttcgacattcggcaatggttcctcgtaaccgactggaaccccttgaccatttggttctataaggaatcttacctgagattttctactcaaagattctctttagacaaacttgacagcgccatccacttatgcaataacgcagtccaaaaatacttgaagaatgatgttgggcggtcccctttactgcccgctcataatatgtggacctccacaagattccaggaatatctccagaggcaaggccgaggtgccgtatggggatccgttatctacccctctatgaaaaaggctatcgcacatgctatgaaggtagcacaggatcacgtggagcctcgtaaaaacagctttgaattgtacggcgcggactttgtgctaggaagagacttcagaccgtggctgatagaaatcaattccagcccgaccatgcatccgtctacaccagtcacagcgcagctgtgtgcccaggtgcaggaagatactattaaggtggccgtcgatagaagctgcgacatcggcaacttcgaacttctctggaggcagcccgtggtcgagcctccgcctttcagcggtagcgatctgtgcgtagccggcgtctccgtgaggcgagctcgacggcaggtgctgccggtctgcaaccttaaggccagcgctagcttactcgacgcacagccactgaaggcgcggggacctagcgccatgcctgaccctgcacagggcccacccagccctgccctacaaagggatctcggactcaaagaggaaaagggcctgcctctggcgctcctcgcacccctgagaggagccgccgagagcggcggggctgctcagcctacccggacgaaagccgccggcaaggtcgagctcccagcatgtccctgtaggcacgttgactctcaggccccgaataccggagtgccagtagctcagcctgctaaaagctgggaccctaatcagcttaatgcccaccctctggagcccgttctgcgggggctgaagactgccgagggcgccctgagaccacctccggggggaaaaggggaaggtacagtatgcagccgactgccgcaccacgggcaccacgtcgccgcatgccaaactacggggactacctgggatgggggccctggcgtctgttttctgcgccaactcctggcatctgagctccccatggggccgggattgccacgagaccctagggcccctccctgtctggtctgtcggggtctgctgccccctgctggtccttgcaaacgctgccggtctttctgcgcagctgttctccagggagcctcatttgtgcgtctaggaggcagaagctgttcaccaaggacaccttag

SEQ ID NO: 16702 - DNA, 2739 bp, synthetic construct
  source 1..2739: mol_type = other DNA; note = Synthetic coding sequence
atgaaacggggcattcgacgggatcccttccgcaagagaaagctgggaggtagggcaaagaaggtccgggagcctaccgccgtcaactccttttacagagaggcctccctcccaagcgtatgggcctccttgaggcgtagagagatggttaggtccggcgccaggcctggacaggtcctgagttcaggccgtcacaccggaccagccaagctgactaacggcaaaaaagctacctacctgcgcaagattcccagattcaatgcagattcaggctattccatccattctgattccgaatcgcaggctgagaccgtgcatggcctggacggttgcgccagcctactgagggatattctgcgcaatgaggatagcgcctcctctgacaacaaaaagcaaatccccaacgaggcctccgctcgcagcgaaagggacacgtcagacctcgagcagaactggagcctgcaggaccattataggatgtatagcccaataatttaccaggccctctgtgagcacgttcagacacagatgtctttaatgaatgatctcacgtcaaagaacattcccaacggcattcccgcagtaccatgtcacgccccaagtcactccgagagtcaggccacgccacatagctcatacggactgtgtacatctaccccggtatggagcctgcagagacctccttgtccacctaaggtgcactctgaagtgcaaacagatggtaacagccaattcgctagtcaggggaagactgtatcggcgacctgcacagacgtgctgaggaacagctttaacacatctccaggtgttccttgttccctgccaaagactgacatcagcgcaatccccacactacagcagctgggcctggtaaacggcattctcccacagcaaggcatccacaaggagaccgatctactcaagtgtatacaaacttacctctcgctttttcgctcgcacgggaaggaaacgcatctggatagtcagacacatcgcagtcccactcagtctcagccagccttcctggccacaaacgaggagaagtgcgctcgggaacaaatacgcgaggccacaagtgagaggaaggacctcaacatccatgtaagggacaccaagacagtgaaagatgttcaaaaagccaaaaacgtgaacaaaactgccgaaaaggtaagaatcattaaataccttttgggagaactaaaagcattggttgccgagcaggaagattcagagatccaacgactcatcacggagatggaggcctgtatctcagtgctccccacggtgtctggtaatactgatattcaggtggaaatagcattggctatgcagccgctgcgcagtgaaaacgcacagctgcgccggcaactgaggatcctgaaccaacaattacgggagcagcaaaaaacccaaaagccttccggagctgtcgattgcaacctggaactcttttcgctacagtcactcaatatgagccttcagaaccagttagaggagtccctgaaaagtcaggagctccttcaatccaaaaacgaggaactgctaaaagtcatcgaaaaccaaaaggatgagaacaaaaaattctcctcgattttcaaggataaagaccagaccattctggagaataagcagcaatatgatatcgagatcacccgcatcaagattgaactggaggaggctctcgtgaatgtgaaaagttcacagtttaaactcgagactgctgaaaaggagaaccagatcctaggaattaccctgcgccagcgggatgctgaggtgacgcgtctccgggaactgaccaggaccctgcagacaagcatggcgaagctgctgagcgacctgagtgtcgacagtgctaggtgtaaaccaggcaacaatctgaccaagagcctccttaacatccatgacaagcagctgcagcacgatccagctcctgcccacaccagcattatgagctacctgaacaaactggagaccaattactcattcacccacagtgaaccattgtctactatcaagaacgaggagacaatcgaacctgacaaaacctatgagaatgtgctgagcagtcgcggaccgcagaactctaacactcgaggaatggaagaggcctcagcccccggtataatcagtgctctttcaaagcaggatagcgatgagggaagcgagaccatggccctgattgaagatgagcataacctggacaacacaatctacattcccttcgcccgatcaacccctgaaaagaagtcccctctctccaaacggctatcgccccagccccagattcgggctgctaccacccagctagtcagcaattcaggacttgccgtatcgggaaaggagaacaagctatgtacaccggttatatgcagcagcagtaccaaagaagctgaggatgcccccgaaaaactgtccagggcaagcgacatgaaagatacccaactgcttaagaagattaaggaagcaatcggaaaaatccctgctgcgacgaaagaacccgaggagcagaccgcttgccacggcccaagcggatgccttagtaatagcctgcaggttaagggaaatacggtgtgcgacggctccgtctttacatctgacttgatgtcggattggtccatcagctctttctctacctttacgtcgcgagatgaacaggacttccgcaatggcctggctgctctagacgccaacattgctcgcctccaaaagtctttgcggactggattgttggagaaatag

SEQ ID NO: 16703 - DNA, 528 bp, synthetic construct
  source 1..528: mol_type = other DNA; note = Synthetic coding sequence
atggagttaaccatcttcattcttcgactggcaatatacatactcacgttccccctgtatcttttgaacttcctgggcctgtggtcttggatctgcaagaagtggtttccctacttcctagtgaggttcaccgtgatctataacgagcagatggccagcaaaaaacgtgaactcttcagcaaccttcaggagtttgctggccctagcggcaaactgagcctgctggaagtcggatgcggaaccggagctaattttaaattctaccctcccggctgcagagtgctgcgtcccggaggagcattctacttcatggagcatgtcgcagccgagtgtagcacttggaactatttttggcagcaggtcctggaccctgcttggcatctgttgtttgatggttgtaacctgacaagagagtcctggaaggccctggaacgggcctcgtttagcaaattgaaacttcagcatatacaggctcccctctcctgggagctggttcgaccccacatctatggttacgccgtgaaatag

SEQ ID NO: 16704 - DNA, 1392 bp, synthetic construct
  source 1..1392: mol_type = other DNA; note = Synthetic coding sequence
atgagtggtggtactccgtacatcggaagtaagatttctttaatctcaaaggccgagatccgatacgaaggaatcctgtacaccattgacacagaaaacagcacggtggccctagctaaggtgcggagcttcggcacagaggaccgccctaccgaccgccctattcccccacgcgatgaggtgtttgagtacatcatcttccgcggctccgacatcaaagacctaaccgtttgtgagcccccaaaaccacagtgttcactacctcaggaccccgcaattgtgcaatcatctctcggctcctctacctccagctttcagagcatgggcagctatggtccatttggccggatgccaacatattcacagtttagcccttcatctctcgtcggacagcagttcggcgcagtgggcgttgccggcagttctttgacgtctttcgggactgaaacaagtaacagcggaaccctgccacaatctagcgcggtgggttcagcttttacgcaggacacccggtccttgaagacccagctttctcaggggcgcagtagtcctcagttggaccccctacgcaagtctcccactatggaacaagccgtgcaaactgcatccgcccatctgcccgcgcccgccgccgtcggacgccgctctcctgtcagcacccgacccctccctagtgcttcgcaaaaagccggcgagaaccaggaacacaggcgcgccgaagtccataaggttagtcggcctgaaaacgagcagctgcgcaatgataacaagagacaggtggctcccggcgccccctccgctccgcggagagggcggggaggacaccggggaggccgtggcaggttcggaattagaagggatggtcctatgaagtttgaaaaagacttcgacttcgagagcgccaatgcacaattcaacaaagaagagattgaccgggaattccacaataaattaaaactgaaggaggacaaactcgaaaaacaggaaaaacccgttaacggcgaagacaagggcgattcgggcgtggacacccaaaacagcgagggaaatgcggacgaagaagacccactgggacctaattgctattatgacaagacaaaaagtttcttcgacaacatctcctgtgacgataaccgcgagcgcagacctacctgggccgaggagcgccgcctgaacgccgaaacttttgggatccctctccgcccaaacaggggccgcggcggatatagaggcaggggcggcctcggctttcggggaggtagaggccgtggaggcggtcggggcgggacattcaccgcacctaggggttttagaggtggctttagaggcggccgagggggacgagagtttgctgatttcgagtaccgtaaaacaaccgcctttggaccatag

SEQ ID NO: 16705 - DNA, 2790 bp, synthetic construct
  source 1..2790: mol_type = other DNA; note = Synthetic coding sequence
atggccgaagtggaggccgttcaactgaaagaggaaggaaatcgccatttccagctgcaggactataaggctgctaccaatagctattcgcaagcactcaaactgacgaaagacaaggcgttgctggcaactctttacaggaatcgtgccgcctgcgggcttaaaaccgaaagctacgtccaggccgccagcgacgcctcgagagctatagatatcaacagtagcgatatcaaggcactataccgaagatgccaggcactcgaacacttaggcaagcttgaccaagctttcaaggacgttcaaagatgcgcaaccctggagcctcgaaaccagaacttccaggaaatgctccgtaggctgaacacaagcattcaggagaaacttagagttcagttttctactgacagtcgagtgcagaagatgtttgaaatactgctggatgagaatagcgaagccgataagcgagagaaggccgcaaataacctcatcgtactggggcgggaggaggcaggggccgagaagatcttccagaataacggagtggccctgcttctacaactgttggacaccaagaaacccgaattggttctcgctgccgtaagaacccttagcggcatgtgctccggccatcaggctagagctaccgtcattttacatgccgtcaggatcgacaggatctgcagcttgatggccgtggaaaacgaagagatgagccttgccgtatgtaacctgttgcaggcaatcatcgattcactgagcggcgaagacaaacgggagcatagggggaaggaggaggctctggtccttgatacaaaaaaggatttgaagcagataaccagccacttgttggatatgttggtatccaagaaggtgtctggacaaggcagagaccaggcactcaatctacttaataaaaatgtcccgaggaaagatctagctatccatgataattctcgcacaatctatgtggttgacaacggcttgagaaagatcctgaaagtggtgggtcaggttccagatctgccgtcttgtttgccgctcacagacaatacaaggatgctcgcttccattctcattaacaagttatacgatgatctaaggtgcgatcctgagagggaccattttcggaagatctgcgaggaatacatcacaggcaaattcgaccctcaagatatggataagaacctgaatgctattcagacagtttccggcatccttcagggaccctttgacctggggaaccagttactgggcttgaaaggagtaatggagatgatggtggccctgtgcgggagcgagagggaaaccgaccagctcgtcgctgtggaagcgcttatccacgctagcaccaaactttctagggctaccttcatcattacaaacggagtcagcctgctgaaacagatctacaaaacaacaaaaaacgagaaaatcaaaatcagaactctggtaggcctctgtaaactgggctcggcagggggaactgactacggcttaaggcagtttgcagagggatcaaccgagaaacttgctaagcagtgtaggaagtggctgtgcaacatgagcatcgatacacgcacccgcagatgggcggtggaaggcctggcctacctcacattagacgccgacgtcaaagacgattttgtgcaggatgtcccagcactgcaggccatgtttgagttggcgaaaacctccgacaagacaatcttatattccgtcgcaacaacactggtcaactgtactaattcatacgatgtgaaagaagtaattcccgagctcgttcaactggccaagttctctaaacagcatgtccctgaggagcaccctaaagataagaaagactttatcgatatgagggtaaaacgcctactgaaagcgggagtgatttccgctctggcttgtatggtgaaggcagatagtgctatactcactgatcagacgaaggagctgctggccagggttttcttagcgttgtgcgataatccaaaggacagaggaaccatcgtcgcacaaggtggtgggaaggcgctgattcctttggcattggaaggaaccgacgtcggtaaagtaaaagcagctcacgcactggccaagatagccgctgtgtctaatcccgatattgccttccctggggagcgggtatacgaggtcgtgaggcctctggtgcggctcctggatacacagcgggatggattgcagaactacgaagctttgctgggactgaccaacctcagcggtagatctgataaactcagacagaaaattttcaaggagcgagctcttcctgatatcgagaattatatgttcgagaaccatgatcagctgcggcaagcagccactgagtgcatgtgtaacatggttctccataaggaagtccaggaaaggttcctcgctgatggaaacgaccgccttaagctcgtggtccttctatgtggggaggatgatgataaggtgcagaacgcagcggccggagccctcgccatgctgaccgccgctcacaagaagctgtgcctgaaaatgacccaggtgaccacacagtggctggagattttgcagcgcctgtgcctgcacgatcagttgtcagtgcagcatcggggactggtaatcgcctataatctgttggcagccgacgcagaattggccaaaaaacttgtagagagcgagctgctggaaatccttacggtggtgggaaagcaggagcctgatgaaaagaaggccgaggtagttcagacagcaagggagtgtcttatcaaatgtatggattatgggtttattaaacctgtgtcgtag

SEQ ID NO: 16706 - DNA, 246 bp, synthetic construct
  source 1..246: mol_type = other DNA; note = Synthetic coding sequence
atgtcccactatggctcatattatggtggactgggttattcttgtggtgggtttggcggcctcggttacgggtatggctgcgggtgcggttctttctgtcggcgcggatccgggtgcgggtatgggggatacggctacggatctggattcggcggatacggatacgggtcagggtttggaggctacgggtacggatgttgcagaccctcatataacggcggctatggcttcagtggtttttactag

SEQ ID NO: 16707 - DNA, 150 bp, synthetic construct
  source 1..150: mol_type = other DNA; note = Synthetic coding sequence
atggaggtgccaagattagatcatgctttgaacagcccaacctcaccatgtgaagaggtcatcaagaatctttcattggaggcaatccaactatgcgatagagatgtagtttttgaggagctgacgagtaagcagactcggaaaggctag

SEQ ID NO: 16708 - DNA, 498 bp, synthetic construct
  source 1..498: mol_type = other DNA; note = Synthetic coding sequence
atgagccgatacctgcggccgccaaatacatcattattcgtccggaatgtcgctgacgacacacggagcgaagacctcaggagagagttcggacggtacggacctattgtggatgtctatgtcccgctcgacttctacacccgccgcccgcgcgggtttgcatacgtgcagtttgaggacgtgcgcgatgcggaggacgctctgcataacctggacagaaagtggatatgcggccgtcagattgagattcagttcgcccagggtgacaggaagacgcctaaccagatgaaagctaaggaaggtaggaacgtctactcttctagccgttacgatgactatgacaggtaccgccgaagtagaagtaggtcatacgagaggagaaggtcccgtagcaggagttttgattataactatagaaggagttactccccacgaaaaccaaactgcagctggaatacccagtattcctctgcctactacacaagccgcaaaatctag

SEQ ID NO: 16709 - DNA, 1803 bp, synthetic construct
  source 1..1803: mol_type = other DNA; note = Synthetic coding sequence
atggcatcgaaccataaaagctccgcggccaggcctgtctctaggggcggagtgggcttgaccggtcgcccaccctctggcatacgtcccttgagtggtaatatcagagtagctacagccatgccccctgggacggctcggcccgggtctagggggtgcccaattggcactggaggggttttaagttcacaaatcaaagtcgctcaccgcccagtgacacagcagggcttgaccggtatgaagacaggcaccaaagggcctcagagacaaattctggacaaatcatactacctcggtctccttagatctaaaatctcagaactgaccacagaggtgaacaagttgcagaaaggaatcgagatgtacaaccaggaaaatagcgtgtatctttcctatgaaaaacgtgctgagacccttgctgtagagataaaagaactgcaaggacagctggccgattacaacatgcttgtggataaactgaacaccaacactgagatggaggaggtgatgaacgactacaacatgctgaaagctcagaatgatagggagactcagtctcttgacgtgatctttaccgagaggcaggcaaaggaaaagcaaatcagatctgtggaggaagaaattgaacaggagaaacaagctactgacgacataattaagaacatgtctttcgaaaaccaagtcaaatatctggaaatgaagacaaccaatgagaagctcctgcaggagctggacacgctacaacagcagctcgacagccagaatatgaagaaggagtcactagaggctgaaattgcacatagccaggttaagcaggaggcagttttgttacatgaaaagctgtacgaactcgagagccatagggaccagatgattgctgaggataaaagtattggctcccccatggaagaacgcgaaaagttgttaaagcagattaaagatgataaccaagaaatcgcctctatggaaaggcagctgaccgacacaaaggaaaagatcaaccagtttatcgaggaaattagacagctggatatggatttggaggagcatcaaggtgagatgaatcagaagtacaaagaactgaagaagcgggaggaacatatggacactttcatcgaaacatttgaagaaacaaaaaatcaggagctgaaacggaaagcccagattgaggccaacatcgtggctctgctcgaacactgctctcgaaacatcaatcggattgaacagatttcttcaatcaccaaccaggaactgaagatgatgcaggatgacctcaattttaagagcacagaggtgcagaaatcacagagcacagcacagaatctgactagtgacatacagcgccttcagctggatctgcagaaaatggaactgcttgagagcaagatgactgaggaacagcatagtctgaaaagcaagataaaacagatgacgaccgatctcgagatctataatgacttgccggccttaaagtcatccggcgaagaaaaaatcaagaagctgcaccaggagagaatgatactgagcacacaccgtaacgccttcaagaaaatcatggagaagcagaatatcgagtatgaggccctgaagacacagctccaagagaatgagacacacagccaacttactaacctggaacgcaaatggcaacacctcgagcagaataattttgccatgaaggaatttattgccaccaaaagtcaagaatccgattaccagcccattaagaaaaatgttaccaaacagatcgcagagtataacaaaacaatcgttgacgctttgcactccacgtcgggcaattag

SEQ ID NO: 16710 - DNA, 465 bp, synthetic construct
  source 1..465: mol_type = other DNA; note = Synthetic coding sequence
atggtatcctcggcccagatgggtttcaaccttcaggccctcttagaacagctgtctcaggatgaactgtcaaaatttaagtatctgattacaaccttctctcttgctcatgagttgcagaagatccctcacaaggaggttgacaaagctgacggcaaacagctggtggagattctgaccacccactgcgattcatactgggtggaaatggcttcactgcaggttttcgagaagatgcaccggatggatttgagcgagagggccaaggatgaggtgcgagaggcggccctcaaatcatttaacaaacgaaaacccctgagtttaggcatcaccagaaaggagcggcccccacttgatgtggatgagatgctggagcgctttaagactgaggcacaggcatttacggagaccaaggggaatgttatttgtctcggcaaggaagtattcaaagggaaaaagccatag

SEQ ID NO: 16711 - DNA, 474 bp, synthetic construct
  source 1..474: mol_type = other DNA; note = Synthetic coding sequence
atggctacctccgcccccctgcgttccctcgaggaggaggtgacgtgttctatctgtttagattacctgagggacccagttactattgactgcggccacgtattttgcagaagctgtacgacagatgtccggcctataagtggatcgaggcccgtctgccctctgtgtaagaagcccttcaagaaggaaaatattcggcctgtttggcaactagcaagtcttgttgaaaatattgagaggttgaaagtggacaagggtcgccagcccggagaagtgacccgcgagcagcaagacgcgaagctgtgtgaacgacatcgagaaaagctgcattactattgcgaggatgacgggaagctgctctgtgtcatgtgcagggaatcacgggagcatcggccacatactgcagtgctcatggaaaaagccgcccagccacatagagagaagatcttgaatcatcttagtactctcaggtag

SEQ ID NO: 16712 - DNA, 348 bp, synthetic construct
  source 1..348: mol_type = other DNA; note = Synthetic coding sequence
atgccacatctccccctcgcttccttccgtccacccttctgggggctgcggcactcgcgaggcttgcccagattccatagcgtctccacccagagcgagccccacggctcccctatttctcggaggaaccgggaagctaaacagaaacgcctgcgcgagaaacaggcgactctcgaggcagaaattgccggcgaatcaaaatcaccagccgaatccattaaggcttggagacccaaagagcttgtactgtatgagatacccaccaagccaggagagaaaaaggacgtatccggcccacttcccccagcatatagtcctagatatgtggaagctgcttggtacccctag

SEQ ID NO: 16713 - DNA, 432 bp, synthetic construct
  source 1..432: mol_type = other DNA; note = Synthetic coding sequence
gtgagagagttagaggccgagctcgatgcagagcagaagaagcatgctgaggccttgaaaggggtgcggaagcacgaaaggcgtgtgaaggagctcgcttatcaggtgggagaccgcgtatccttaggctctgggcccggagccgggccagcccaggcttctcctgaatcccccttgcctgcacaggctgaagaagatcgcaagaacctggccaggatgcaggatctagtggataaactgcaatctaaagtcaaaagctacaagagacagttcgaagaggcagaacaacaggccaataccaaccttgctaaataccgaaaggcccagcatgagctggacgatgcagaggaaagagccgatatggctgagacccaggcaaacaagttgagggcacggacgcgggatgctctgggtccaaagcataaagaatag

SEQ ID NO: 16714 - DNA, 828 bp, synthetic construct
  source 1..828: mol_type = other DNA; note = Synthetic coding sequence
atgagcacaattgggtcattcgaggggttccaggcggtgtctcttaaacaggaaggggacgaccagccaagtgagactgatcacctcagcatggaagaggaggatccaatgccccgccaaatctcacggcagtcctcagtcactgagtctactctgtatcccaacccgtaccatcagccttatataagccgtaagtattttgccacacgacccggcgcgattgagactgctatggaggatctgaagggccatgtcgcagaaactagcggagagacgatccagggcttctggttgctgaccaagatcgaccactggaataacgaaaaagaacggatcttgctggtgacggataagacgttgcttatctgtaagtatgatttcataatgctgtcttgcgtgcagctgcaaagaatccctctttcagccgtttaccgaatctgcttgggtaaatttactttccctggcatgagcctggacaaaaggcagggtgagggtttgaggatttactggggaagcccggaagaacaaagtctgctgtcacgctggaatccctggagcacagaggttccttacgccacttttacagaacaccccatgaagtacacctctgagaagttcctggagatctgtaagcttagcggcttcatgagtaaactggtaccagccattcaaaacgcccataaaaactcaacgggaagcggaagaggcaagaaactgatggtgctgactgagcctatcctgattgaaacctacactggactaatgtctttcatcggcaacagaaacaaactcggctattcactcgccagggggtcgataggcttttag

SEQ ID NO: 16715 - DNA, 339 bp, synthetic construct
  source 1..339: mol_type = other DNA; note = Synthetic coding sequence
tagtgcgcccgcaccgccggcggatgcctcgggtgcctgtccggtcagtgctgttgtaggctgtgcccattgactttacccgccacacgctctttgtgcccagggagggtagtctgggccagaagaagatggtggccctcctggctggcctggcgttgtttgtggtgcacaacgaggccaccggcgtgtatggaaaatactgatgccttcctgttcttatttagctttactgaccgagcctccttcgaagatctgccaggacaactggctcggatcgccggcgaggctcctggtgtcgtccggatggtgatcggatccaagttcgaccagtatatgtag

SEQ ID NO: 16716 - DNA, 3330 bp, synthetic construct
  source 1..3330: mol_type = other DNA; note = Synthetic coding sequence
atgggcaccggtgattttatatgcatatctatgaccggcggtgccccctggggctttcgactgcagggaggcaaagaacagaaacagccactgcaggttgctaaaatccggaaccagtccaaagctagcggctctggactctgcgagggtgacgaagtagtgtccatcaatggaaatccctgtgccgacctgacataccccgaggtgataaagttgatggagagcatcacagactcactgcagatgttgattaagcgtccctcttctgggataagcgaagccttgatctccgagaacgaaaacaagaacttggagcatctgacccatggaggatatgtcgaaagtactactctgcagattagacccgccaccaagacccagtgtaccgagttttttctcgccccggtaaagaccgaagtgcctctggccgaaaaccagagaagcggtccagactgcgccggctccctcaaggaggaaacaggcccaagttaccagcgcgcccctcagatgccagacagccagcggggacgcgtagccgaagagctcatattacgggagaaagtggaggccgtgcaaccaggtccagtcgtggaattgcagctgtcactttcccaggaacgccataaaggagcctccggtcctctcgtggccctacctggtgccgaaaaatcgaaatcacctgaccctgaccctaatttgagccacgatcggatcgtgcatataaacagcattccaactaatgagaaggcagatccctttctgcggtccagcaagatcatccagatctcatcgggacgggaactcagggtgatacaggaatcagaggcgggagacgccggattaccccgagtagaagtcatccttgattgcagtgatcggcagaaaactgagggctgtaggctccaggctggtaaagaatgcgtggacagccctgtagaagggggacagtctgaggcgccgcccagcctcgtctcctttgcggtgtccagcgaaggcaccgaacagggcgaggacccacggtccgagaaagaccatagcagacctcacaaacatcgtgcgagacatgcccgcctgaggaggtctgagagtctgtctgaaaagcaagtgaaggaggcaaaatccaaatgcaaaagcatcgctctgcttctgacagatgcccccaacccgaatagtaagggcgtgctgatgtttaaaaaacggcgtcggcgggctcgtaagtatactcttgtctcttacggaaccggcgagctcgaaagagaagctgacgaggaagaggaaggcgacaaggaggatacttgtgaggtggcattcttgggggcaagtgaaagtgaagttgacgaggagctcctctcagatgtggatgacaacactcaggtggtgaattttgattgggacagcggtttggtggatattgaaaagaagctgaacagaggagataaaatggagatgcttcctgataccactggtaagggggcactgatgtttgcaaagcgtcgagagagaatggaccaaatcacggcgcagaaggaagaggacaaagtcggaggtacacctagccgcgaacaagacgccgctcaaacagacgggcttcgaacgacaacaagctaccagaggaaggaagaggagagcgtgagaactcagtcgtccgtaagtaagtcttacattgaggtgtcccacgggttggggcacgttccacaacaaaacggttttagtggcacaagtgagacagctaacatccagcggatggtccctatgaaccgaactgcgaagcccttccccgggtccgttaatcagcctgctacacctttttcccccacccgaaatatgacatccccaattgctgactttccggctccaccgccctacagtgccgtcaccccaccccccgatgcattttcccgcggcgtgtccagtcccattgcagggcccgcacagccgccaccgtggccacaaccagctccatggagccagcccgcattctacgacagctcagaacgcatagccagcagagacgagcgcatctccgtgccagcaaagcgtaccggtatacttcaggaggctaagcggagaagtaccactaagcccatgtttactttcaaggaacccaaggtaagcccaaaccctgaattactaagcctgctgcagaactccgaaggaaagagagggacaggcgccggcggcgatagcggcccagaggaagattatttgtcactgggcgctgaggcgtgtaacttcatgcagagctcgtctgccaagcagaagactccacctccagtggctcctaaacccgctgttaaatcatcgtcatctcaacctgttactccagtgagccccgtgtggagccctggggtcgcacccacccaacccccagccttccccacatctaacccaagcaaaggaaccgtcgtgagcagcataaagattgcccagccctcatatccccccgctagacctgcctccactctgaatgtggccgggccatttaagggcccgcaggcagccgttgcttctcagaattatacacctaaacccacagtcagtactcctaccgtaaatgccgtccagcctggggccgtgggaccttccaacgagcttcccggaatgagcggccggggggcacagctttttgccaagagacaaagtcgcatggagaagtatgtggttgactcagatacagtacaggcccatgccgccagagcccagagtcctactcctagtcttcctgcctcctggaagtacagctccaatgtgagggccccgcccccagtcgcctacaatcccatccatagcccatcatatcctcttgcagccctaaaaagccagccatccgctgctcagccaagcaaaatggggaaaaaaaagggcaagaagccgctgaacgcattggacgtaatgaaacatcagccataccagctgaacgctagtctcttcaccttccaaccccccgatgccaaggacggcctcccgcagaagagcagcgtaaaagtgaacagtgcattggccatgaagcaggccctgcctcctcgtccggtcaatgctgcgagccctactaacgtgcaggcctctagcgtttacagcgtgcctgcctacacctcgccaccatccttctttgcagaggctagctcccctgtgtctgccagtccggtgcccgtcgggatccccacaagccccaagcaggagtccgcgagctcatcttattttgtggccccccgtccgaaattttccgcaaaaaagtcaggtgtgaccatacaagtcaaatgcaaatcgggaattcactctcaggatatcatcagaacatacttccccgcttacctcagctcaagcacttag

SEQ ID NO: 16717 - DNA, 1554 bp, synthetic construct
  source 1..1554: mol_type = other DNA; note = Synthetic coding sequence
atggaaaccgaccttaactcccaggataggaaggatctggacaagtttataaaattctttgcgctcaagaccgtgcaagtgatcgtgcaggcccgcctaggcgagaagatctgcacacgcagttcatcaagtcccacaggcagcgattggtttaatctggcaatcaaggatattcccgaggttacccacgaggcaaaaaaggctctagctgggcaactcccagcggtggggcgatcaatgtgcgttgaaataagtttgaagacctctgagggcgacagtatggaactcgagatttggtgcctggaaatgaacgagaagtgcgacaaggaaatcaaagtctcatacactgtctataaccgattgagtctgcttctcaaatcactgttagcaattaccagggtgacgccagcctataggctttccaggaagcagggacacgaatatgtcatactctaccgtatttactttggagaggtgcagctcagcggtttaggcgaaggctttcagaccgtgagggtgggcaccgtgggcactccagtaggaaccattacactctcctgtgcttaccgcattaacttggccttcatgtcaactagacagtttgaacgtactccccccatcatgggtattattatcgatcacttcgttgaccgcccttaccctagtagcagccccatgcacccctgcaattatagaacggcgggcgaggacacaggcgttatttaccctagtgtggaggattcacaggaggtatgcacaacgagcttcagtactagtccgccctctcagctatcttcaagtagattgtcctatcaacctgctgccctcggtgtgggaagtgcagatctagcataccccgtagtgttcgcagccggactcaatgcaacccatccccaccagctgatggttcccggtaaggagggtggggttcccctcgctccaaaccagccagtacatggcactcaggccgaccaagagcggttggccacatgtaccccatctgatcgcacccactgcgctgcaacacctagtagtagcgaggatacagagactgtttccaactcgtcggagggcagagcctctccccacgacgttctggagacaatattcgtgaggaaagttggggcatttgtgaacaaacctatcaatcaagtgacattaacctcactagacatcccgtttgcaatgtttgctcccaagaatctggagctggaggacactgatcctatggttaatcctcccgactctccagagacggagtcgccgcttcagggctcattgcacagcgacggcagcagtggaggctcctcagggaatacgcacgacgacttcgttatgatcgattttaaacctgctttcagcaaagacgacatcctgcccatggacctaggaacattctaccgtgagttccaaaatccaccacagctttccagccttagtattgatataggcgctcaatcaatggccgaggatctagactcactgccagagaagctcgctgttcacgagaagaacgtccgcgaattcgatgccttcgtcgaaacgctgcagtag

SEQ ID NO: 16718 - DNA, 348 bp, synthetic construct
  source 1..348: mol_type = other DNA; note = Synthetic coding sequence
atgccacacctgccgctcgcctctttccggccaccgttctgggggctccgtcattccaggggactgccaagattccactccgttagcactcagtcagaaccacacggttcacccatctctagaaggaatagggaagcgaaacagaaaaggctgcgggaaaagcaggccaccctggaggccgagatcgccggggagtctaagtccccggccgagtctataaaggcctggcggccaaaggaactggtgctgtatgagatcccaaccaagccaggggagaagaaagacgtgtcaggtccacttcctcccgcctattccccaagatacgtcgaagcggcatggtacccttag

SEQ ID NO: 16719 - DNA, 1014 bp, synthetic construct
  source 1..1014: mol_type = other DNA; note = Synthetic coding sequence
atggaattgaagaccctgtgggaaaacaaacttatgcagtccagggcagttgatggctttcactccgaagagcagcagctgctgcttcaggtgcagcagcagcaccagccccagcagcagcagcatcatcatcatcaccaccaccagcaagcccagcctcagcagaccgttccccagcaggctcagacgcaacaggtcctgatcccggctagtcagcaggcaaccgcccctcaggtgatcgtaccagactctaaactcattcaacacatgaacgctagcaacatgagtgcagccgcaacagcagccactctcgcgcttccggccggggttacgcccgtccagcaaatcctcacaaactccggtcagcttctgcaagtcgttcgggcagccaatggagcccaatacatcttccagcctcagcagtccgttgtgctccagcagcaagtcattcctcagatgcagccagggggcgtccaggcacctgttatccaacaggtgttagctccgttacccggaggtatttcaccccagaccggggtgataatccagcctcaacagattcttttcactggaaacaagacccaggtgattccgaccaccgtcgcagccccaacccccgcccaggcacagatcacagcgacaggccaacagcaaccacaggcacagcccgctcaaacccaggcccctctggtccttcaggtcgatgggacgggagacaccagctccgaggaggacgaagacgaggaagaggactatgatgatgacgaggaggaagacaaggagaaagacggggcagaggatggccaggtagaggaagaacccctgaacagcgaggatgacgtttctgatgaagagggacaggaattgtttgatactgaaaacgtcgtcgtctgtcaatacgacaaaatccaccggtccaaaaacaaatggaaattccatctgaaggacgggataatgaatctgaatgggcgcgattacattttcagcaaggcaatcggcgatgccgaatggtag

SEQ ID NO: 16720 - DNA, 3012 bp, synthetic construct
  source 1..3012: mol_type = other DNA; note = Synthetic coding sequence
atgtctcagtggacgcctgagtacaatgagttgtatacccttaaggttgacatgaaaagcgaaatcccatcggacgctccaaagacccaggagagcttgaagggaattcttcttcaccccgagcctataggcgctgcaaagagcttcccagctggtgtggaaatgatcaatagcaaagtgggtaatgagttcagtcacctctgtgacgattcgcagaaacaggagaaagaaatgaacggaaaccagcaggagcaagagaagtccctggtcgtgaggaagaagaggaagagccaacaggctggcccctcttatgtgcagaattgcgttaaagagaaccaagggattctgggactgagacaacacttagggacaccttctgacgaagataacgactcgtctttctctgactgtctgagtagccccagctctagcctgcatttcggggattctgataccgtaacctcagacgaggacaaggaagtgtcagtaaggcactctcagacaatccttaacgcaaagtcacgatcgcacagtgccagatctcataaatggcccagaacagagactgaaagcgtgtctggactcttaatgaagcgcccatgcttgcacgggtccagcctgagacgattgccttgccggaaaaggtttgtgaaaaataattcttcacagcggactcagaagcagaaggaaagaattctgatgcagagaaaaaaacgtgaggtactagccagacgcaaatacgccctgctcccctcgtcatcttctagttccgaaaatgatctcagcagtgaatcatcctcatccagcagcaccgaaggcgaagaggacctgtttgtatcagcttctgaaaatcatcagaacaatcccgccgtcccttccggttcaatagatgaagacgtggtagtgatcgaagcaagttccaccccacaagtgacagctaatgaggagattaatgtgacatcaacagactccgaggtcgagatcgttacagtgggtgaatcctaccgcagccggagcaccttggggcattcgaggtcacactggagccaggggagttcctctcacgcctcacgcccacaggaacctcgcaatcggagccggatcagcacagtaatccagcctttgcgtcagaatgccgctgaggtcgtcgacctgacagtcgacgaagacgagccgaccgtcgtcccgactaccagcgcacgcatggaaagtcaagccacttctgcctctatcaataacagtaacccgagcaccagcgaacaggcaagtgacacggcttcggccgtgacgagtagccaacccagcacagtgagcgaaacctccgccactctgacatccaacagtaccactggaaccagcatcggcgatgattcccgacgcaccacttcatccgccgttaccgaaaccggccctcccgcgatgcccaggttaccaagctgttgtccacaacatagcccttgcggcggttcctctcagaatcaccacgctctcggccatcctcatactagttgcttccagcagcacggacatcattttcaacatcaccaccatcaccatcataccccccatcctgctgtccctgtttcaccttccttctctgaccctgcctgtcctgtcgagcgacctcctcaggtccaggccccttgcggcgccaacagcagctcggggacctcatatcatgagcagcaggcgctgcctgtggatctatcaaattcaggcatccgtagtcacggcagtggctccttccacggagcctctgcattcgacccatgctgtcccgtgagttcaagtcgggccgcaatctttgggcatcaggccgccgctgctgcaccatcccaacctttgagctcaattgatggctacggttcctcgatggtggcacagccgcaaccacaaccaccccctcagccaagtctgtcctcatgtcgccactatatgccacctccctacgcttccctcaccagacccctgcaccaccaggcttctgcttgtccccattcccacgggaaccctcctccccagacacagccgccgccgcaggtggactacgtgatcccacaccctgtgcacgcatttcatagccagatctccagccacgccacgagtcatcccgttgctcctcctccacccacacatctggcctcaacagccgcgcccatccctcaacatctgccaccaacgcaccagcccatttcccatcacatccccgccaccgcccccccggctcagaggcttcatcctcatgaggtcatgcagcggatggaagtgcagaggcgcagaatgatgcagcatcccaccggcctctttgtcttctgtgttagcagacgtgctcatgaacgacccccaccgcatccccaccggatgcaccctaactacggccacggccaccacatacatgtacctcagactatgtcctcacaccccaggcaggcacctgaacgttcggcatgggagctgggcatcgaggcgggtgtaactgctgcaacctacacacctggtgctctccacccccatctggctcactaccatgcccctccccgactccatcatctccagctgggagccttgccactgatggttcccgatatggctggctacccgcacattcgctatatctctagtggcctggatggtacttccttccgaggcccattcagaggaaatttcgaggaactgatccacctggaagagaggcttgggaatgtcaatcgtggagcgtcacagggcacgatcgaacgttgtacgtaccctcacaagtataagaaagttaccacagattggtttagccagagaaaactgcactgcaaacaggacggcgaagagggaacggaggaggacactgaggaaaagtgtacaatttgcctgagcattttggaagaaggggaggatgtgcgcagattgccgtgcatgcacttgttccatcaggtgtgcgtggaccagtggctgatcactaacaagaaatgccccatatgtagagttgacatcgaggcacagctgccctcagagtcatag

SEQ ID NO: 16721 - DNA, 3309 bp, synthetic construct
  source 1..3309: mol_type = other DNA; note = Synthetic coding sequence
atggcagagaaagaagccaggaggaaattcaaacagattgtcacagcggtgtacttttgccactgtcgcaacatcgtccaccgggacctgaaggcagagaaccttctgctagacgccaaccttaatatcaagatcgcagattttggtttttccaatctattcacccccgggcagctgctgaagacatggtgcggctcccccccttacgcggcccctgagttgttcgagggcaaggagtacgacggaccaaaggtggacatttggagcctgggagttgtgctatacgtgttggtgtgcggtgccctcccatttgatggatctaccttgcagaatctgagagcgcgtgtcctatcgggcaagtttaggatacccttttttatgagtaccgaatgtgagcacctcatccgacatatgctggtgctagatccaaataagcgcctgagcatggagcaaatctgtaagcacaagtggatgaaattgggagacgctgatcctaatttcgacaggctgatcgccgagtgtcaacaattgaaggaggagcgtcaggtcgacccactaaacgaggacgtgctgctggcgatggaggatatgggcctcgataaagagcagactcttcagtccttaagaagtgacgcatacgatcactattctgcgatctatagtctgctatgcgacagacacaagcgtcataagactctgagattgggagcgctgccaagcatgccacgggctctcgcattccaggcgccggtgaacatccaggccgaacaggcggggactgccatgaatatcagtgtgccccaagtacagctgatcaatccagagaatcagatcgtggagccggacggcacattgaaccttgatagcgatgaaggggaggaaccctccccagaagccctggtgaggtacctcagcatgcgtcggcatactgtgggggttgccgatcccaggacagaggtgatggaagacctgcagaaactgctacccggcttcccaggcgtaaacccgcaggcgccctttctgcaggttgcaccgaacgtcaatttcatgcataatctgctacctatgcaaaatctgcagcctacaggacagctcgagtataaagagcagtccctcctgcagccacccactctgcagctcttaaatggcatgggtcctctggggaggcgggccagtgatgggggtgctaacatccagctgcacgcccagcagttgctcaagcgtccccgcggaccgtcccccctggttaccatgacccctgcggtacctgcagtgacacctgttgacgaggaatcatccgacggggagcccgatcaggaggcagtccagtctagcacttacaaggattcaaacaccctgcatctgcctacggagagatttagcccagtgagacgtttcagtgatggtgctgccagtatccaggccttcaaggctcatctcgagaagatggggaataattctagtatcaaacagctgcagcaggagtgcgaacaactccagaaaatgtacggaggtcaaattgacgagcggactctcgaaaagacccagcagcagcatatgctctaccaacaggagcaacaccaccagatcctgcagcagcagatccaggactccatctgtcccccacaacccagccctcctttacaggcggcttgcgagaatcagcccgctcttctcacacatcaactgcagagactcaggatacagcctagctcccctccgcctaatcaccccaataaccacctgtttagacagccgtctaattcaccaccccctatgagtagcgcaatgatccagccccacggcgccgcttcgtcatcccaattccaaggtctccccagccgcagcgctatttttcagcaacagccagaaaactgttcctcacctccaaatgtcgccctcacctgtctgggtatgcagcagccagctcagagtcaacaggtcactattcaggtgcaagaacctgtggacatgcttagcaatatgccaggaaccgctgccgggtcttctggcagagggatttccataagtcccagcgcgggtcagatgcagatgcagcaccggaccaacctgatggctacgctgtcgtacggacatcgtcctctgagcaagcagctgtcagccgatagtgccgaagcccattcagctcaccaacaacctcctcactacaccaccagcgctctgcagcaggcccttctctccccaacaccccctgactatacccggcaccagcaggttccccatatacttcagggcctgctttctcccaggcactccctgaccggccattctgacatcaggctgccaccaaccgaattcgcgcagctgattaaacggcaacagcagcagcggcagcagcagcagcagcagcagcagcaacaggaatatcaggagctgtttcgccacatgaatcaaggagatgctggaagcctcgctccttcactgggggggcagtccatgacagagagacaggccctctcttatcagaatgcagattcttaccatcatcacactagtcctcagcatttgctccagatccgggcccaggagtgcgtgagtcaggcctcctcacccacaccccctcatggatatgcccatcaacccgccttgatgcacagcgaatctatggaagaggactgcagctgcgagggcgcgaaagacggctttcaagactccaagtcatccagcacactcacgaaggggtgtcacgacagcccactcttgctgtcaacggggggcccgggcgacccagaatccttgttagggacagtatcccatgcacaagagctggggattcatccttacgggcaccagcctacagccgcattctccaaaaacaaagtgccctcccgggagcctgtgatcgggaattgcatggatcgcagttctccaggccaggccgtggagctgcccgaccacaacgggctcggttaccccgccagacccagcgtgcacgagcatcatcggcctcgagcactgcaacgccatcataccattcagaattccgacgacgcctacgtgcagctcgataatctgcccggaatgtccctggtggcaggtaaggctctatcctctgccagaatgagcgacgccgtcttgagccagagctccctgatgggttcacagcaattccaggacggtgagaacgaagaatgtggagcgagccttggagggcatgagcaccctgacttaagcgatggttctcaacacctcaactcctcctgttacccaagtacttgtatcacagacatactgctttcctataagcacccagaggtctccttcagcatggaacaggcgggagtgtag

SEQ ID NO: 16722 - DNA, 1461 bp, synthetic construct
  source 1..1461: mol_type = other DNA; note = Synthetic coding sequence
atgacactgatggtgctgacgtttagtagctatattttggactttattaacgtccttagttacgatttgcacgggagttgggaacgcttcactggccataactcgcccctcttttcattgcccgaagatcccaaaagctccgcttacgccatgaattattggaggaagttgggggctccatccgagaaactcattatgggaataccaacttacggtcggacctttagactgttaaaagcatccaagaatggattacaggcaagggccatagggcctgcttcaccaggaaaatacaccaagcaggaagggtttctcgcctactttgagatatgctcctttgtctggggagccaagaagcattggatcgactatcaatacgttccctacgctaataaaggcaaagagtgggtggggtacgataacgccatctctttcagctacaaggcatggtttattcgacgcgagcacttcggcggagctatggtgtggacattggacatggacgatgttcgtggcactttttgcggcacaggtcccttccctctcgtctatgtcctgaatgatatcctggtgagggcggagtttagtagcacctccttgcctcaattttggttgtcctctgccgttaactccagttctacggacccggaaaggctcgctgtcacaacggcctggacaacggattcaaagatcttgcctcctggcggcgaagctggcgtcaccgaaattcacgggaagtgtgaaaacatgacaatcaccccacgggggacgacagtgacgcctactaaggagaccgtgtcactcggcaagcacacggtagctctcggagaaaagactgagattacaggagcgatgactatgacctcagtcgggcatcagtccatgacgccgggagaaaaagcactgactccagttggacaccagtccgtgaccactggtcagaaaacccttacctcagtcggctaccagtccgtgacccccggcgagaagacccttactccggtagggcaccaaagcgtgactcccgtgtcccaccagagtgtgtctcctgggggcaccactatgactcccgtgcacttccaaacggagaccctcagacagaatactgtagccccacgccggaaggccgttgctcgggagaaggtcactgtcccaagccgtaacatctcagttacaccggaaggccaaaccatgccactgcgcggtgaaaacctgactagcgaggtcgggactcaccctcggatgggaaatctgggactgcagatggaggcggagaaccgcatgatgctcagcagttcccctgttatccagttaccagagcagactcccctggcatttgataaccgctttgtcccaatttacggaaaccattcttcggtgaatagcgtaacaccccagacctcgccactgtctctgaaaaaagaaattccagaaaacagtgctgtggacgaagaggcctag

SEQ ID NO: 16723 - DNA, 1017 bp, synthetic construct
  source 1..1017: mol_type = other DNA; note = Synthetic coding sequence
atggagctctggggtaggatgctgtgggcattactgagcgggcccggtcgccggggctctaccagggggtgggcattctcttcgtggcagcctcagcctccactggcggggctgagttcagccatcgagctggtttcacattggacgggcgtatttgagaagcgagggatccctgaagcacgggaatcttctgagtacattgtcgcgcacgtgcttggcgcaaagaccttccagtctctcaggccagctttgtggacacagcctctgacttcacagcaactgcaatgtatccgcgaactgtcatcaagacggctgcagcgcatgccagttcagtacatcctgggcgaatgggatttccagggtctcagccttagaatggtaccaccggtgtttatcccaaggcctgaaaccgaagaattagttgagtgggtgcttgaggaagtagcacaacgtagccatgcggtcgggagccctggttctcccctgatcctcgaggtcggctgtggttcaggcgcaataagtctgtcactgctgtctcagctgccacagtcaagggtgattgccgtcgataagcgcgaagcagctatctcactgacccatgagaacgcccagcgattgcgactgcaggaccgaatctggatcatacatttggatatgacctccgagcggagctggacgcacttgccatgggggcccatggacctgatcgtgagcaaccccccatatgtgtttcatcaagacatggaacaactggcgcctgaaattcgttcatatgaagaccccgccgctcttgacggaggggaagagggcatggacattatcactcacatcttggcactcgccccccgcttgctgaaagactccgggtcaatctttcttgaggtggatccgaggcatcccgagctggtatcaagctggctccagtcccgccctgacttgtatcttaatctcgtggcagtgagacgggacttctgcgggcgccccagattcttacatattcgcagatccggcccatag

SEQ ID NO: 16724 - DNA, 1899 bp, synthetic construct
  source 1..1899: mol_type = other DNA; note = Synthetic coding sequence
atggacaccatgatgctcaacgttaggaatctttttgaacagctggtcaggcgcgtggaaattctctcagaggggaatgaagtgcagtttatccagcttgccaaggacttcgaggatttcaggaaaaaatggcagaggaccgaccacgaactcggaaagtataaagacttgctgatgaaggctgaaaccgaacgctctgccctcgacgtgaaactcaaacacgcgagaaaccaggtggacgtcgaaataaaaaggcgacagagggcagaagccgactgcgagaagttggagaggcagatccaactcatcagggagatgctgatgtgcgatacttcaggctccatccagttgtccgaggaacagaagagcgcactggccttcctgaataggggacaaccctcatcgagcaatgccggcaataagcggctgtctaccatcgatgagtccggatccatcctcagcgacatcagctttgataagacagacgagagcctagactgggatagttcactggtgaagacgtttaaactcaaaaagagggaaaaacgccgctctactagccggcagtttgtggacggtccgccaggtcccgtcaaaaagacacgtagcatcggcagcgcagtcgatcagggcaacgagtccatcgtggcgaagacgaccgtgactgtcccaaacgacggaggcccaatcgaagcagtctctactatcgaaaccgttccctattggaccagatctcgccgcaagacaggcacactccagccgtggaatagcgactccacccttaactcccgccaacttgaaccgagaacggagacagactccgtgggaacaccccagagtaatggtggtatgcgcttacacgacttcgtgtctaagacggtgatcaaacctgagtcttgcgtcccatgtggaaaacggattaagtttggtaagctgtcactcaaatgtcgcgattgcagagtcgtgagtcatccagagtgtcgggaccgctgcccgctgccttgtatcccaaccctaattggaactccagtgaaaatcggcgagggcatgctggctgactttgtgagtcaaacctcccctatgatcccaagtattgtggtgcactgcgtcaatgaaatcgaacagagaggtctgactgaaaccggtctgtaccgaattagcggatgcgatcgcactgttaaagagctgaaagagaagttcctccgcgtgaaaactgtgcccctgttgtccaaagtcgacgatatccatgctatctgctctctgctcaaagatttcctgcggaatctcaaagaacctcttttgactttccgccttaaccgcgcatttatggaggccgccgagatcacagatgaagacaattctattgctgccatgtaccaggctgtaggtgagcttccccaggccaatcgggacacgcttgcttttctaatgatccacttgcagcgcgtggcccagtcaccccacactaaaatggatgtggctaatctcgccaaagtcttcgggccaacaattgtagcccatgctgtccctaaccctgaccccgtcaccatgctacaagacatcaagaggcagccaaaagttgtcgagcgtctgttgtctctgccactagagtactggagccaattcatgatggtcgaacaggagaatatagacccactgcacgtgatcgagaatagtaacgctttcagcacgccacaaacgcccgatatcaaggtgtctctgctggggccagttacaacccctgagcaccagctccttaagacacccagttcatcatcattgagccagcgcgtacggagtacattaaccaagaatacaccgcgcttcgggtctaaatctaagtctgcaacaaacctgggccgccaaggtaatttttttgcatcccctatgctcaagtag

SEQ ID NO: 16725 - DNA, 1791 bp, synthetic construct
  source 1..1791: mol_type = other DNA; note = Synthetic coding sequence
atgtcaaaccagcaggaaaagtacgaggcccagaatatcgtcaattctactgaagaaagcgacgacgcattcgatacagtgaccattccagttcccagcgaagaaccgcaagagagcgaccagactgaagagcatgaaagtggcatcgagcagttcagcgaaagccatgcaatacacgtcgaggagcagtcagatcagtcattttcaagtctcgagcctgacaacgagcagctcatggaagaggtgatcagcccacgacaggtaagttatacaccacaacaccatgagaagcagtacgcaatgcagcgccccaatgatgattcactggcctttcttgacaaaattaagagcgtcaaagagagcctgcaggagtccgtggaggattcgctggcgactgtaaaagttgtactcatccctgtgggccaggagattgtgatccccttcaaggtggatactatcctgaaataccttaaggaccattttagccatctgcttggcatcccccatagcgtgttgcagatacggtatagcggcaaaatcctgaagaacaatgaaactcttgtgcagcacggggtgaagccccaggaaatagtgcaagttgagatttttagcaccaaccctgatctataccccgtgaggaggattgatggactgacagacgtctcacaaatcatcactgtgacagtgcagacagggttagatcagtatcaacaggtgcctgtagaaatcgttaagtccgacttccataaaccctttctgggcggcttccggcacaaggtgacaggggtcgagtaccacaatgcagggacccagacagttcctaagcgcatcccagagagactatcaattttttgccgggacacccagacagtgtttcaaaaaaagaacctgcagcagacaactaacacaacgagtacacagatgaccaatattggcgtatacgtaagtaacatgacagataagctcgttacgccggggaaatattttagcgcagccgaatatcatgcccaaaggcttaaagccgttattgtgatacagacttattatcggcagtggcatgccaagatatttgtcgagaatctcagacgccagaagtcattgcgattagagtgggagacccaacaggagctgcggaagattcgcgaaaaggaagaatggattaaactggactatcacagacggcacaacccaaaaacaaacgaagactttgaatttctctacaatgccctcgagttctggaggcaggaggagctcacccggattaaccagtcattcaccggcgccgaaagaaaggcggctctttgcgaactcttggaaaaagaaacccagatcattgcctcaatagggcgccaccgatatattgcctatatggccaatcaggaggccgcaatccaggcgttcctggacaagtgtagcgctcccaagatctggcgaacccctaacggtaagacaatagaaatggatacgcagttcactatacgggcgagggaactgcagaatatttataagtgtattatgttgaagaacatctctcaggatgagcgcttggacgtgctcctgacccttaagcatacagtgaaagagcatgagtgcaaactcacgcaggaaatactagaacttattgaccgggaggtcgacctgatgatgagaggagtgaagcaccacaatctcgagggcctgcgtaaacgtattgcgacactgttttttcactacatcaagaccccattgtttaaccctgaggtagcaaagtacttaaagatgggcggggagtacctgagcatggccctatag

SEQ ID NO: 16726 - DNA, 1305 bp, synthetic construct
  source 1..1305: mol_type = other DNA; note = Synthetic coding sequence
atggtgcaagatggcacatttaagaccagggactccacatggacttgtgagagcactagaatggccgcagctcccccaagctactgcttcgtggcttttccacccagggctaaagacggactggtcgtgttcggaaagaactccgcccgtccgcgcgatgaggtccaagaggtggtgtatttcagtgcagccgaccacgaacccgaaagtaaagtagaatgtacttatatctcgatcgatcaggtcccgcggacctacgccattatgatcagtcggccagcgtggttatggggcgctgaaatgggggctaacgagcatggcgtctgcattgctaacgaagccatcaacacacgggagccagcagctgaaattgaagccctgttgggtatggaccttgttcgcttggggttggagcgaggcgagactgcaaaggaggcccttgacgtgatcgtgagccttctggaagaacacgggcagggtggaaattacttcgaggatgcgaactcgtgtcactcctttcaaagcgcctatcttatagtcgaccgcgatgaagcctgggtactggaaacaataggcaagtactgggccgccgagaaagttaccgaaggagtgcgctgcatttgttctcagctgtccctcaccaccaagatggacgctgaacatcctgagcttaggtcttacgcccagtcccagggttggtggactggggagggggaattcaacttcagcgaggtcttctcgcctgtggaggaccatcttgactgcggagccggaaaagactcccttgagaaacaggaagagtcaattacggtgcagacgatgatgaacaccctcagagataaagccagcggagtgtgtatcgactccgagtttttcctgacgaccgcatccggcgtcagcgtgctcccccagaatcggagctccccttgtattcattactttacgggaactcccgatccaagcaggtctatttttaagccattcatcttcgttgacgacgtgaaacttgttccgaagacccagtctccatgtttcggggatgacgacccagcaaaaaaggaacccagattccaggaaaagcctgaccggcggcacgagctgtacaaggcacatgaatgggctagggccatcatcgagtctgaccaggaacaggggcggaagcttcgaagcactatgctcgagctggaaaagcaaggactggaggctatggaagagatactgacgtcctccgagccccttgacccggcagaggtaggcgacctattctacgactgtgtcgatactgaaattaaattttttaaatag

SEQ ID NO: 16727 - DNA, 1320 bp, synthetic construct
  source 1..1320: mol_type = other DNA; note = Synthetic coding sequence
atggcttggccctgcattacgagagcctgctgtattgcccggttttggaaccagcttgacaaagctgatatcgccgtcccgctggtgttcactaagtactcagaagccactgagcaccccggcgcacctccacaaccacctccccctcagcagcaggcccagccagctttggcgcccccaagcgcaagggctgtggcaatcgaaactcagcccgcgcagggggaactagatgctgttgctagagcaaccggacccgcccctggaccaacgggggaacgggaaccagccgctggacctgggaggagcggacccgggcctggactgggatctggcagcacatccgggcctgccgatagtgtgatgagacaggattatcgggcttggaaggtgcagcgacccgagccctcatgtagaccacgctcagagtatcagccaagcgacgcgccatttgagcgtgagactcaataccaaaaagattttcgggcctggccgctgcccagacggggggaccacccctggataccaaagcccgtgcaaatctccgctgcctctcaagcaagcgctcctatcctgggtgcccctaaacgcaggcctcagtctcaggagcgctggccggtgcaggccgccgctgaggccagggaacaggaagctgctcctggcggcgcaggcggcctggctgccgggaaggcctcaggggctgacgagagggatacaaggcgcaaagctgggccagcctggatagtccggagagccgagggcctcggccacgaacagacacccttacctgcggcgcaggctcaagtgcaggccacgggcccagaggccggaagagggagagcggccgccgatgcgctaaatagacaaattcgagaggaagtcgcttccgctgtgagcagtagttatagaaatgaattccgagcctggactgatattaaacccgtgaagcctataaaggccaaaccacagtataaaccacccgatgataaaatggtacacgagacatcctactcggcccaatttaagggcgaggctagcaagcccacgacagcagacaacaaggtgattgacagacggcgcattcgttctctgtactccgaacccttcaaggagccgcccaaggtcgagaagccatcagtgcaatcatcgaagcccaagaaaaccagcgcttcccataagcccactcgcaaagctaaggacaaacaggccgtaagtggacaggctgccaaaaagaaatcggcagagggtccatctaccaccaaacctgacgacaaagagcaaagcaaggagatgaataacaaactggccgaggcgaaagaatag

SEQ ID NO: 16728 - DNA, 813 bp, synthetic construct
  source 1..813: mol_type = other DNA; note = Synthetic coding sequence
atgggaggttgtttctcgaagcctaagcccgtcgagctaaaaatcgaagtggtcttgcccgaaaaggagcgcgggaaagaagaactgagcgcaagcggaaagggatcccctcgcgcttaccaaggcaacggaaccgcaagacacttccatacagaggaacgtctgtccacccctcatccttatccctctccccaagactgcgtcgaggcggctgtgtgccacgtcaaggatctcgagaatgggcagatgcgggaggtcgagctcgggtgggggaaagtattactcgtgaaagacaacggagaattccatgcactgggccataagtgtccccattatggcgctcccttggttaagggagtgctatcccggggcagggtacgctgtccatggcacggggcatgcttcaatattagtactggagatctcgaagacttccccggcttagattctttacacaaatttcaggtgaaaatagagaaagagaaagtttacgttcgggccagcaaacaggcactgcagctccagcgacgaactaaagtgatggctaaatgtattagcccatccgctggctacagctcatctaccaacgtgctgatcgtcggagccggtgccgccggcttggtgtgtgccgagacactgcgccaggaggggtttagtgaccggatcgtgctgtgtactctggatcgccatctgccctacgacagacctaagttgagcaagtcactggatacacagcctgaacagcttgcactacggcccaaagagttttttagagcatacggaatagaggtcctcacggaggctcaggtgtag

SEQ ID NO: 16729 - DNA, 369 bp, synthetic construct
  source 1..369: mol_type = other DNA; note = Synthetic coding sequence
atggctacctctgctccacttagaagcctggaggaagaagtaacatgttccatttgtctagactatctacgagatcccgtgactatcgactgtggccatgtcttttgcaggtcctgcaccaccgacgtgaggcctatcagtgggagtcggccagtgtgccccctctgtaagaaaccatttaagaaagaaaatatccggccagtgtggcagttagcgtcgctcgttgaaaatatagagcggttgaaagtggacaagggaaggcagcctggcgaagtcacacgggagcaacaggatgctaagctgtgtgagcggcatcgagaaaagctccactattattgcgaggacgatgggaagttgctgtgcgtgtag

SEQ ID NO: 16730 - DNA, 1269 bp, synthetic construct
  source 1..1269: mol_type = other DNA; note = Synthetic coding sequence
atgacgccaagtataccaagcatcagacgactggggtcgggttactttagtagtaacggaaagctggaggaagtaaaaacccctaagaaccccgttaagcgtaaggatttgctgaggcacgatcccgacttacacatgcatcaaggatatgataaatatgacgtatctgaattctgtagctatattaagtcttcgtcctcactgggaaatgccaccagtgatgaggatcctaacacgaacattatgaacatcaacgagaataaaaatattcctaaagccaagaataaatccgaatctgaaaacgaacctaaggccggcacggacagtccagtatcttgtgcatccgtcactgaggagcgtgtcgcgtctgacagccccaagcccgctctcaccctgcaacagggacaggagttcagtgcgggcggccagaatgctgaaaacctctgtcagttttttaagatttcacccgacttaaacatcaagtgcgaacggaaggatgactttctgggagctgctgagggaaagcttcaatgcaacaggttgatgcctaatagccagaaggactgccactgtctcggcgatgttttgattgaaaatacaaaggaatcaaaatcccagtctgaagacctgggaaggaagcctatggaatcctcctcggtagtttcctgcagggacaggaaagaccgacggaggtccatgtgctacagcgacgggagatccttgcacctagaaaaaaacgggaatcacactccttcaagttccgtgggatcttctgtagagattagtttggaaaattctgaactgttcaaagatctgtctgacgcaatcgaacaaacattccagcggaggaactcagaaaccaaggtcaggcgaagcacgcgtctgcagaaagatctggaaaacgaaggactcgtctggataagcctcccgctgccgagcaccagccagaaggcaaaacgcagaaccatctgtacgtttgacagcagcggatttgaaagcatgagcccaatcaaggaaaccgtgagtagccgacaaaaacctcagatggcacctcccgtcagtgaccctgagaattctcagggtcctgccgccggtagtagcgacgagccagggaaaagacgaaaatctttctgcatcagcaccctcgctaacacaaaagccacttcccaattcaaaggctaccgtagacggagtagtctcaacgggaagggagagagctccctgacggccctggagcgcatcgagcataatggggaacgaaagcagtag

SEQ ID NO: 16731 - DNA, 3336 bp, synthetic construct
  source 1..3336: mol_type = other DNA; note = Synthetic coding sequence
atggtcagggaaaggaagtgcatactgtgtcatatcgtatattccagtaagaaggagatggacgaacacatgcgctctatgttacaccacagggagttggagaacctgaaaggtcggttcggcatagagatggttccactcgtacaaaacgaacaggaggctctggatctggacggagagccagacctgagttcacttgagggtttccagtgggaaggggtctccatttcttctagccccggactggccagaaagcggagcctgagtgaaagtagtgtcataatggatagggccccttccgtttacagtttcttcagcgaagagggcactggcaaggagaatgagcctcagcagatggtttcaccttcgaatagcctgagggcgggccagtctcaaaaagctaccatgcacctcaagcaagaagtcacaccgagagcagcatccctgcgaaccggcgaaagggctgagaacgtggcgacccaacggcggcatagcgctcaactttcttccgatcatatcatccctcttatgcatctagcgaaggacttgaactcccaagaaagatccattccaccctcggaaaatcagaactcacaggagagcaacggtgaagggaactgcctgagctccagcgcctcgtcagctctggcgatcagcagcctggcggatgcagctacggactcctcctgcacaagcggcgccgaacaaaacgacggacagagcattcggaagaagaggcgggccaccggtgatggctcgagccccgaactgccctccttggaacggaaaaataagcgccgcaaaattaagggcaagaaggaacgttctcaggtggatcagctcctcaacatctcactgagagaagaagaactgtccaaaagtttgcagtgcatggataacaatctactgcaggcccgtgcagccctgcaaactgcatacgtcgaggtccagcggcttctgatgctgaagcagcagatcaccatggagatgtccgccttgcgaacacatcgtattcagatcctgcaaggactacaagagacgtacgagccttccgaacacccagatcaagtgccctgttctttgacaagagaaaggcggaattctcggagtcagacttcaattgacgcagccctcttaccaacacctttctttccgctgttcctggagccgcccagcagccatgtcagcccttctcccacaggggctagcttgcagataacaacctcacccacttttcagacacacggtagcgtgccagccccagattccagtgtgcagatcaagcaggagcccatgagcccggagcaagatgaaaacgtgaacgcagttcctccttcctcagcctgtaatgtgtcgaaagagctgctagaggcaaatagggagatctcagactcttgtccagtatatcccgtgatcaccgcccgtctctcgctgcctgaaagtacggagagtttccacgagccatcacaggaactgaaattctcagtggagcagcggaacactcgcaatcgtgaaaactctccgagctctcagtcagccggtctctcatctataaacaaggagggggaagaacccaccaaaggcaactcagggagcgaggcttgcacatcttcatttctaaggctgtctttcgcctccgaaactccactggagaaggaaccacattctcccgcagaccaacccgaacagcaggctgagagtacactcacctccgccgaaacaaggggcagcaagaagaagaaaaagctgaggaaaaagaaatctcttcgcgccgctcatgtccctgaaaatagcgacacggagcaggatgtcctgactgtgaagccagtgcggaaagtgaaagcgggaaaactgataaagggcggtaaggtcacaactagcacatgggaagactccaggacaggccgcgagcaggagtccgtgcgagacgaaccagatagcgattcctctctcgaagtgttggagatccctaatccccagctcgaggtcgtggcaattgacagctccgaatccggagaggagaagcccgactccccaagtaagaaggacatttggaactcaaccgaacagaatcccttagagacaagtaggtccggatgtgatgaggtctccagtaccagtgaaatcggtactagatataaggacggcatccctgtgagcgttgcagagacacagaccgtgatatcctcgattaagggatccaaaaacagttctgaaataagcagcgagcccggggatgatgacgaaccaacagagggctcctttgagggacaccaggccgcagttaacgcaatccaaatctttggcaatctgctgtatacatgcagtgctgataagaccgttagagtctacaatctggtcagccgtaagtgtattggagtgtttgaaggccacaccagcaaagtgaattgcctccttgttacccagacctctgggaagaacgcggccctgtacacaggttctagcgaccacacgattcgttgttataatgtgaaatcacgggaatgtgtcgaacagctgcagctcgaggacagggtgctgtgtctgcattcacggtggcgcatcttatatgcggggctcgctaatggaaccgttgtgacatttaacatcaagaacaacaagcgccttgaaattttcgagtgccatggccctcgggctgtctcctgcctggcgaccgctcaggaaggcgcccggaagctccttgtcgtgggatcttacgattgcaccatctctgtcagggatgcccgcaatggactcttactgaggactctggaggggcactctaagactatcttatgcatgaaggtggtcaacgatttggtctttagcggttcgtccgatcagtctgtgcacgcccacaacattcacaccggggagcttgtacgaatatataaagggcacaaccacgctgtcacagtcgtgaacatcctggggaaggtgatggttaccgcctgcctagacaaatttgtgcgggtgtatgagctgcagtcacatgaccgactccaggtgtatggaggtcataaggatatgattatgtgtatgaccatacacaagtccatgatctacacaggatgctacgatggcagcatccaggccgtacggctgaacctcatgcaaaattacagatgttggtggcacggctgttccctaatatttggcgtagttgatcacctgaaacagcatctgctcacagaccacacaaatccaaactttcaaaccttgaagtgccgctggaagaactgtgatgcttttttcactgcaagaaaaggcagtaaacaggatgcagcggggcacattgagcgtcatgccgaagacgacagcaaaatcgattcctag

SEQ ID NO: 16732 - DNA, 354 bp, synthetic construct
  source 1..354: mol_type = other DNA; note = Synthetic coding sequence
atgtattccccgattatctaccaggccctctgcgaacatgtgcagacccagatgtctttgatgaatgacttaacttctaaaaatattcctaatggaattccagcagtgccatgccatgctccgtctcattccgaatcccaggcgacaccgcatagcagctacggcttgtgcactagcacaccggtctggtccttgcaacgccctccctgtcccccaaaggtccactccgaggttcaaacagatggtaactcacagtttgcatcccaggggaagaccgtcagcgccacttgtactgacgttttgcggaactccttcaacacttcccccggggtgccctgcagccttccaaaatag

SEQ ID NO: 16733 - DNA, 189 bp, synthetic construct
  source 1..189: mol_type = other DNA; note = Synthetic coding sequence
atggcagcgctgaggcccttagtcaaaccaaagatcgtcaagaaaaggacgaagaagttcattaggcaccaatctgaccggtacgtcaaaattaaacggaactggcggaagccaaggggtatcgacaaccgcgtacgacggcggtttaaggggcagatcctgatgcctaatattggatatggttcttag

SEQ ID NO: 16734 - DNA, 411 bp, synthetic construct
  source 1..411: mol_type = other DNA; note = Synthetic coding sequence
atgagcgcatcatgtgacggctgcgtcgggagcagaccccctgtccacctcgccagcggatattcactcgccgatctattagtactagagatggggatgggtacacagtgctggaccgaagatcagagacggtggtccagcttgtggccttggtcccatttatcgagcgtgctgctggccgacaaggagggcggtccccccgccgtggacgaagttcttgatgaagctgtaccagaatacagagcgccaggtcggaagtctctgctggagatcaggcaattagaccccgacgaccgctccctggccaagtataagagagtacttcttggccctctgcctccagcagtcgatccaagcctgcccaatgtgcaagtgacgcggttaaccctgctgtctgaacaggccccctag

SEQ ID NO: 16735 - DNA, 1803 bp, synthetic construct
  source 1..1803: mol_type = other DNA; note = Synthetic coding sequence
atgcccgagattcgagtcacccccctcggggccggacaggacgtgggtagatcctgtattttggtgagtatagcaggaaagaacgtcatgcttgactgcggtatgcacatgggattcaacgacgataggcgctttcccgacttcagctacattactcagaatgggcgattaaccgattttctggattgcgtcatcatttcccactttcacctcgatcattgcggcgcactgccttatttttcagagatggtgggctatgacggccctatctacatgacacaccccacacaggccatctgccccattttgttagaagattatcgaaaaatcgccgtagacaagaaaggagaagccaatttcttcacctctcaaatgattaaagattgtatgaaaaaggtcgtagctgtgcatctgcaccaaaccgttcaggtggacgacgagctggagatcaaggcgtactatgcggggcacgtgctgggcgctgcaatgttccagatcaaggtgggttccgagtccgtcgtgtatactggagattataatatgaccccggacaggcacctcggagcagcttggatcgacaagtgccggcctaatctgctgattaccgaaagcacttacgccactactatccgggactccaagagatgtagggagcgcgattttcttaaaaaagttcatgaaaccgtagagcgtggaggtaaggtgctgatccccgtatttgctttgggacgggcacaggaactgtgcattcttctagagacgttctgggagcgaatgaacctgaaagtgcctatttatttcagcaccgggttgacggagaaggccaaccactactataagctatttataccttggactaatcagaagatcagaaagacatttgtacagcggaacatgtttgagtttaagcacatcaaagccttcgatcgggccttcgccgacaatcctggtcctatggtggtcttcgccacccctgggatgttgcatgcaggccagagcctgcaaatattcaggaaatgggcaggtaatgaaaagaatatggtgataatgccaggctattgtgtccaaggcaccgttggccacaagatccttagcggccagaggaaacttgaaatggagggtaggcaggtcctggaggttaaaatgcaggtcgagtatatgtcatttagcgcccacgctgatgcgaagggtatcatgcagctcgtgggccaggcagagccagagagcgtgttactcgtgcacggggaggcgaagaaaatggagttcctaaaacagaagatagaacaagagttgagggtcaattgttacatgccagccaacggcgagacagtgaccctgcctacctccccaagtatccccgtgggaattagcctgggactgctaaaaagagagatggcacaggggctgctgcctgaggctaaaaaacccaggctgctgcacggcaccctaataatgaaggatagtaattttcggctggtaagcagcgaacaggcgttgaaggagctaggactggcagagcaccagctcagattcacgtgtagagtgcacctccatgatactcggaaagaacaggagaccgcgcttcgagtttattctcatctgaaaagtgtcctcaaagatcactgcgtccagcatctccccgatggttccgtgaccgtggaatcagtcttactccaggccgccgcaccgtcggaggaccctggaactaaggtgctgcttgtgagctggacgtaccaagatgaggagttggggtccttcctcacgtcactcttgaagaaagggctaccccaggccccctcttag

SEQ ID NO: 16736 - DNA, 774 bp, synthetic construct
  source 1..774: mol_type = other DNA; note = Synthetic coding sequence
atgctggagtatgctctcaagcaggaacgggcaaagtatcacaaactgaagttcggaaccgatctgaatcagggcgaaaaaaaagcagatgtgtccgaacaagtatctaatgggcccgtcgaaagtgtgaccttggagaacagtccactggtctggaaggagggccgccaattactgcgacagtatctggaggaggtagggtatacagacacaattctcgacatgcggtctaagcgcgtcaggtcactgctgggacgttcactggaactgaatggtgccgtcgagccaagtgaaggcgcccccagggccccccccggccccgctgggctgagtggaggcgaatccctgctagtgaaacagatcgaggagcagataaagcgtaacgcagccgggaaggacggcaaagaacgcctcgggggatccgtactggggcagattccctttttacagaattgcgaagatgaggacagcgacgaggacgacgaactagattccgtgcagcacaagaaacaaagagtgaaattgccatcaaaagcacttgtgcctgaaatggaggatgaggatgaagaggacgactccgaggatgcgatcaacgaattcgatttcctgggtagcggcgaggacggtgaaggcgcacctgatccccgcaggtgcactgtagatggaagtcctcacgaattgggtcctgaactccatagcccaaccgagtggcagggagctctgagtgtgggcaaagcctcgccaatgcctgattgggtgggtacagctggctag

SEQ ID NO: 16737 - DNA, 381 bp, synthetic construct
  source 1..381: mol_type = other DNA; note = Synthetic coding sequence
atgcccggtgtgaaacttacaactcaagcttattgcaaaatggtcctgcacggggccaagtacccacactgtgccgtaaacggcttgttagtggctgaaaaacaaaagccacgaaaggaacacctccccctaggcggcccgggggctcaccatacactgttcgtggattgcattcccctgtttcatggaactttggctctggccccgatgctagaagtcgctctcaccctgattgattcatggtgtaaagaccattcttacgtcatagccggctattatcaggccaatgaacgcgtgaaggacgcatctcctaaccaggtggcagaaaaagtcgcttctcgcatcgctgaagggttttctgacaccgctttgattatgtag

SEQ ID NO: 16738 - DNA, 450 bp, synthetic construct
  source 1..450: mol_type = other DNA; note = Synthetic coding sequence
gtacgagagttggaggctgagctcgatgccgagcaaaaaaaacatgccgaggccttaaaaggagtcagaaagcacgaaagaagagtgaaggaattggcctatcaggttggtgatagggttagccttggctctggaccaggggcaggaccggcccaggcatccccagagagccctctccctgcgcaggccgaggaggatcggaaaaacttagcccgaatgcaggatctggtggataaacttcaatccaaggtaaaaagttataaacggcaattcgaagaggctgaacagcaggcgaacacaaatctcgccaaatacaggaaggcccagcatgaactggatgatgccgaggaacgggcggatatggcggagactcaggcaaataaactgagggcgcgcacaagagacgcgctcggcccaaagttgtcattatcaccacagcataaagagtag

SEQ ID NO: 16739 - DNA, 2349 bp, synthetic construct
  source 1..2349: mol_type = other DNA; note = Synthetic coding sequence
atggatagttcaatccatttgtccagcctcatatcccgccacgacgacgaggcgactaggacctccacgtcagaggggctggaagagggagaggttgagggagagactctccttattgttgagtccgaagaccaggcatcagttgacctgagccacgaccagagtggcgactccctcaactcagacgagggcgatgtctcatggatggaagaacagctgtcctacttctgcgataaatgccagaagtggatccccgcttcccagctgagggaacagttgtcatacctcaaaggcgataacttcttcaggtttacgtgctcagactgctcagccgacggcaaggagcaatacgagcgcctgaagctgacatggcagcaggtggtgatgctggcgatgtataacctcagtctggagggaagcgggcgtcagggatactttcggtggaaagaggacatttgtgcattcattgaaaagcactggaccttcctgttaggcaaccgtaagaaaaccagcacatggtggagcactgttgccggttgcctttccgtcgggtctcctatgtatttccgctccggcgcacaggaatttggggaacctggatggtggaagctggtgcacaacaaacctcccaccatgaagccagagggtgagaaactaagtgcctccaccctgaaaatcaaggctgcctctaagcctacccttgaccccatcattactgtcgaaggactcaggaagcgcgcctcccggaatccagtggagagtgccatggagctcaaggaaaagagaagtagaacccaggaggccaaggacatacgccgggcacagaaggaggcggctggcttcctagatagaagcaccagttctactcccgttaaatttattagccgcggtaggcgcccagatgtgatccttgagaaaggtgaagttatcgacttcagctccttgagtagttctgaccgcacccctctcaccagtcctagcccatcaccttcgctggacttctctgcaccgggaacccccgcatcccacagcgcaactcccagtctgctgtctgaagcagatctcattcccgacgtgatgccccctcaggctttgttccatgatgacgatgaaatggaaggagatggagttattgatcccggcatggagtacgttcctcccccagccgggtcggtagcatccggaccggtagttggtgtgcgtaagaaggttcgagggccagagcagatcaaacaggaggtggagagcgaggaggagaagcctgatagaatggatattgattcagaggataccgattccaacaccagcctgcaaactcgtgcacgagagaagcggaaacctcagctggagaaagacactaaaccaaaggagccaagatacacacccgtgtctatttatgaggaaaaactgctcctgaagcgtcttgaagcctgccccggtgctgtggccatgacacctgaagctagacggttgaagcgtaaattgatagtccgacaagccaaaagagatcgggggttaccattgtttgacctggatcaggtcgttaatgctgccctgctgctggtggatggcatctacggtgcaaaggaaggcggtatctccagactgccggctggccaagctacataccgcaccacttgccaggattttcgaatcctcgatcgctatcagacatcattaccatccagaaaaggattccgccaccagacaacaaagtttctgtacaggctagtggggtccgaggatatggccgtggaccagagcatcgtgagtccatatacttcacgcatcctcaagccttatataaggcgcgactacgagaccaagccacccaaattacagcttctgtcacagattaggtcccaccttcatcgctcagacccccattggactcctgagcctgacgcaccactggattactgctatgttcggccaaaccatattccgaccattaattctatgtgtcaggagttcttttggccaggaattgatctctccgagtgtctgcagtaccctgacttttccgtagtcgtgctgtacaagaaggtcatcatcgcttttggctttatggtgcctgacgtgaagtataacgaggcctacatatctttcttgtttgtgcatcctgaatggcgacgcgcagggattgccacctttatgatttatcatctgatccagacatgcatgggaaaggatgtcaccctgcacgtctcagccagtaatcctgcaatgttgctttaccagaagtttggcttcaagaccgaagagtatgtgctcgacttttatgacaagtattatcctctggagagcactgaatgcaaacatgcttttttcttgcggctcaggcgatag

SEQ ID NO: 16740 - DNA, 495 bp, synthetic construct
  source 1..495: mol_type = other DNA; note = Synthetic coding sequence
atgatgtctgaggttgaggaggcaatgcaatgcgtggaggagttgaatgcccagggtttgctccacgtgtttgtgcgggtgggcgttgaatccactctggagaggtcccagattacccgggaccacatgggtcagctgctctatcaactggttcagtctgaaaaactgtcaaagcaggatttttttaaaggattctcagagactctggagctggcagatgacatggcaatcgacataccccatatttggctctacctggccgagttagttaccccaatgctcaaagaaggaggcatctcgatgagggagctcacaattgagtttagcaagccactgctacctgtcggcagagcaggagtgctgctgtcagaaatcttgcacctgctttgcaaacaaatgtcacacaagaaggtgggcgctctctggagggaggcagatttaagctggaaggattttctgcccgaaggtgaggacgtacacaacttccttctgtag

SEQ ID NO: 16741 - DNA, 369 bp, synthetic construct
  source 1..369: mol_type = other DNA; note = Synthetic coding sequence
atggctacatctgcaccactgaggagcctcgaggaagaagtgacttgtagcatttgcctagattatctacgcgatcctgtgacaatagactgtgggcacgttttttgtcgctcctgtaccaccgacgtgaggcctatcagtggttcccgcccagtttgccctttgtgtaagaaaccattcaagaaagagaacatcaggcccgtgtggcagctggcctcgctcgtcgagaatatcgagcgactgaaggtagataagggacggcagccaggtgaagtgacacgagagcagcaggacgctaagttgtgcgagagacacagggaaaagttacattattattgcgaagacgacggtaagcttctttgcgtctag

SEQ ID NO: 16742 - DNA, 3345 bp, synthetic construct
  source 1..3345: mol_type = other DNA; note = Synthetic coding sequence
atggcctgtcggagacggtatttcgtcgaaggcgaagcgccttccagtgaaactggaacctctcttgattccccatcggcttaccctcaggggcccctggttccggggagctcactctctccggatcattatgaacacacaagcgtaggcgcatatgggctctatagcggacctccagggcagcaacaaagaacaaggaggccaaagctgcagcactccacgtctattctgcgaaaacaagctgaggaggaggctatcaaacgctcccggtcactgtccgaaagctacgagctcagcagtgacctccaggacaaacaggtcgagatgttggagagaaaatatggtggcagactggttacaaggcatgccgctcggacaattcaaacagccttcagacaatatcagatgaacaaaaacttcgagcggctccgcagctctatgagcgaaaaccggatgtcgcggcgcatcgtcttatcaaacatgagaatgcagtttagctttgaaggtccggagaaggtgcactctagctactttgaaggcaagcaggtgtctgttaccaatgatggttctcagctcggggctctggtcagcccagaatgcggtgacttgtcggagccaacgacactaaagtcccctgctccatcctccgacttcgccgatgccattacagagctggaagatgctttcagccgacaggttaagagcctcgcggagtcaattgacgatgcactcaattgtcgtagcctccacaccgaggaagcccctgctctggatgcagcacgggcccgggatacagaaccgcagaccgcattgcacggcatggaccaccggaaactcgatgagatgaccgccagctattccgacgtgactctgtacattgacgaggaggaattgagcccacccctaccattatcccaggcgggggacagaccttcaagtacggagagcgatctcagactccgggccggcggggcagccccggattactgggcgctcgctcataaggaggataaggccgacactgatacctcatgtaggtctaccccatctctggaaaggcaagaacagcggctgagggttgaacatctacctctgctcacgatcgaaccacccagcgatagctcagttgatttatccgacagatccgaacgcggatccctgaagcgtcagagcgcatacgagcggtcgctgggcggccagcaagggtccccgaagcacggaccacattctggcgccccaaagtctcttccgagagaggagcccgaacttcggccgaggccgcctcgccctctcgacagccatctcgcaatcaatggatccgcaaacagacagtctaaatcagagagtgactactccgacggagacaatgacagtatcaactccaccagtaacagcaatgataccattaattgtagttctgagagcagcagtcgagacagtcttagggagcaaacccttagcaaacagacttaccacaaagaggctaggaattcgtgggactcccctgcattctcaaacgacgtgatccgaaaacggcactaccgcattggcctgaatttatttaacaaaaagcccgagaaaggcgttcaatatctaattgagaggggcttcgtaccagacacaccagttggagtggcccatttcttactgcagaggaaaggccttagcagacagatgataggcgagtttctgggcaaccggcagaaacagttcaatcgggatgtgcttgactgcgtggtggatgaaatggatttcagtaccatggaactcgatgaggccttgcgcaagttccaagctcatattcgggtgcaaggagaggcccagaaagtcgagcgactgattgaagcctttagccaaaggtactgcatctgtaatccgggcgtggtgaggcaatttaggaacccagataccatttttatactggctttcgccattatcctactgaacactgatatgtactcacccaacgtgaagccagaacgcaagatgaagctagaggactttatcaagaacctcaggggcgtggacgatggagaggacattcccagggagatgctgatgggcatctatgagcggattcggaaaagagagctaaagacaaatgaggaccacgtgagtcaggttcagaaagtggaaaaattgatcgtgggcaaaaagcctataggctcgcttcatcccggattgggttgcgtgctctcactgcctcataggagactggtctgctactgcaggctgtttgaagtccccgatcctaacaaaccacagaagctggggctgcaccagagggagatttttctatttaatgacctgctggtcgtcactaaaatattccagaagaaaaaaaatagtgttacatatagctttaggcagagctttagcctttatggcatgcaggtgctgctgttcgaaaatcagtattatcctaacgggattcggttaacttcgtccgttcccggggcggacattaaagtgctgatcaatttcaatgcccctaatccacaagaccgaaaaaagttcactgatgacctccgcgaatccatcgccgaggtccaggagatggaaaaacataggatcgagtccgaactcgagaaacagaaaggggtggtcaggccctcaatgtcccagtgcagtagtttgaagaaagagtctgggaacggaactctctcgagggcctgtctcgacgatagttacgcctccggggagggcctgaaaagatcagccctatccagctctctacgagatctttccgaagccggaaaacgcggccgccggtcgagcgctggctcacttgagtctaatgtggaaggctcgattatcagtagcccccatatgaggcgtagggcgacttcaacccgcgaatgtccttctcgaccccatcagaccatgcccaatagctcgtcactcctagggtccctcttcggatccaagcgcggcaagcctcctccccaagcacacttacccagcgcccccgctcttccccccccacacccaccggtggtgctgccccacctgcagcacagcgtcgcagggcaccatctgggcccaccggaaggacttcctcaagctgcaatgcatggccaccacacccagtactgccatatgcagaaccctccgccttaccatcaccatcatcaccaccaccccccacagcatatccagcatgcacatcagtatcaccacggtccccatgggggccacccagcttatggagctcacgctcatggacatccccccttgccctctgcccatgtgggtcacaccgtgcatcaccacggccagcccccagccccaccacccccaactagctcaaaagccaaaccctcgggaattagtactatagtgtag

SEQ ID NO: 16743 - DNA, 903 bp, synthetic construct
  source 1..903: mol_type = other DNA; note = Synthetic coding sequence
atggccgaggaggtgtcaactttaatgaaagcaactgtgctgatgcgccagcctggaagggtacaagaaatagtcggagcgcttcgcaaggggggaggggatagactccaggtgatctctgacttcgacatgaccctcagtcggttcgcttacaacggcaaaaggtgtccctctagctacaacattctagacaactccaaaatcattagtgaagaatgtaggaaagaactgactgcattgctgcatcattactaccctatcgagattgatccacatcggaccgtaaaggagaaactaccccacatggtggaatggtggacaaaagcgcataacctgctgtgccagcagaagatacaaaaatttcagatagcccaggtggttagggagtcaaatgctatgttaagggaggggtataagacgttctttaacactctctaccacaacaacatccccttgttcatattctccgctggaattggcgacattctagaggagatcatacgacagatgaaggtttttcaccctaatatacacatcgtgtccaattacatggactttaacgaggatggattcctgcagggcttcaagggacaattaattcatacgtataacaagaacagctctgcatgcgaaaactccggatatttccagcagttagaaggaaagaccaatgtgattttactcggtgatagcatcggtgacctcacaatggcggacggagtccctggagtccagaatattctgaagatcggcttcctcaatgacaaggttgaggagcgccgtgaacgctatatggactcctatgatatcgtgctggaaaaggacgaaacactggatgtggtcaatggactactgcagcacattctctgtcaaggcgtacagctggagatgcagggaccttag

SEQ ID NO: 16744 - DNA, 834 bp, synthetic construct
  source 1..834: mol_type = other DNA; note = Synthetic coding sequence
atgttcccgggcgctacaaccccattgccaaaagcagccgcgtacccaggtgtatacggctcgaacggcagaacaccacaacctgcatacctcagcgaggcaatgaagcttacacagagtgaacaagcgcacctgtccctggaacttcaaagggactcccatatgaagcagctgctcctcatccaggagaggtggaagcgcgctcagcgggaagaacgcctcaaggcacagcagaataccgataaggatgctgcagctcatctgcagacatcacataaacctagtgccgaggacgctgaaggccagtcgcccctgtcccaaaagtacagccctagtactgaaaagtgtttgccagaaatccaaggtatctttgatagggacccagacactcttctctatctcctccaacagaagtctgagcccgccgaaccctgtatcgggtcgaaagcacccaaagacgataaaaccatcatcgaagagcaggccaccaaaatcgctgatttgaagcgccatgtcgaattcctggtcgctgaaaatgagcgtctgcgcaaggagaataagcagctgaaggctgagaaagctaggctgcttaagggaccaattgaaaaagagctggacgtggacgcagacttcgtggagacctcagagttatggtcccttcctcctcatgccgagaccgcgacagcgagttcgacatggcaaaaatttgcggctaatactggaaaggccaaagatatcccgataccaaacctgcctcctcttgactttccctctcccgagctaccgcttatggagctaagcgaagatatcctgaagggcttcatgaacaactag

SEQ ID NO: 16745 - DNA, 138 bp, synthetic construct
  source 1..138: mol_type = other DNA; note = Synthetic coding sequence
atgtcacctcagaagcgggttaagaatgttcaggcacaaaaccgaacatcccagggttccagcagctttcagaccacactcagtgcctggaaggtaaagcaggaccccagtaattctaaaaacatctcaaagcactag

SEQ ID NO: 16746 - DNA, 819 bp, synthetic construct
  source 1..819: mol_type = other DNA; note = Synthetic coding sequence
atgccaggggaccatcgcaggatcagggggccagaggagagccagccacctcagctgtatgcagcagacgaggaagaggcccccggcacaagagaccccaccaggctcagacccgtgtacgcgcgagccgggctgctgtcccaggctaagggcagcgcctacctcgaagccggaggtacgaaggttttgtgcgccgtaagcggtccaaggcaggcagaaggtggtgaaaggggagggggaccagccggagcaggaggagaggcccctgctgccctccgtgggcggttactgtgcgactttcggagggctccatttgctggaaggcgcaggcgggcacctccagggggctgtgaggaacgcgaattggcattggcactgcaagaggcgctggagcccgccgtgcgcctgggtcggtatccacgcgctcagcttgaggtgtctgctcttctgctcgaggacgggggatcagctcttgctgcggctctcacagcagccgccctggcccttgcagacgctggggtggagatgtatgacctggtcgtggggtgtggactctcactggcccccggacccgcgcccacatggctgctcgatcccacaaggctggaggaggagcgggccgccgcaggcctgacggttgcactgatgccagtgctcaaccaagtcgccggcctccttggcagcggggagggtggactcacagagagctgggccgaggccgtgcgcctgggccttgagggatgtcagaggctatacccagtgctacaacaaagcctcgtacgggcggccagacgccgtggggctgccgcccagccctag

SEQ ID NO: 16747 - DNA, 429 bp, synthetic construct
  source 1..429: mol_type = other DNA; note = Synthetic coding sequence
atggcctccggaaacgcgcgaatcggaaaaccggccccagatttcaaggccactgcagtcgtcgatggagcattcaaagaggtgaagctgtctgattacaaaggcaaatacgttgtgctatttttctatcctctggatttcacattcgtgtgtcccaccgagattatagcttttagcaaccgcgccgaggatttcagaaaattagggtgtgaagtgcttggtgtgagcgtggatagccagttcacacacttggcatggtatgagcaggggcccaagagagaagtggctgccaaattaaccccatccggccccagcagcgtcgcatcatggccgctgttaaacctctggaatctgagatttcccatagtgaaaatcatggagaccctgccccccaagagtctgagaatgatgaccgtgatttccatctag

SEQ ID NO: 16748 - DNA, 1137 bp, synthetic construct
  source 1..1137: mol_type = other DNA; note = Synthetic coding sequence
atggaggtcaaacccccccctggacgcccccagcccgactcaggacggcggcgccgacgacgcggtgaagaaggacacgacccaaaagagccagagcagctgcggaagctgttcatcggtggtctgagttttgagactacagacgacagcctgcgggaacattttgagaagtggggcactcttactgactgcgtggtgatgcgggatcctcagaccaagaggtccagaggcttcggtttcgtgacatattcatgcgtggaggaggtggacgctgccatgtgtgctcgcccgcacaaggtagacggccgcgtggtcgaacctaaaagagctgtgtccagagaagattccgtaaagccaggtgcacatctcacagtcaaaaaaatattcgtcgggggtattaaagaagacactgaagagtacaatctccgggattacttcgagaaatacggcaaaattgaaaccatcgaggtgatggaggacaggcagtcaggcaaaaaacgcggctttgccttcgttacttttgatgatcatgacaccgtcgataagatcgtagtgcagaagtaccacacaatcaatgggcataattgtgaggtgaagaaggctctgagcaagcaggagatgcagtccgcaggctcccagcgcggtcgagggggaggttccggcaattttatgggaagaggtggaaactttggggggggcgggggaaatttcgggcgggggggcaatttcggaggccggggcggctatggcggcggaggcggtggatctcggggctcttacgggggtggcgacggggggtataatggattcggcggagatggtgggaattatggaggcggccccggttactcttctcgtggaggttacggaggcggagggcccggctatggcaaccagggaggcggttatggcgggggcggcggttatgatggttacaatgaaggcgggaattttggcggaggcaattacggtggtgggggcaactacaacgacttcggtaactactcaggacagcagcagagcaactacggcccaatgaagggtgggagctttggagggcgctcaagtggctcaccttatggggggggctatggctctggcggcgggagcggcggatatggctctagaagattctag

SEQ ID NO: 16749 - DNA, 324 bp, synthetic construct
  source 1..324: mol_type = other DNA; note = Synthetic coding sequence
tgaattcatgagcaatgggaaaaggccaatgtctcttctcctcatagggaattcccacccgccacagcccgcgaagtggatcccctccgcataccccctcatcatccccatacaagcaggcagcctccttggccgcgcagagggggaatgatagtggatcctctgcgttctggctttccccgcgccctcattgacccttcctccggcctcccaaatcgtctcccacctggcgcagtcccccccggagctaggtttgacccgtttggacccatcgggacatccccaccagggccgaatccagatcacctgccacctccaggctag

SEQ ID NO: 16750 - DNA, 201 bp, synthetic construct
  source 1..201: mol_type = other DNA; note = Synthetic coding sequence
atggctgctgccactggtgatcctggcctcagcaaactgcagttcgccccctttagcagcgctctggatgtgggattctggcacgaacttacccaaaagaagttaaatgagtaccgcttggatgaagcacctaaagatattaaggggtactactataatggggactctgccggcttgccagcccgcctgacactagaatag

SEQ ID NO: 16751 - DNA, 2115 bp, synthetic construct
  source 1..2115: mol_type = other DNA; note = Synthetic coding sequence
atgctcccaaccgcctcttcaaagcggcgcacatttgccgcccggtacttcacccggagtaaatctcttgtaatgggtgagcagtcgcggtcccccggccgtatgccatgtccgcatagactggggcccgtgctgaaagcaggatggctgaaaaaacagcggagcataatgaaaaactggcagcagcgttggttcgtactaaggggagaccaattattctactataaggacaaggatgagattaagccgcaagggttcatcagcctgcaaggcacccaggtgactgaattgccaccgggccctgaagaccctgggaaacacctgtttgaaatctcacctgggggcgccggggaaagggagaaggtgcccgccaatcctgaggccttacttctgatggccagcagccagcgagatatggaggactgggtccaggctatccgcagagtcatttgggcccctctgggtggcggtattttcggacagcgtttagaggagaccgttcaccacgaacgtaaatacgggccccggttagcccctttgctcgtagaacagtgcgtggattttatcagggagcgaggactgaccgaggagggactatttagaatgccgggtcaggcaaaccttgtgcgcgacctccaagatagctttgattgcggagaaaagcctctgtttgattccacaacagacgtgcacacagtggcatcgctcctcaagttataccttagggagctgccggagcccgtggtccccttcgcccgttacgaggattttctttcatgtgcacagcttctgacgaaagacgaaggtgaggggactttggagttggcaaagcaggtttccaacttgcctcaggcaaactacaatctgctaagatatatctgcaagtttttggacgaggtgcaagcctatagcaacgtgaataagatgtcggtccagaacctcgcgacagtatttgggcctaatatcctccgtcctcaggtggaggacccagtgaccattatggaagggactagtctggtccagcacctgatgactgtgttaatccggaaacatagtcagctgttcacagcgcccgtgcctgagggtcccacatctcctaggggtggtctgcagtgtgccgtgggttggggcagcgaggaggttacgcgtgatagccagggagagcccggcggtcctggcttgccagcacatagaacttcatccctggacggggctgctgtcgcggtcctgagtcgcactgccccaaccgggcccggcagccggtgctcccctgggaagaaagtgcaaaccctgccaagttggaagtcctcgttcagacagccacgcagccttagtggatccccaaaaggaggcgggagttctttagaggttcccatcatatcttctggcggcaactggctgatgaacggccttagctctctccgcggacatcgccgagcatcatccggcgatcgcctgaaggactccgggtcagttcagcgcttgtccacctatgataatgtgcctgctccaggcctagtcccaggtataccaagcgtagcctcgatggcctggtctggtgcatcctcctctgaaagtagtgttggaggcagtcttagtagctgcacggcctgcagagccagcgacagctccgcgcggagcagcctgcatacagactgggccctggagccctccccactcccttcatcttctgaagatcccaaatctctggacctagatcacagtatggatgaggcaggagcaggggctagcaatagtgagcccagcgaacctgattctccgacccgggagcacgcccgccggagcgaggctctgcagggcctggtgaccgagttgcgggcggagttgtgcagacaacgaaccgaatacgaacggagtgttaagcggattgaagaagggagtgctgatctgaggaaaagaatgagtcgcttagaagaggagctggaccaggaaaagaagaagtatatcatgctggaaattaaactccggaactcggagcgtgctcgtgaggacgcagaaagacgcaaccagctgttgcagagggagatggaggaatttttcagtaccttgggtagtttaacagttggcgccaaaggcgccagagcacccaagtag

SEQ ID NO: 16752 - DNA, 630 bp, synthetic construct
  source 1..630: mol_type = other DNA; note = Synthetic coding sequence
atgattagcaattaccgcaatggatctgaactggtttgcttcaactctggcgtgggatgtttcctgataggttgcgattgggctttcaccgtactggtaaatacctttttttcctttctgagacggaaaacagacttctttatcggaggagaagaggggatggctgagaagttaatcacgcagacattcagtcatcacaaccagcttgcccagaaaactcggcgagagaaaagggcacgccaggaagcagagcgacgagagaaagctgaacgcgctgctcggttagccaaagaagctaagtccgagaccagtgggccccagattaaggaactgacggacgaggaagccgagagattgcaactcgaaattgatcagaaaaaggatgcggagaaccatgaggcccagctgaagaatggttctttagacagtcccggaaaacaagacacagaagaggatgaggaggaggacgagaaagataaaggcaaactgaagccaaacctcggaaacggggccgatctcccgaactacagatggacacagacattgtctgaactggaccttgctgtgccgttctgtgtgaactttaggctgaagggcaaggatatggtcgtggatattcagaggcgttag

SEQ ID NO: 16753 - DNA, 309 bp, synthetic construct
  source 1..309: mol_type = other DNA; note = Synthetic coding sequence
atgaacgaggcggaaatcgtagatgtggctctgggaatcctgatcgagtccagaaaacaagagaaggcatgtgagcagccagctcttgctggcgctgacaaccccgagcatagccccccctgctcagtgagtcctcacacaagctcgggctctagtagtgaggaagaagatagcgggaagcaggcccttgcccctgggcttagtccttcccagagaccaggtggtagttcatctgcgtgtagtagaagtccagaggaagaggaggaagaagatgtgctaaagtatgtgagggagattttcttttcatag

SEQ ID NO: 16754 - DNA, 273 bp, synthetic construct
  source 1..273: mol_type = other DNA; note = Synthetic coding sequence
atggcaatggccccttcccctagcctagtgcaggtgtacaccagcccagctgctgtggctgtgtgggaatggcaggacggactgggtacttggcatccatactcagcaactgtctgtagtttcatcgagcagcagttcgttcagcaaaagggacaacgttttggactgggaagtctggcccattccatacccttagggcaagccgacccctctctagctccttatataattgacctcccctcctggacccagttccgccaggacactggctag

SEQ ID NO: 16755 - DNA, 207 bp, synthetic construct
  source 1..207: mol_type = other DNA; note = Synthetic coding sequence
atggatgctaacagcaaggacaagccacctgagaccaaggagtccgcaatgaacaacgctgggaatgcatctttcatcctaggtactgggaaaattgtgactccccagaaacatgccgaattgccacctaacccctgcacacctgatacgttcaaaagccccctcaactttagcacggtgacagtcgagcagcttgggatcaattag

SEQ ID NO: 16756 - DNA, 879 bp, synthetic construct
  source 1..879: mol_type = other DNA; note = Synthetic coding sequence
atggatggatctttcgtccaacacagcgtgagggtgttacaggagctcaacaagcagagggaaaagggccagtattgtgatgccacattagacgttggaggtcttgtgtttaaagcccactggagcgtcctggcatgttgttctcacttcttccagtctctgtatggcgatgggagcgggggttctgtggttctccctgctggattcgcggaaatcttcggccttctcctggactttttttacactgggcatcttgcattgacaagcgggaatagagatcaagtgttattggctgcaagggaactgagagtgcccgaggccgtggaactatgccagagcttcaagcccaaaacatctgtcggccaggccgcagggggacagtctggactcggtcccccagcatcacagaacgtaaatagccatgtgaaggaacctgcgggactggaagaagaggaagtgagcaggactctaggtctcgtgccacgcgatcaagagcctcgggggtctcatagccctcaaagaccgcagcttcattcccctgcccagtctgagggcccatcctctctgtgcggcaagcttaagcaggcactaaagccctgtccattagaggacaagaaaccagaagactgcaaggtcccgcctcgcccattagaagcagaaggtgcacaactgcaaggtggcagtaatgaatgggaggtggtggtgcaggtggaagacgatggtgatggagactacatgagtgagccagaggccgtgctgacgaggcgcaaatccaacgtaattaggaagccatgtgctgctgagccagccctgagcgctggttctcttgctgccgagccggctgagaaccgaaaagggaccgctgtgccagtggagtag

SEQ ID NO: 16757 - DNA, 408 bp, synthetic construct
  source 1..408: mol_type = other DNA; note = Synthetic coding sequence
atggcagccctgcgcccacttgtgaagcctaagatcgtgaagaaacgcacaaaaaaatttatccggcatcagagcgacagatatgtaaaaattaaaagaaactggaggaagccgaggggcatcgacaatagggtacgtcggcggtttaaaggccaaattctgatgccgaacatcgggtatgggtctaacaaaaaaaccaagcatatgctgccctcgggcttcaggaagtttttagtgcacaatgtgaaagagctggaagtcttactaatgtgtaacaaatcttattgcgccgagattgctcataacgtgtcctcgaagaaccgtaaagcaattgtggagagggcagcccagcttgcaatccgtgtgacaaacccgaatgcccgcttgcggagcgaggaaaatgaatag

SEQ ID NO: 16758 - DNA, 810 bp, synthetic construct
  source 1..810: mol_type = other DNA; note = Synthetic coding sequence
atgaagaccccagtcgaactggccgtctcgggcatgcagacactggggctgcagcacagatgccgagggggctaccgagtcaaggcacggacaagctatgtggacgagacactctttggctccccagccggcaccaggccaaccccccctgattttgaccccccctgggtggagaaagccaatcggactcggggcgtagggaaagaggcaagcaaggccctaggcgctaaaggatcatgcgagactaccccaagtcgcggcagcacacctaccctgactcctcgaaaaaaaaacaagtaccggcctatctcacacaccccttcctactgcgatgaatccctttttggctcgcgaagtgaaggcgcgtctttcggggctcccaggatggctaagggcgacgcagccaagttgcgggccctattgtggacccctcctcctaccccacggggcagccatagtccgcggccccgtgaagcacccctgcgcgcgatccaccctgccggcccctctaagactgagcccggcccagccgcggattctcagaagctcagtatggggggactccatagtagccgcccgctgaaacgcgggctgtcccattctcttacgcacctgaatgtccccagtactggacatccagctactagtgcccctcacacaaacggtccacaggatctgcgcccttccacctctggagtcacctttaggtctcctctggtgacaagtagagcccgttctgtgtctatcagcgtgccttcaactcctcgaagaggcggcgcaacccagaagccgaagcccccatggaagtag

SEQ ID NO: 16759 - DNA, 840 bp, synthetic construct
  source 1..840: mol_type = other DNA; note = Synthetic coding sequence
atggttgaccacttggctaacactgagatcaattcccagcgtatcgcagcggtcgagagctgcttcggggcttccggccagccgttggcgctgcctggccgagtactgctgggagagggtgtgctcacaaaggagtgtcgtaagaaagccaagccccgcattttcttcttgttcaacgacatactcgtctatggctcaattgtactgaataaaaggaaataccggagccagcacatcattcctctcgaagaagtgactctggaacttttgccggagacactccaggccaaaaacagatggatgattaagacagctaaaaaaagcttcgtcgtctcggcagccagtgctaccgagcgtcaggagtggatctcacacatcgaggagtgtgtgaggagacagttgcgagctactggtagaccaccaagtaccgagcacgctgctccctggatccctgacaaggcaacagatatctgcatgcggtgtactcagacacgattttctgccctgacgcggcggcaccattgtcggaaatgcgggttcgtggtttgcgctgaatgttccagacaacggtttctgttgcctaggttgagcccaaaacctgttcgcgtctgttcactttgctatagagagctggccgctcaacagagacaggaggaggctgaggagcagggtgccggttccccaggtcagccagcccacctggcacgacccatttgcggcgcctcttccggtgatgacgatgattccgacgaggacaaagaaggttctagagatggagactggccaagctccgttgaattctacgcttctggtgttgcgtggtccgcatttcactcatag

SEQ ID NO: 16760 - DNA, 279 bp, synthetic construct
  source 1..279: mol_type = other DNA; note = Synthetic coding sequence
taacgaagctcgacaagcccgtgcggcactagtaaatctcccaatagagaatgggaagggaagagtgtggcttacatgccctacgcggaagtaaagcgcgctctggagcaggaggcccagatgcacaataccgccgctcgcagtgccagtccctgtcggctgtcaccgcgcgaggtctccaaggcagcaccgcagccagacatgagtgctgctcggtactccgtgcctccagttctgcagcccgcacctcatcaagtgatcaccaacttgccagaatag

SEQ ID NO: 16761 - DNA, 771 bp, synthetic construct
  source 1..771: mol_type = other DNA; note = Synthetic coding sequence
atgtccaataacctgtctgagctggacactaaaatccaggaaaaggccatgaaagtcgacatggatatctgccggcggatcgacatcaccgcgaaattgtgtgatgtggcacagcagcgaaactgcgaagacatgatccaaatgttccagaaaaagcttgttccctcaatgggtggaaggaaaagggagaggaaggcagcagtggaagaagatacaagcctctctgagagcgaaggcccgcgccagcctgacggagatgaggaggagagtactgccctaagcatcaatgaggaaatgcaaagaatgcttaaccagctccgggagtatgactttgaggacgactgtgattctctcacatgggaggaaacagaagagactctgctgctgtgggaggactttagcggatacgccatggcagccgcagaagcccagggtgagcaacaggaggatagtctggagaaggtgatcaaggacacggagagtctattcaagaccagggaaaaggaataccaggagaccatagaccagattgaacttgagcttgccaccgctaagaatgacatgaataggcatctccatgagtatatggagatgtgcagcatgaagcggggacttgacgtccagatggagacctgtaggcgccttatcacccagagtggtgacagaaagtcccctgctttcactgctgtgccattatctgaccccccacctccgccatccgaagccgaggattcagaccgagatgtgagctcagactcatccatgcgatag

SEQ ID NO: 16762 - DNA, 1620 bp, synthetic construct
  source 1..1620: mol_type = other DNA; note = Synthetic coding sequence
atggccaccagcgccccactaaggtcactagaggaagaggtgacctgcagcatctgcttggattacctcagagatcctgtgaccatcgactgtggacacgtcttctgtaggagttgtaccaccgatgttaggcctatctccggatcccggcctgtttgcccgctgtgtaagaagccattcaagaaagagaatatccgacccgtgtggcagctggcctccttggttgaaaatatcgaacgactgaaagtggataagggccgccagccaggagaagttaccagagaacagcaggatgctaagctgtgcgagcgccacagggagaaactccattattactgcgaggacgacgggaagctgctctgcgtaatgtgcagagagtctcgggaacacaggcctcatacagccgtcctgatggagaaagctgcccaaccacaccgagaaaagattctaaaccatctgagtactctgagacgggaccgggataagatccaaggcttccaggcaaaaggcgaagcagatatcctcgctgccctgaagaaactgcaggaccagcggcagtatatagttgcggagttcgagcaaggccaccaattcctacgggagcgagaagaacaccttttggagcagctagccaaactggagcaggagctgacagagggcagagagaaatttaagtcacgcggggtgggagagctggcacggcttgccctcgtgataagcgagcttgagggaaaggcccagcaaccggctgccgagctgatgcaggacacaagagactttcttaacaggtatccccgcaagaaattttgggtaggcaaaccgattgcccgcgtagtcaaaaagaaaaccggcgaattttccgataagctgctgtcattacagagagggcttagagagttccagggcaaactgcttcgggacctagagtacaagacagtgtcagtgacccttgacccgcagtccgcttccggctatctgcagctgagcgaagactggaaatgtgttacatatacatccctctataagagcgcatatttgcacccacagcagtttgactgcgaacctggggtgctgggttcaaagggattcacatggggcaaggtttattgggaggtggaggtagagcgcgagggctggagtgaagacgaagaggaaggcgacgaggaggaggagggagaggaagaggaagaggaggaagaggccggctacggcgacggttacgatgactgggaaactgacgaggatgaagagtccctcggagatgaagaagaggaggaggaggaagaagaggaggaggtgctggagagctgcatggtaggggtcgctcgggactcagtcaagagaaagggggatctgtctcttaggccagaggacggagtgtgggccctgagattatcaagctccggtatctgggcgaacacgagccctgaggccgaactgtttccggccctaaggccccgcagagttggaatcgccctggattatgaaggtggaaccgtgaccttcactaatgctgagagccaggagctaatctatactttcaccgccaccttcacgaggcggctggtgccttttctgtggctaaagtggccgggaacacgacttttgctcagaccgtag

SEQ ID NO: 16763 - DNA, 750 bp, synthetic construct
  source 1..750: mol_type = other DNA; note = Synthetic coding sequence
atggctttcatgactcgtaagctctgggatcttgagcagcaagtcaaagcgcagaccgatgagatcctatcgaaagaccagaaaatcgccgctctggaggatctggtgcagaccttgaggccccatcccgctgaggctacactacagaggcaggaagaacttgagaccatgtgtgttcagctgcaacgacaggtacgcgaaatggagcggttcctatctgactatggactgcagtgggtcggcgaacctatggaccaggaagatagcgaaagtaagactgtatcagaacatggggagagagactggatgaccgcaaaaaaattttggaaacccggtgactccttggcccctcccgaggtcgacttcgacaggctgctggcctccctccaagacctctccgagctggttgtggagggggatacacaagtgacccctgtgcccgggggcgcgagattgcgcaccctggagcccatcccgctaaagctctatcgcaacggaatcatgatgtttgacggcccatttcagcctttctacgatccaagtacgcaacggtgtctgagggacatactggacggatttttcccaagcgaactgcagcggctttatcctaacggggttcctttcaaagtgatcagctgctcgtccaatcatacattcggagatttcgaggggagcggtgatacccagccgccacagacccctcctatcttgaggggttctagatgtactccttggggcacgccagtctag

SEQ ID NO: 16764 - DNA, 2763 bp, synthetic construct
  source 1..2763: mol_type = other DNA; note = Synthetic coding sequence
atgtctgaagattctgagaaggaggactattctgaccgaaccattagcgatgaggatgagtctgatgaggacatgttcatgaaattcgtttcagaggacctgcatagatgcgctctattaacagccgattcttttggcgacccattttttccccgcactacgcaaatcttgctcgaataccaactggggcgctgggtgccccggttgcgcgaaccgagagatctgtacggcgtgtccagttcaggccccctttcccctacccgctggccatatcattgtgaggtgatcgacgaaaaggtgcaacacatcgactggacaccatcctgtcccgagcccgtgtacataccgaccggcctcgaaaccgagcccctttaccctgattctaaagaggccactgttgtttaccttgccgaggacgcatacaaagagccttgctttgtgtacagcagggttggcggcaacaggactcccctgaaacaacctgtggactatagggataacactctcatgtttgaagcacgctttgaaagcggaaacctgcaaaaagttgtgaaagttgcagaatatgaatatcagctgacagtcaggcccgacctgttcacgaataagcacacccagtggtactattttcaggtgacaaatatgcgtgccggtatcgtttacagattcacgatcgtgaactttactaagcccgccagtctttattcccgcggtatgcggcccctgttttattcggagaaggaggcgaaggcccaccacattggttggcagaggattggggatcaaatcaagtactataggaacaacccgggacaggatggcagacactacttttccctgacatggaccttccaattcccccacaataaagatacttgctacttcgcccactgttatccatatacctacaccaatctccaggagtatctgtcgggtattaacaacgatcccgttaggagtaaattctgcaaaattagggtgctctgccacacactagcgagaaacatggtgtatatccttacgattaccacccctctcaaaaactccgatagccggaaaaggaaagcagtcatcctcaccgccagagtgcacccgggagaaaccaacagcagttggatcatgaaaggattcctagactatattctcggcaactctagcgacgctcaactactgcgcgatacatttgtgtttaaggtggtacccatgttgaatcctgacggggtaattgtcggaaactacaggtgttctctggccggacgcgatctgaatcggaactacacatctctcttgaaagagagcttcccctccgtctggtatacccgaaacatggttcataggctgatggagaagcgagaagttattctgtactgcgatctgcacgggcattccaggaaggagaacatctttatgtacgggtgcgatggcagtgatcgatccaaaacactctatcttcagcagagaatttttcccttaatgctatcgaagaattgtcccgataagttcagcttctccgcctgcaaatttaacgtccagaagagcaaggagggcacaggaagagtcgtgatgtggaaaatgggaatacgaaactccttcactatggaggctactttctgtggcagcaccctgggtaacaaaagaggtacccacttctcaaccaaggatctagagagcatgggttatcacttctgcgatagtctcttggactactgcgatcctgatcgtaccaaatactaccgatgcctcaaggagctagaggagatggagaggcacatcactttagaaaaggtgttcgaggacagtgataccccagtcatcgacatcacactcgacgtggagtcctctagcaggggatcggactcctctgagagcattgacagcttaacgtatctcttgaagctcacctcacagaagaaacacctcaagacaaaaaaagagaggaactctacaattgcctcacatcagaatgctcgaggacaggaagtgtatgaccgcgggcacctgttgcagcggcatacacagtcgaattcggatgtcaaggacactagacccaacgagccagacgactacatggtagactacttccgtaggcaactgcccaaccaggggctcgatctacaccataacctgaagagtaaaattaaggaatgtataagctttcagagcaagaaaactgggatcaattggacagacgacgaaaagcgttcttacaaggataagggcatcgttcaaacccaagagatcctgcagtacttgttaccgattgtccattctacaaagaacatgcaaaccactcaaatcaagcaactgtttaatccacgaaccaacttccaaattcagcaccagctcaaccctgctacatgcaggaatataaaaaagtactcaacttcttggacagctcctcggaaccaccccttcgtgatccaaggcgatgtgatggccaactcatcagagtgggttcagagtaaaccccacagatccctagaatcgctctctcccttaaaggggccaaagaagaataagcacagccagatctgggcaattaagaatgaggatatcaagccactttcatcaaagtgggagacagcaagtagtagcttcggcatggatgccaacgttttgaaatacaagtccttgcaggcggaagagactaatcaacagtcatcaaaacatactgcactgcatctgacgaagaataaggatgagcaggccaataaaaacgatgggcagccgaccctgtacctgaagtttcagcgggagtcctag

SEQ ID NO: 16765 - DNA, 858 bp, synthetic construct
  source 1..858: mol_type = other DNA; note = Synthetic coding sequence
atgaccaatgcacagataattcttctgattgataacgccaggatggcagtggatgactttaacctgaagtacgaaaacgaacactcatttaaaaaggaccttgagattgaagtggaagggctacggcggacattggacaacctcaccattgtgaccaccgacctcgagcaggaagtagagggtatgcgaaaagaactgatcctcatgaaaaagcatcacgagcaagagatggaaaagcatcacgtcccctcggactttaacgttaacgtgaaagttgacacagggcctcgcgaagacctgattaaggtgttggaggacatgcggcaggagtatgaattgatcattaaaaaaaagcaccgagacctggacacatggtacaaagagcaaagcgctgccatgtcccaggaggccgcatccccggccacagtccaatctcgccagggggacatccatgagctgaaacggactttccaagcactggagattgacctgcagacccagtacagcactaagagtgctttggaaaacatgctcagtgagacacagtctaggtacagttgtaaattacaggacatgcaggaaatcattagccactacgaagaagagctgacccaactccgtcatgagctggaaaggcaaaataatgaatatcaggtgctccttggcataaagacacatctggaaaaggaaattaccacatatcggcgccttctggaaggagagagtgaagggacacgggaggagagcaagtcatcaatgaaggtgtcagctacacccaagattaaggcgatcactcaagagacaatcaatggtcgactggttctgtgtcaggtcaacgaaattcagaagcacgcttag

SEQ ID NO: 16766 - DNA, 2013 bp, synthetic construct
  source 1..2013: mol_type = other DNA; note = Synthetic coding sequence
atgagcccatgttcaggcggcagaggcgaacttcgggcagcttgcctacagcctgaagttccaggcgccccagggctctcctggtggccttctacagccggcctgagacagagccaaacagaccttcaactgtcgctgtctatatggtgcggaaagaagatggggagttacctgagtgtgcccgcctattttactagcagggatctcttccgatgcagcgagtgtcaggattctttgaccaattggtactatgaaaaagatgggaaactatactgtccgaaggactactgggggaaattcggcgagttctgccatggctgcagcttactgatgaccggaccttttatggtcgccggcgagtttaaataccatccagagtgtttcgcctgtatgagttgcaaagtgatcatcgaggacggggacgcctacgctctggtgcagcatgcgactctgtactgtggcaaatgccacaatgaggtggtgttggctcctatgttcgaacgcctgtcaactgagtcagtccaggagcagctgccctattcagtcacactgatctcaatgcccgccactacagaaggcaggaggggatttagtgtcagcgtggagtctgcctgctccaactatgccaccaccgtgcaagtaaaggaggttaaccggatgcatatatcgcctaataacagaaatgctatccaccctggcgacagaattttggagatcaacgggactcctgttcggacactgcgggttgaagaggtggaggacgctatctcccagacatcccaaacccttcagctgcttatcgaacatgaccctgtgagtcaaagactcgaccagctgaggctggaagcccgtctggctccgcacatgcagaatgctggtcatccacacgctctgtccactctggacaccaaagagaatctcgagggtacattgagaagaagatccttgagacgaagcaatagcatcagtaaaagcccaggaccaagctctcccaaggagcctctgcttttttctagagatatatctagatcagagagtctaaggtgcagttcatcatactcacagcagattttccgaccctgcgacctgattcatggtgaggtgctaggcaagggattttttggacaggccatcaaagtcacccacaaggcaacgggcaaagtgatggtgatgaaagaattaatccgctgcgacgaggaaacacaaaagaccttcttaaccgaggtgaaggtgatgcgtagcctggatcatccaaatgtgcttaagttcataggagtcctatataaagataagaaactgaacctgttgaccgagtacatcgagggtggtactctgaaggatttcctgagatctatggacccttttccatggcagcagaaggtgcgattcgcaaagggaattgcctcagggatggcgtatctacattccatgtgcattatccatagagatctcaattcccacaattgcttgattaaactggacaaaacggtggtggtcgcggacttcggccttagcagactgatagtcgaggaaaggaaaagggctcccatggagaaggcaactactaagaagcgaacactgcgaaagaatgaccgaaaaaaacgttatacagtcgtggggaacccttattggatggccccagaaatgttgaacggaaagtcctacgatgagactgttgacatttttagttttggaattgtgctttgcgagataatcggccaggtgtacgctgaccccgattgtcttccccggaccctggactttggactgaacgtgaagctattttgggaaaaatttgtccccaccgattgtcccccagccttttttcccctcgccgccatctgctgcagactggagcccgagtcacgaccggccttcagcaagctcgaagactctttcgaggccctgtcgttatatctcggggaactgggcattccactgccggcagagctcgaggagcttgaccatacagtgagcatgcagtatggtctgactcgggactctcccccctag

SEQ ID NO: 16767 - DNA, 459 bp, synthetic construct
  source 1..459: mol_type = other DNA; note = Synthetic coding sequence
atggctcacctgcggggcttcgcaaatcagcattctcgtgtggaccctgaggagttatttacaaaactggaccggatcggtaaggggagttttggcgaagtgtataagggaatcgataatcacacaaaggaggttgttgcaatcaagattattgatctggaggaggcggaggacgagatcgaggacatccagcaggaaatcactgtgctaagtcagtgtgactccccttacatcactaggtactttggctcttatctgaagagcacgaagctttggattatcatggaatatttggggggaggatccgctcttgacctgctgaaaccgggtccattagaggaaacatacatcgctaccatcctgagagaaatccttaaaggactggattatctgcactctgagagaaaaatccatcgcgatattaaggccgctaatgtgcttctgtccgaacaaggctag

SEQ ID NO: 16768 - DNA, 1365 bp, synthetic construct
  source 1..1365: mol_type = other DNA; note = Synthetic coding sequence
atggccccttgccgagcccggaccgggccaagcacatggaggtctgcaacttcctcaactaggaggcggaagggcgcaaggagacacctatcagccctccaggtgctggagacctgcgtaaagaattgtgggcaccggtttcacgtgctggttgcctcacaggatttcgtggagtccgtcctggtgcggaccattctgcctaagaacaacccacccacaattgtgcacgataaagtactgaatctgattcagagctgggcagacgcatttcgttcaagcccagacctcacaggcgtggttacaatttacgaggaccttagaagaaagggtctggaatttcctatgactgatttggacatgctgagccccatccatacccctcaacggacagtgtttaactccgaaacacagagtggccaggactccgtaggtacagattcttctcaacaggaggattcgggccagcacgccgccccattaccagcccctccaatcctctccggagacactcctatagcccccactccagagcagatcggcaagctccggagcgaacttgaaatggtgtccggtaatgttagggtgatgtccgagatgttgaccgagctggtgcccacccaggccgaacctgccgatcttgagttgttacaggaacttaacaggacctgcagggctatgcagcagcgcgtactagagctcattcctcagatcgccaacgagcaactcaccgaagagctcctgatcgtcaatgataatttgaataacgtttttctcagacacgagcggtttgagcggttccgaactggtcaaacgactaaggcacccagtgaggcggaaccagcagccgatctgatagacatgggtcccgaccccgcagccaccgggaacctgtcatctcagctagctgggatgaaccttggttctagttctgttagggcaggtctgcagtccctggaggcatctggccggcttgaggacgaattcgatatgttcgcattgacacgaggaagttccctcgcagatcagcgaaaagaggtcaaatacgaggcaccacaggctacagacggcctggccggagccctggatgctaggcaacagagcaccggagcaattccggtcacccaagcttgcctcatggaagacatagaacagtggctgagtactgatgtcgggaatgatgcagaagagcctaaaggagtcacaagcgaggagtttgataaattcttggaagaacgtgctaaagctgccgatcggctcccaaatcttagctccccttcggccgaaggtccccctggccccccctccggtccagctcctaggaagaaaacccaggaaaaggatgacgatatgctgttcgcactgtag

SEQ ID NO: 16769 - DNA, 378 bp, synthetic construct
  source 1..378: mol_type = other DNA; note = Synthetic coding sequence
atgcagacttcttcatctagatccgtgcaccttagtgagtggcagaaaaattactttgccattacctccggaatctgtacaggaccgaaagcggacgcctatcgcgctcagattctgcggatccagtacgcctgggccaactccgaaatctctcaggtttgtgccacaaaactgtttaagaagtacgctgaaaagtactccgccataatagattctgataacgtggaaagtggactgaacaactacgcagaaaatattctgacgctggcaggtagccaacagacggactccgacaagtggcagtccggtctgtcaatcaataacgtatttaaaatgtctagcgtacagaaaatgatgcaggcagggaagaagttctag

SEQ ID NO: 16770 - DNA, 30 bp, synthetic construct
  source 1..30: mol_type = other DNA; note = Synthetic coding sequence
atgtctcacctgcaatctctattgctatag

SEQ ID NO: 16771 - DNA, 270 bp, synthetic construct
  source 1..270: mol_type = other DNA; note = Synthetic coding sequence
atgtcagaacaaggcgacttgaaccaggctattgccgaggagggtggaaccgaacaggagactgcaaccccagaaaatggaattgtgaagagcgagagcttagatgaggaagagaaattagagttgcaacggcgactggaagcccaaaatcaggagagacgcaaatccaagtctggtgctggcaaaggcaagctcactcgttcactggcggtgtgcgaggagagtagcgctcgacctggtggtgaaagtcttcaggaccagactctctag

SEQ ID NO: 16772 - DNA, 3732 bp, synthetic construct
  source 1..3732: mol_type = other DNA; note = Synthetic coding sequence
atgctgataaaagagtaccacatcttactaccaatgtccctggacgagtaccaggttgcccagctgtatatgatccagaaaaagtctagagaggagtcctccggagaaggtagcggcgtggaaatcctggccaaccgtccgtacacagacggacctggagggtctgggcagtatactcacaaggtgtatcacgtcggttctcacatccccggctggtttagggctctgctgcctaaagctgcacttcaggtggaagaggagagctggaacgcctatccttatacccgcactcgttacacctgtccgtttgtagaaaaattcagcatagagattgaaacgtactacctgccagacggcggtcagcagccaaacgtgttcaatctgtccggcgccgaacgcaggcagagaatacttgacaccatcgacatcgtacgcgatgcagttgctcctggcgagtacaaagccgaggaggacccgagactgtaccactccgtgaaaacagggaggggccccctgtcagatgactgggcccggaccgccgcccaaacgggccccctcatgtgtgcttacaagctttgcaaagtggagtttcgttattggggaatgcaggcaaaaatagagcagtttatacatgacgtcgggctgcgccgtgtgatgctgcgggctcaccgccaagcctggtgctggcaggatgaatggacggaactgtctatggctgacatccgggccctagaggaggaaactgctcgtatgctcgcccagcggatggcaaagtgcaatacaggcagcgaggggtccgaagctcaaccacctggaaagccctcaaccgaggcgagatcggcagctagtaatactgggactcctgatgggccagaggcacccccgggcccggacgcttcccctgacgcgtcttttgggaagcaatggtcttccagcagcaggtcgagctactcatcccagcacggcggcgcagtaagcccccagtctttaagtgaatggcgcatgcagaatatcgctcgtgactctgaaaactccagcgaggaggagttctttgatgcccatgagggattctccgattccgaggaggtgtttccaaaggagatgacaaaatggaactcaaacgacttcatcgacgccttcgccagccccgtggaagccgagggcactccagagcccggcgctgaagctgccaagggcatcgaggacggcgcccaagcccctagagacagtgaaggcctcgacggcgcaggcgagctcggcgcagaagcttgtgctgtccatgctctgtttctcatcttgcactctggcaatattctggactccggccctggtgacgctaacagtaaacaggcagacgtccaaacactaagctctgctttcgaggccgtaaccaggatccattttcccgaggctctgggccacgtagccctgagactggtgccatgccctcctatatgcgcagccgcttatgccctagtctccaacctgagtccttatagccacgacggtgactctctgagccggagccaagaccatattccactggctgcccttcccctcctggccacctccagctcacgatatcagggtgcagttgcgactgtaatagcgcgaaccaatcaagcctactcagccttcttgcggagccccgagggagcaggtttctgcgggcaggttgccttaataggcgacggagttggtggaattcttggttttgatgccttgtgccatagtgcgaacgctgggacaggatctaggggcagctcgcggagaggctccatgaataatgaattgctgtcgcctgaatttggccccgtgagagatccgctagccgatggggttgaagggctaggccgggggagtcctgaaccgtctgcattgccaccccaacgcattccatccgatatggctagtcccgaaccagaaggatcccaaaacagcctccaggcagcaccggcaaccacaagcagctgggagccacggcgcgccagtacagctttctgccccccagccgcttcctccgaagctcccgacggtccctcaagcaccgctagactcgattttaaggtatctgggttcttcctcttcggtagtccgcttggcctggtcctcgctctgcggaagaccgtcatgcccgccctcgaggcccagatgaggccagcatgcgagcagatctacaatttgttccacgctgccgacccatgcgcgtcgcggctcgaacccctgctggcccccaaatttcaggcaattgcaccactcacggtgccccgataccagaagtttcccctcggcgatggatcatcgctcctgttagcagatactctacagacccactctagtctcttcctggaggagctagagatgctggtgccaagcacaccaacaagcacgtccggcgccttttggaagggctctgagctggccaccgatccaccggctcagcctgccgccccaagcaccacctctgaggttgtgaagattctggagcgctggtggggtacaaaaaggatcgactactcactgtactgtcctgaggccctgacagcctttccgaccgtaacccttcctcacctcttccatgcctcgtattgggaaagcgctgatgtcgtcgctttcatcttgagacaggttattgaaaaggagcggccccagcttgccgagtgcgaggagccatcgatctactccccggcatttccacgtgagaaatggcagcggaagaggacacaggtcaagatacgaaacgtcacctcaaatcacagggcatctgatactgtagtgtgcgagggccgcccgcaggtgctaagtggcaggtttatgtatggccccttagatgtggtgacactcacaggggagaaggtggacgtctacattatgacgcagcccctctcagggaagtggattcactttggaactgaagtgactaatagctccggaaggctcaccttcccagtccctcccgagagagctctgggcataggtgtatatcccgtccggatggtggtgagaggcgatcatacttatgcagagtgttgtcttactgtagtggcacggggaaccgaggctgtggtttttagtatcgacggtagcttcacggcttctgtaagtatcatggggtctgatcccaaggttcgggcgggtgctgtcgatgtcgtgcggcattggcaggactctggctacctgatcgtctacgttaccggaaggcccgacatgcagaagcaccgagtagtcgcgtggctgtctcagcataacttcccgcacggggtggtctcattctgtgacggcctcacccacgaccctctcagacaaaaagcaatgtttttgcagtccctggtccaagaagtcgagttgaacattgtagcaggctacggctctccaaaagatgtggcggtttacgccgctctgggtctctccccaagtcagacatatattgtaggaagagcggtccggaagctgcaggcacaatgtcagtttctgtccgacgggtatgtggcccacctgggtcaactcgaagctggaagccactctcacgcatcttcaggtccacctcgggccgcgctcggtaaatcaagctatggggtcgcagcccctgtcgatttcctgcgcaaacaaagccagctcctgcggtccagaggcccgagccaggctgagcgggagggacctggaacacccccaacaactctggcacggggcaaggctaggagcatatccttgaaattggattccgaggaatag

SEQ ID NO: 16773 - DNA, 1614 bp, synthetic construct
  source 1..1614: mol_type = other DNA; note = Synthetic coding sequence
atgtcctcttctggttatcctccgaaccagggtgccttctccaccgagcagagccggtacccgcctcacagcgtgcagtatacctttccaaatactcgacaccagcaagaattcgcagttcccgactaccggtcttcacatcttgaagtgtcacaggcctcccaattactgcagcaacagcagcagcagcaactaaggagacggccaagcttactgagtgagttccacccagggtccgaccgaccccaggagcggcggaccagctatgagcccttccatccaggcccatcaccggttgaccacgatagcctggagtccaagcgaccaaggttagagcaggtgtccgatagtcactttcaaagggtgagtgccgccgttctgcccttagtgcatcctctgccagagggactgagggcaagcgctgatgcgaagaaggatcccgcattcggcggcaagcatgaagcaccttctagccccatttctggacagccctgtggcgatgaccagaacgcctctccctcaaaattgagcaaagaggaattgatccagtccatggatagggtggacagagagattgctaaagtagagcagcagattctgaagctgaagaaaaaacagcagcagctcgaggaggaagcagctaaaccccccgaaccagagaaacctgtgtctccccctcctgtggaacaaaagcataggagtatcgtgcaaataatttatgatgagaatcgaaagaaagcggaagaggcacacaaaatcttcgagggcttaggccccaaagtagagctccctttgtataatcagccatcagacaccaaagtgtaccacgagaatataaaaaccggggtccctgcacggagaatgatgaaaaaccaagtgatgcggaagaaacttatcctgttctttaaacggagaaaccacgcccgtaagcagagagagcagaagatttgtcagcgttatgatcagctgatggaggcttgggagaagaaagtagatcgtattgaaaataaccctcggcggaaagccaaggagagtaagacccgcgaatactacgagaagcaatttccagagatcagaaaacagcgagagcagcaggaaaggttccagcgggtgggccagcggggagccggcctttccgccacgattgcccgaagcgaacacgagatatctgaaatcattgacggtttgtctgaacaggaaaacaatgagaaacagatgagacagctgtcagtcatacctcccatgatgtttgacgccgagcagcggagggtgaagttcattaacatgaatggcttgatggaagaccctatgaaggtctacaaagatcgacagtttatgaatgtgtggaccgaccatgagaaggaaatctttaaggacaaattcattcaacaccccaaaaactttggcttgatagcttcctacctggagaggaaaagtgtgcccgactgcgttctgtactactacctgaccaaaaaaaatgaaaattacaaagccttagtccgacggaactatgggaagagacggggtcgaaaccagcagattgcaagaccttcccaggaagaaaaggtggaggaaaaggaggaggacaaagccgagaagacagaaaaaaagtag

SEQ ID NO: 16774 - DNA, 147 bp, synthetic construct
  source 1..147: mol_type = other DNA; note = Synthetic coding sequence
atggaggacctgttcgagacatttcaggatgaaatgggcttttctaacatggaggacgacggtccggaagaagaggagcgcgtcgcagaaccacaggcaaatttcaacaccccccaagccttgaggcaactcctgctgctgatgtag

SEQ ID NO: 16775 - DNA, 798 bp, synthetic construct
  source 1..798: mol_type = other DNA; note = Synthetic coding sequence
atggcatccagctctgtcccacctgctacagtgtccgccgcaacggcagggcctggcccagggttcggattcgcgtcgaaaacaaaaaagaagcatttcgtacagcagaaggtaaaagtattccgggccgcagatcccttagtcggcgttttcctgtggggtgtagcacacagcattaacgagttaagtcaggtgcccccaccagtgatgcttctgccagacgattttaaggcaagttcaaaaatcaaggtcaataatcatttgtttcatagagaaaatttgccttcccactttaagtttaaggagtactgcccacaggtgttccgcaatctccgagacagatttgggatcgacgaccaagattatctcgtcagtctcacccgtaaccccccttccgaatcagaggggtccgacgggcgattcctgatatcctacgaccgtactcttgttataaaagaggtgtccagcgaagacatcgctgatatgcatagcaatctatccaactatcaccagtatatcgttaaatgtcacggtaatacactccttccacagttcctggggatgtatagagtttccgtagacaacgaggacagctacatgttggttatgagaaacatgtttagtcaccggctgcccgttcaccgcaaatatgacctcaaaggatctttagtttctcgtgagccagcaattcggaagagactcaaaaactgtcctccactgaggatttggacatttagtacgagaaccaggaagtatatcttagtcaagagacgcagaaaatacttctggagaagttag

SEQ ID NO: 16776 - DNA, 462 bp, synthetic construct
  source 1..462: mol_type = other DNA; note = Synthetic coding sequence
atgagcccggaagtggcgttgaacagaatctcacccatgctgagtccatttataagtagcgtcgtgaggaatggcaaggtcggattggacgcgactaactgtttgagaatcacggatcttaagagcggatgtaccagcctgactcctggaccaaattgtgataggttcaaacttcatatcccctatgccggtgaaacgctgaagtgggacatcatcttcaatgcacagtacccggagctgccccccgattttatcttcggcgaagatgctgagttccttccagacccctctgccctgcagaatctggcctcgtggaatccgtctaacccagagtgtctgttgcttgtcgtcaaggagctcgtacagcagtatcatcagttccaatgtagccgccttcgcgagtcctcacgcttgatgttcgaataccaaaccttgctagaggagccccagtacggcgagtag

SEQ ID NO: 16777 - DNA, 78 bp, synthetic construct
  source 1..78: mol_type = other DNA; note = Synthetic coding sequence
atggagctgcgttgtggaggactcctgttttccagcagattcgatagcggcaacctggcccacgttgaaaaggtgtag

SEQ ID NO: 16778 - DNA, 228 bp, synthetic construct
  source 1..228: mol_type = other DNA; note = Synthetic coding sequence
atggcctccgaagtggggcataatttggaatccccggagacaccaggtggcgggggctggactcgggtggaatttccccctccagcgccgaagggcgcggctaccgtctggtgtcttaataggcttggctcgcgaaagttatcactgatctggatcacatttaatactggttggaatatgaagtctagacttataattttgattcagcaggtgagttgtcaccattag

SEQ ID NO: 16779 - DNA, 1620 bp, synthetic construct
  source 1..1620: mol_type = other DNA; note = Synthetic coding sequence
atggctacttcagcacctctgcgctccctcgaggaggaagtcacgtgctccatctgcttagactatctgcgcgatccagtgacaattgactgtggtcacgtgttctgccgctcctgcacaactgacgttcggccaattagtgggtcgagaccagtgtgtccgctgtgtaaaaaaccgttcaagaaggagaatattcgccccgtgtggcaactggcctcattggtggaaaatatcgagaggttaaaagtggataaaggcagacagcccggggaagtcacaagagaacagcaggatgccaaactttgcgagcgccacagggagaagttgcactattattgcgaggatgatggaaagctactgtgcgtgatgtgtagggagagcagagagcacaggccccacacggccgtcttgatggaaaaggccgcccaaccacacagggaaaagatacttaaccatttgagtaccttacggcgggacagagacaaaatccaggggttccaagccaagggggaagccgacatcttagccgctctgaagaagctgcaggatcaaaggcaatatatcgtcgccgaattcgaacagggccaccagttcctgagagaaagggaggaacatttgctcgagcagctggctaaactcgaacaggagctaaccgagggtcgggagaaattcaaatcccggggtgtcggcgagctagcgaggctcgcattagtcatcagtgaactagagggtaaggcccaacaaccagcagccgagttaatgcaggacacccgagattttctcaatagataccctcggaaaaagttttgggtgggtaagccgatcgccagagtagttaaaaagaagacaggtgaattcagtgataagttactatcccttcagcgcggcctcagagagtttcagggaaagctgctgcgcgacctggagtataagacagtgtccgtgacccttgacccacagtcagcaagcggctaccttcagctaagtgaagactggaagtgcgtcacctatactagcctgtacaaatctgcttacctgcacccacaacagttcgattgcgaacccggagtacttggtagtaagggcttcacatggggcaaagtatattgggaagtggaagttgagagagaagggtggagcgaagacgaagaggagggcgacgaagaggaagaaggtgaggaagaagaagaggaagaagaggctggctacggagacggttacgacgattgggaaacagacgaagatgaagaatcactaggcgacgaagaagaggaggaagaggaggaggaggaagaagtgctcgagtcttgcatggtcggtgtggcgcgcgattcagtcaagcggaagggcgatctgagcctcaggccagaagacggcgtgtgggcccttcggctcagcagctctgggatttgggccaacacctcgcctgaagcggagctgttcccagccctgcggccccgacgcgtgggaattgcgctggactacgagggaggtactgtgacatttaccaatgcagaatcacaggagctgatatatacatttactgcgaccttcaccaggcggctcgttccttttttgtggctcaagtggccagggactagattactcctgcgaccatag

SEQ ID NO: 16780 - DNA, 390 bp, synthetic construct
  source 1..390: mol_type = other DNA; note = Synthetic coding sequence
atgcctgggttatcctgccggttctaccagcataaattccccgaggtggaagacgtagtcatggtcaacgtccggagcatcgccgagatgggcgcctacgtgtctctgctcgagtacaacaatatcgaggggatgattctcctgtccgaattatcaagaagacggattcggagcatcaataaattgatccggattggacgcaacgagtgcgttgtggtgatacgagttgataaggagaaaggctacatagacctttccaagaggcggctgacgctctgggaaactgaaagcaaccttaggaacacagaacaaaggtttctggcagttaaccctcggcttgagtcatttcctgtgctaaagacctctaaactgaatatattttatttctag

SEQ ID NO: 16781 - DNA, 1842 bp, synthetic construct
  source 1..1842: mol_type = other DNA; note = Synthetic coding sequence
atggcaacaattccagactggaaactgcagttactagcccgccgccgccaggaagaagcatccgtaagagggagagaaaaggctgaacgtgagcggctgtcacagatgcccgcctggaaacgggggttgttagagcggcggcgagcaaagctgggcctttccccaggtgagccaagtccagtcctgggtacagtcgaagccgggccacccgaccctgacgagagcgcagttctgctggaggccatcggaccagtgcaccagaacagattcatcaggcaggagagacagcagcaacagcagcagcagcagcggtcagaagaacttctggctgagcggaagccaggcccgctcgaggcacgggagagaagaccttctcccggagagatgcgcgatcagtccccgaagggaagggaatcccgggaggaaaggttgtctcccagagaaacacgcgaaagaagactgggcatcggaggggcgcaagagctgtctcttcgaccactggaggccagggattggaggcagagcccaggtgaggtgggcgaccgaagctctagattgtctgaggcttggaagtggcggctgagcccaggggaaacccccgaaaggagcctgaggctggcagaaagtcgggagcagtctccacggcggaaggaggtcgaatctaggctgtcccccggggagtccgcctaccagaagctgggactgacagaggcgcacaaatggcgccccgacagccgcgaaagtcaggaacagagcctcgtgcaattggaagcaactgagtggcgcctgaggtccggcgaggagagacaggattattccgaggaatgtggacgaaaagaggaatggcccgtgccaggagtggccccaaaggaaactgctgagctgagcgagaccctgacccgtgaagcccaaggaaattcatcagctggggtggaggcggccgaacagagaccagtggaggatggcgagcgcggcatgaaacccaccgaaggatggaagtggaccctgaatagcggaaaggccagggaatggacacccagagatatcgaggctcagacacagaagcccgaacccccggaaagtgccgaaaaactgctggagtctcccggggttgaggcaggagagggggaagcggaaaaagaagaagccggcgcacagggccgccctcttagagccctgcaaaactgctgcagtgtccccagtccgttaccccccgaggacgctggaactggtggcttgcgtcaacaagaggaggaagctgtggaacttcagccacccccgcccgctcctctgagccccccaccacctgctcccacggcccctcagccccctggcgatccactcatgagccggctgttctacggcgtcaaggccggtcctggtgtgggcgctcctcgacggtccggacatacattcaccgttaacccaaggcgatcagtcccacccgctaccccagccaccccaacctccccagctactgtcgacgctgctgttcccggcgccggtaaaaagagataccccacagccgaggagatcctggtgctaggcggctacttaagactctctcgaagctgtctggctaagggaagccctgaacgccatcataagcagctcaagatctctttctcagaaacagccttagagaccacttatcagtatccatctgagtctagtgtgctcgaggaactcggacctgagcccgaagtaccctccgcccctaacccgcccgccgcccagcctgacgatgaagaagatgaagaagaactcctgctgctccagcccgaactgcaagggggactcagaaccaaggcccttattgtggacgagagctgcaggcggtag

SEQ ID NO: 16782 - DNA, 1983 bp, synthetic construct
  source 1..1983: mol_type = other DNA; note = Synthetic coding sequence
attgccaagccgcagggtacatatcaggtgttaccccccaatacagggagtctatacatcgataaggactgctccgccgtctattgccacgagtcttcatccaatatttactatccattccagaaacgggaacagctgcgcgctgggaggtatatcatgagacacacctcggaggtcatttgtgaagttctcgaccccgagggaaataccttccaggtcatggccgatgggagtatcagtacaattctgccagaaaaaaagctggaagacgatctgaacgagaagactgagggctatgattccctctcttcaatgcaccttgaaaaaaaccaccagcagatatacggcgaacacgtcccacgttttttcgtgatgtacgccgacgggagcggcatggagttgctcagggactcggacatagaggagtacctgtctctcgcttataaagagtctaataccgtggtactgcaggagcctgtgcaggaacaacctgggaccctaaccattactgtcctccggcccttccatgaggcaagtccctggcaagtgaagaaggaggatactattgtgcccccaaatttacgctctagatcctgggaaacattccctagcgtggagaagaaaaccccaggacctccattcggaacgcagatttggaagggtctttgtattgagtctaagcaactcgtcagtgcccccggtgcaatattgaagtctcctagcgtgttgcaaatgcgccaatttattcaacacgaagtgatcaagaacgaagtaaagttgcgacttcaggttagtttaaaagactacatcaattatatcttgaaaaaagaagatgaactgcaagagatgatggtcaaggactcccgtacagaagaagaaaggggcaacgccgccgatctacttaaactcgtgatgtcattccccaaaatggaggagaccacaaaaagccatgtgacggaagttgccgcccacctcacggacctctttaaacaatctttggcgaccccacccaaatgcccaccggacacatttggcaaggacttcttcgaaaagacttggcggcacaccgccagcagcaagaggtggaaggagaaaatcgacaagacacgaaaagaaattgaaaccacacagaattatttaatggatattaaaaataggatcatccctcccttctttaagagcgagctaaatcagttgtatcagagtcagtataaccaccttgacagtcttagcaagaagttgccctcatttacgaaaaagaacgaggacgccaatgagaccgcagttcaagacaccagtgacctgaacctagatttcaaaccacataaggtctccgaacagaagagcagcagcgtccctagcctgcctaaacctgaaatctcggctgacaaaaaggatttcaccgcacagaaccagacggagaatttgacaaagagccccgaggaggccgagagttacgagcccgtgaagattccaacacagtccttgttgcaggatgtggctggtcaaactcgaaaggagaaggtgaagctccctcactatctgctctcatccaaacctaagagtcagccactcgcaaaagtgcaggactctgtgggcggcaaggtcaatacttcttctgtggcctccgccgccattaataacgccaagagtagcttattcggattccacctcctaccctcgtcagtcaaattcggcgtgctgaaggaagggcacacttacgcgacagtagtgaaacttaagaacgtcggggtggacttctgtaggtttaaggtcaaacaacctccaccaagtacaggcctgaaggtgacttataaacctggtccagttgccgctggcatgcagaccgagcttaatattgagttgttcgctactgccgtgggtgaagatggcgccaaaggtagcgcccacatctctcataacattgaaataatgacagagcatgaagtcctctttctgcctgtcgaagccaatattctttag

SEQ ID NO: 16783 - DNA, 2475 bp, synthetic construct
  source 1..2475: mol_type = other DNA; note = Synthetic coding sequence
atgtactccaatgaggacagcagacagactatagtgtatagcgaagaatctaacaccactatgagttacactcaaaaaattaccaatcctttgccggccgcttcatcgacagaccctgctcccttcgccaatatcaatactcctgtgctgcaggaagattaccgccaggacagtcagacgagaaggatctctacacttaagctgactcataaccaggacctgggaagctcctctcctatttccactccacagttttctaaaagtgtcgaggtgccatcattccttaagaggcccaggtcgctgaccccaaaccccgtgcctgaaactcataccgcatcgttgagcattcaaatagcccccctttccggacaagatctcgaaagtcacaagcagctgccggagctgagccctgaaacagccaagattcctctgcagcaagagagacagaagagcgcagtcgctgccgcatctcaatcttctgactgtcgcgtgtcgcagatcacggtcaacggaaacagtgggggtgccgtgtccccgatgtcatactatcaacgcccgttttcacccagcgcttatagcttgcccgcgagtctcaactccagcatcgtcatgcagcacggcacaagtctcgatagcacagatacataccctcagcatgctcagtctctcgacggcacaaccagctctagtatccccctatacagatccagcgaggaagaaaaaagggtaaccgttatcaaagcaccacattacccaggcatagggcccgtggatgagtccggcataccgaccgccatccgcaccaccgtggataggccaaaggactggtacaaaacaatgtttaaacagattcacatggtccacaagcccgatgatgacaccgatatgtacaataccccatacacctataacgcagggctctacaatcctccatactcagctcagtcacatcccgcggcaaaaactcagacttataggcccctctctaagtctcactcggacaattcccctaacgcatttaaggatgcctccagccccgtcccgccacctcacgtacctccccctgttcctccactgcgtccccgcgaccggagctcaaccgagaagcacgactgggatccacctgatagaaaagttgatactaggaaatttcgctctgagccgcgttccatcttcgagtacgagcccgggaaaagcagtatcctgcagcatgaaagaccaccccctcttccaaccacacccacacccgtgccccgcgaaccaggccgaaagccgcttagcagttctcgtctcggggaagttactgggagtcctagcccaccgccccgttccggcgcaccaactccttccagtagagcacctgcgctatcccctactcgcccccctaaaaaaccgctggactatgttcaggaccacagcagcggcgtcttcaatgaggcctcactgtaccaatcctccattgaccgcagcctcgaacgccccatgagttccgctagtatggcctccgactttaggaagcgccggaaatcagagcccgccgttggccctccccgtgggttaggcgaccagtccgcctcaagaacgtctcccgggagagtggacctgcctgggtcgtcaacaacgctcacgaaatccttcacaagttcaagtccttcctcgccctcgcgcgccaaggacagggagtcaccacgctcgtatagctccacccttactgacatgggacgaagcgcccccagagaaaggcgcgggacacccgagaaggaaaagttacctgccaaagctgtgtatgatttcaaggctcagacatctaaagagttgagttttaagaaaggcgacaccgtgtacatacttcgcaaaatcgatcaaaactggtatgaaggtgaacatcacggcagggtggggatcttcccaattagctatgtggagaagctcactccacccgaaaaggcacagccagcccgcccacctcccccagcccagcccggggaaattggagaggccattgccaaatacaatttcaatgctgataccaatgtcgaattatcactccgaaagggagatcgggtgatactgctcaagcgtgtggaccaaaactggtatgaaggaaagattccaggcacgaaccgacagggcatcttcccagtgagctatgtggaagtcgtaaaaaaaaatacaaaaggcgcagaggactatccggatcctccaatccctcacagctacagctccgatcggatacattctctctccagcaacaagccacagcgccctgtgttcacacatgagaacattcagggaggaggcgagcctttccaagcgctgtataactacaccccacggaacgaagatgaactggaactgcgtgaatcagacgtaatcgacgtcatggagaagtgcgacgatggctggttcgtaggcaccagcaggcgaaccaagttcttcggaactttcccaggaaattacgtgaagcgtttatag

SEQ ID NO: 16784 - DNA, 228 bp, synthetic construct
  source 1..228: mol_type = other DNA; note = Synthetic coding sequence
atgcggtactatggctcctactaccggggtctggggtatggatgtgggggtttcgggggcctgggatacgggtgcggttgtggagggtaccgctacggaagtggctatggcgggtacagatacggctgctgcaggccctcatgcagagagggctacggtttctccggatttaagaaactggccgactctcataccttaacccctaggtcctgcccatatgctagctag

SEQ ID NO: 16785 - DNA, 183 bp, synthetic construct
  source 1..183: mol_type = other DNA; note = Synthetic coding sequence
atggtcttaatcttaggacggagactgaatagggaagatctgggagtgcgcgactccccagcaaccaaacgcaaggtatttgagatggaccctaaatccttgacaggccatgaatttttcgatttctcaagtgggtcatcccatgccgaaaatattctccagatcttcaacgaatttagatag

SEQ ID NO: 16786 - DNA, 600 bp, synthetic construct
  source 1..600: mol_type = other DNA; note = Synthetic coding sequence
atgaaactcgggaagaaacctatgtacaagccagtggacccatattcccggatgcagagcacatacaactacaacatgcgcgggggagcctacccacccaggtacttctaccccttccctgttccacccctgctgtatcaggttgagttgtccgtgggcggacagcagtttaacggcaaggggaaaactcggcaggctgccaaacatgacgcagcagcaaaagcccttcgaatcttgcaaaacgagcccctacctgagaggctggaagttaatgggagagaatccgaagaagaaaatctaaataagagcgagatcagccaggtgttcgaaattgcgttgaagcgcaatctgcctgtgaacttcgagagctttcctctcaaacaggtggctagagagtctggaccaccccacatgaagaatttcgtcaccaaagtcagtgttggcgaatttgtaggggagggagagggaaagagcaagaagatttccaagaagaacgctgcaattgccgttctggaggagctgaaaaagctaccacccctcccagcagttgaacgagtgaaacctagaatcaagaagaagactaagcctattgtgaagtag

SEQ ID NO: 16787 - DNA, 2685 bp, synthetic construct
  source 1..2685: mol_type = other DNA; note = Synthetic coding sequence
atgccagagcagttttcagttgccgagttcttggccgtaacagccgaggatctgtcctccccggcaggggccgcagctttcgccgcaaaaatgcccagatataggggagccgcacttgccagagaagagattcttgagggggatcaggccatattgcagaggatcaaaaaagctgttagggcaattcattctagtgggctgggtcatgttgaaaacgaggaacaatatcgagaagccgttgagagcctggggaactcccatttgagccaaaactctcatgagctgagcacaggtttcctgaacttagccgtgttcactcgcgaagttgctgcactattcaaaaatttaatccaaaacctgaataacatcgtttctttcccgctagactccttgatgaagggccagctgcgcgatggacggcaggcctccctgagtctcggaagtagggccaaactagagaaagaacgggatagagccagggtcaccggaggaatcccaggcgaggtcgctcaggatatgcagcgtgagagaagaattttccagctccatatgtgcgaatacctcctgaaggcaggtgagtcgcagatgaaacagggccccgatttcttgcagagtctgataaagttcttccacgcacagcataatttcttccaggatggctggaaggcggcccagtccctctttccttttatcgaaaagttggcggcaagcgtccatgccctgcaccaggcccaggaggacgagcttcaaaaattgacccaactgcgcgacagcctgagggggacacttcagctcgaatcacgcgaggaacacttatctaggaaaaattccggatgtgggtactctatccaccagcatcaaggtaacaagcagttcggcacagaaaaggtgggctttctgtacaagaagtccgacggtatccggcgggtgtggcagaaacgcaagtgtggtgttaaatacgggtgtctgaccatcagccactccacaatcaaccggcctcccgttaagcttactttgctgacatgccaggttcgccccaatcctgaagaaaaaaaatgctttgacctcgtgactcataataggacttaccacttccaggctgaggacgagcacgagtgcgaagcctgggtgtctgtgctgcagaatagcaaagatgaagcactgagctctgccttcctcggcgagccaagcgcgggccctggcagttggggctccgccgggcacgacggcgagccccatgatttgacaaaactgctaatcgccgaagttaagtctcgccctggcaattcacagtgctgtgactgcggcgcagccgatccaacctggctcagcacaaatctgggagtcctaacttgcattcagtgcagtggagtgcaccgggagttgggtgtgcggttcagccgcatgcaaagtctgactctggaccttttaggacccagtgagctgctgctcgcgttgaatatgggtaacacatcctttaatgaagttatggaagcccagctcccctctcacggtggtcctaagccaagtgccgagtcagatatgggtacaaggagagactacataatggccaaatatgttgaacatagatttgcgcggagatgtactcccgagcctcaacgtctttggaccgccatctgcaaccgggacctactgtctgtgctcgaggctttcgcaaacggccaggatttcggacagccactgccggggccagatgctcaggctcctgaggagctagttcttcacctcgcggtcaaagtggctaaccaggctagtctccccctggtcgacttcattatccagaatggtggacatctcgatgctaaggctgcagatggcaacacagccttgcactacgccgccctctataaccagcccgactgcctgaagctgcttctcaaagggcgggcacttgttgggacggttaacgaagctggcgagacagctctggacatcgctagaaagaaacaccataaggagtgcgaggagttgctggagcaggcacaagcaggaacattcgcctttcctctgcatgtggactacagctgggttatctccacggagcccgggagcgacagcgaggaagacgaggaggagaagagatgcttgctgaagctacccgcacaggctcactgggcatccggacggctcgacatctcaaacaagacatacgaaacagtagcctcactcggcgcggccacaccccagggtgagtccgaggattgtccccccccgctgcccgtgaagaactctagtcgcacgttggtccaggggtgcgctagacacgcatcaggtgatcgaagtgaagtcagcagcttatcgtctgaggcccccgagacccctgaatccctgggatctcctgctagcagcagttcattgatgtccccgctcgagccgggggacccaagccaggccccgcctaattccgaagaaggcttgagagagcctccaggtacatctcgccctagcttgacgtccggtactacgccgagtgagatgtacctgcccgttcggttcagctccgaaagtactcgctcctatcggcggggcgcgcggagtcctgaagatggaccctctgcacgacaaccacttcctaggcggaacgtgccagtcggcataaccgaaggcgatggctccaggaccggatcactccccgcctcatcagtccaactcctccaggattag

SEQ ID NO: 16788 - DNA, 354 bp, synthetic construct
  source 1..354: mol_type = other DNA; note = Synthetic coding sequence
atggctttctcagggcgcgcgcgtccatgcatcattccagagaacgaagagatccctagggccgccttgaacaccgttcacgaggcaaacgggactgaagacgagagagccgtgtctaagcttcagcgcagacattcagatgttaaagtatacaaagagttctgcgatttctatgccaagttcaacatggccaatgccctcgcctcagcaacgtgtgagcgatgcaagggcggtttcgcccccgccgagaccatcgtgaattccaacggggagctgtatcatgagcagtgctttgtttgtgcacagtgtttccaacagttccccgagggcctgttttacgaggaaagaacctag

SEQ ID NO: 16789 - DNA, 1797 bp, synthetic construct
  source 1..1797: mol_type = other DNA; note = Synthetic coding sequence
atgttcgtgtctgatttcaggaaggaattctatgaagtggtccagtcccagcgggttttacttttcgtggcaagcgacgtggacgcactctgtgcctgtaagatcctgcaagccctcttccagtgtgatcacgtgcagtacaccttggtgccagtgagcggttggcaggaattggagacagcttttcttgaacataaggaacagttccactacttcattctgatcaattgcggggctaacgtggatctactagacattctgcaacctgatgaggatacaatctttttcgtctgcgacacacaccggccagtcaatgttgtcaatgtgtataatgatacccagatcaaactactaatcaagcaagacgacgacttggaggtgccagcttacgaggacatcttcagggacgaggaggaggacgaggaacatagtgggaacgattcagacggcagcgaacccagtgagaagcgaactagactcgaagaggaaattgtggagcagactatgagaaggaggcagaggcgcgagtgggaagcccggagcggctctggctccgaaccagttgccgccgcgctagaaaagagtagtagactgttcgctgggcccatgtctgaccgcaccgcccctaggagtcctcgacgcgacattctgttcgactatgaacagtatgaataccacggaactagcagcgccatggttatgttcgaattagcttggatgctttctaaagaccttaacgatatgctttggtgggccatcgtgggtctgactgaccagtgggttcaggacaaaatcacccaaatgaaatacgtaaccgacgtgggagtgcttcaaaggcacgtaagtcggcataaccacaggaatgaggatgaggagaataccctcagcgtagattgtacaagaatctcgttcgagtatgacctgcgcttagttctgtatcaacactggtcccttcacgatagtttgtgtaacacaagctacaccgctgcgcgtttcaaactctggagtgtgcatgggcagaaaagactgcaggaattcctggctgacatgggattacctctgaaacaggttaaacaaaaatttcaagccatggatatttctctcaaggagaatctgcgcgagatgattgaagaatccgcaaataagtttgggatgaaggatatgagggtacagaccttcagcatacactttggttttaagcacaagttccttgccagtgatgtggtgttcgcaactatgagtctcatggagtcaccggagaaagatggtagcggtaccgatcactttattcaagccctggactctttaagcagaagcaacctggataagctgtaccatggactggaattggcgaagaagcaattgcgggccacccaacagaccatcgcttcatgtttatgtacaaatctcgttatatctcagggtccttttctgtactgtagcttaatggaggggacgcctgacgtgatgctgttcagccgacccgccagtctgtctctattgtcaaagcacctcctgaagagttttgtgtgcagcaccaagaatagacgctgtaagctgctacctctagtgatggccgctcccctgagtatggaacacggaaccgtaaccgttgtgggcatcccccccgaaactgatagctctgatcgcaagaacttctttggtagggcctttgagaaggctgccgagagcacctccagcagaatgttacacaaccattttgacctgtccgtgatcgaactaaaggcagaagacaggagcaagtttctcgacgccctgatcagtctgttgagttag

SEQ ID NO: 16790 - DNA, 2994 bp, synthetic construct
  source 1..2994: mol_type = other DNA; note = Synthetic coding sequence
atgccatcggagaagaagattagtagtgccaacgactgcatttccttcatgcaggcaggatgtgagcttaaaaaggtccggcctaatagtagaatttataatagattcttcacacttgacactgacctgcaggcgctgcgctgggagcctagcaagaaggatctggagaaagccaagctcgatatctcagctatcaaggaaatcaggctggggaaaaatacagaaactttccggaataatgggcttgcagatcagatttgcgaggactgtgctttctccatcctgcatggcgaaaattatgaaagtctggatctcgtggccaactcagccgatgtagcgaatatttgggtctcaggactgagatatttggtctcacgttcaaaacagcccctggattttatggagggtaaccagaatacgcctaggtttatgtggctcaagacggtttttgaggccgctgacgtggacggaaatgggatcatgttggaggacacttcagtggagcttattaagcaactgaaccctactctcaaagaggccaaaatacgactgaagtttaaggaaattcagaagtccaaagagaagctaaccacgcgggtcacagaggaagaattctgcgaggccttttgtgagctctgtacccgccccgaggtatatttcctgctggtgcaaatttctaaaaataaagaatatctggatgctaacgaccttatgctcttcctcgaagccgaacagggagtcacacacattaccgaagacatttgcctggacattatcagacgctacgagctgagcgaggagggccgccagaaagggtttctggccatcgacggctttacccagtacctgttgtcgagtgaatgtgacatatttgaccccgagcagaagaaagttgcacaggacatgacacagccattaagccactactatatcaatgccagtcacaatacttacctgatcgaagaccagtttcgcgggcccgctgatatcaacggttacattagggccttgaaaatgggatgccgatccgtggaactcgacgtgagtgatgggagcgataatgaacccatcctctgtaatcggaataacatgactacacacgtcagcttccggtccgtaattgaagtgatcaacaaatttgcttttgtcgctagcgagtacccactgattttgtgtcttggcaatcactgtagccttcctcaacagaaggtgatggctcaacagatgaaaaaagtgttcgggaacaagttgtacacggaagcccctttacctagcgaaagctatctgccaagcccggaaaaactgaaacggatgatcattgtgaagggcaaaaagctcccgtccgaccccgacgtcctggagggtgaggtgacagacgaagacgaggaggctgagatgagtcgccggatgagcgtggactacaacggcgagcaaaagcagataaggctgtgccgggagttatcagacctggtaagtatctgcaaaagcgtgcagtaccgggactttgagttatctatgaaaagtcaaaactactgggaaatgtgttcgttttctgagaccgaggcctctcgtattgctaatgagtaccccgaagattttgtgaactataacaagaaatttttatctcggatctacccaagcgctatgcgtatcgacagttccaatttgaatccccaggatttttggaattgcggctgccagatcgtggctatgaacttccagacgcccggcccaatgatggacctgcacacaggatggtttttgcagaacggcggttgtggttatgtgctgaggccctctattatgcgagatgaggtgagttacttttccgcaaacacaaagggcatcctgcccggagtgtcccctttggccctgcacataaaaatcattagcggtcagaacttcccgaagcccaagggcgcttgtgccaagggtgatgtgatagacccgtacgtgtgtatcgaaatccacggaatacccgcggattgctccgaacagaggacaaagaccgttcagcagaactcagataaccctattttcgacgaaaccttcgagttccaggtcaaccttcccgagctggctatgattagattcgtggtgctggacgacgactacataggagacgaatttatcgggcagtacacaatcccctttgaatgtcttcagcctggatatagacatgtgccactgcgatccttcgtcggcgatatcatggagcatgtcactctctttgtgcacatcgctatcacaaatagaagcgggggggggaaagcacaaaaaaggagcctgagtgtgcggatgggcaagaaagtgcgcgagtacacgatgctgcggaacataggtcttaagaccatagatgatatattcaaaatcgccgtgcaccctctgagggaagcaatcgatatgagagaaaacatgcagaacgcaattgtcagcattaaagaactttgcgggctcccaccgatcgcgtctctgaaacagtgcttgctgacactcagctctaggttgattacttctgacaacactcccagtgtatcccttgttatgaaagactccttcccttacctggaacctctgggggctattcccgatgtccagaagaagatgctgaccgcttacgatctgatgattcaggaaagtaggtttcttatcgaaatggccgacacagttcaggagaagattgttcagtgtcagaaagcgggcatggaatttcatgaagagttacacaacctgggcgccaaggaagggctgaaaggtcgcaagcttaacaaggcgacggagagcttcgcctggaacatcacagtactcaagggacagggggatctgttaaagaatgcaaagaatgaggctattgagaacatgaagcagattcagcttgcctgcctctcttgcgggctgtccaaggcgcctagcagttccgccgaggctaagtccaagagatcactggaagcaatcgaagagaaggagtcttcagaagaaaatggaaaattgtag

SEQ ID NO: 16791 - DNA, 612 bp, synthetic construct
  source 1..612: mol_type = other DNA; note = Synthetic coding sequence
atgcgcaatggtgatttcctgcccacgcggcttcaggcccagcaggatgccgtgaacatcgtgtgccactctaagacaagatccaatcctgagaacaacgtaggcttgataactttagcaaacgactgcgaggtacttacaactctgacacccgacacaggtcgcatcttaagtaaattgcacaccgtccagccgaagggcaagatcactttctgcaccgggatcagggttgcccacttggctttgaagcatcgccagggaaagaatcataagatgagaatcatcgctttcgtagggtcccccgtggaggataacgagaaagacctcgttaaactggcaaaacgcctcaagaaggaaaaggtgaatgttgatatcatcaattttggagaggaggaagtgaatacagaaaaacttactgcctttgtgaacaccttgaacgggaaggatgggaccgggtctcacctcgttaccgtgccgccagggccctctctggccgatgcattgatatcatctccaattctggccggcgaaggaggagccatgctgggcttgggcgcatccgactttgaattcggcgtagatccttctgccgaccctgaattagccctctag

SEQ ID NO: 16792 - DNA, 429 bp, synthetic construct
  source 1..429: mol_type = other DNA; note = Synthetic coding sequence
atgagtataagctctgacgaagtgaattttttggtgtaccgctacctgcaagaatctggcttcagccactccgcctttacctttggaatagaatcccacatcagccaatccaacattaacggagctttggtgcctcctgctgcactgatcagcattatacagaaggggctgcagtacgtggaagccgaagtaagcatcaacgaggacggaaccttgttcgacggtcgcccaatcgagagcctgagcctcatagacgcagttatgcccgacgtcgttcagacccgtcagcaggcatatagggataagctggctcagcagcaggctgccgccgccgcggccgcagcagctgcagcatcacagcaggggagcgcaaagaacggagaaaataccgccaacggcgaagaaaatggagctcacacaatcgcctag

SEQ ID NO: 16793 - DNA, 1410 bp, synthetic construct
  source 1..1410: mol_type = other DNA; note = Synthetic coding sequence
atgtgctccctggctagtggcgctacagggtattcccacttgcttaaaaagcattttcatactgttagcttgagtattagcctcatcctgacggcctggttcattaacatgaatccgacagtggaatacatgaactccatttacaaccccgtgccttgggagaaggaggaatatctgaagccagtgctggaagatgaccttctcctgcagttcgacgttgaagatctgtatgaaccagtgtccgtgccattcagttatccgaatggtctgtctgagaacacatcagtggttgaaaagctcaagcatatggaagcaagggcacttagtgcagaggcagccctggccagagccagagaagatctacagaaaatgaagcagttcgcacaggactttgtaatgcatacagacgtgaggacgtgtagctctagcacttcggtgatcgctgatctgcaagaagatgaggacggcgtgtacttttcaagctatggacattatggcatccacgaagagatgcttaaagacaagatccggacagagagctaccgcgattttatctaccagaatccgcacatattcaaggataaggtcgtgctggacgtgggctgcggcaccggcattctgagcatgtttgccgccaaggcaggggcaaagaaggtgcttggggttgaccagtccgagatcctgtatcaagccatggacattatccggctcaacaaacttgaggacacgatcacattgatcaaaggaaaaatcgaggaggtgcacctgccagtggagaaagtggatgtaattatttcagagtggatggggtacttccttcttttcgaatctatgctggactcagtactgtatgccaaaaacaagtatctggccaaaggtggttctgtctacccagacatttgcaccatttcacttgtggccgtatctgatgtgaacaagcacgctgatcgaattgccttttgggatgatgtttacggattcaaaatgtcatgcatgaaaaaggccgttatcccggaagccgtggtggaggtgcttgaccctaagaccctgatttccgagccttgcggcattaaacacatcgactgtcatactacttcgatcagtgacctcgagttctcatcagacttcacgctaaagatcacaaggacctccatgtgcactgctatcgctggatactttgatatctacttcgagaaaaattgtcataatcgcgtggtcttctccacaggacctcagtccactaaaacccactggaagcagaccgtgttcctgcttgagaaacccttcagtgtgaaagcaggtgaagccttgaagggcaaagtcactgttcacaaaagcaaaaaagaccctcgaagcctgaccgtgactttaacgcttaataattctacacaaacctatgggctccagtag

SEQ ID NO: 16794 - DNA, 525 bp, synthetic construct
  source 1..525: mol_type = other DNA; note = Synthetic coding sequence
atggcttccgccggtacacagcactactcaatcgggctcaggcagaagaacagtttcaaacaatctggtccttccggtacagtccccgccaccccaccagagaagccatctgaagggagagtgtggcctcaggcccaccaacaagtgaagcctatctggaagttggaaaagaagcaggtcgagacgctgtcagccggcctcgggcctggactcctcggagtgccccctcagcctgcatatttcttctgtccttccacactctgttcctccggcaccactgctgtgatcgccggtcactcctccagctgttatctgcactctctcccagatctgttcaactctacgcttctctaccggaggagtagctaccgacagaagccctaccagcaactcgagtcattctgcctgcgaagttcccccagtgaaaaaagcccattttctctgccccagaaaagtctgcctgttagcctgacggccaacaaggcaacgagcagcatggtgttctccatggcgcagccaatgtag

SEQ ID NO: 16795 - DNA, 1572 bp, synthetic construct
  source 1..1572: mol_type = other DNA; note = Synthetic coding sequence
atgcagaaagagcgcgagctgcaggaaaccatctactttaagaatacttggcctgcttgcatgtttctaatcgttgcacccttatccgtgctatacaactggaaggatgagctggatacttggggatacttcagggtcactgtgctgcacggaaatcgcaaggacaacgaattaatcagagtcaaacagcggaaatgtgaaatagcactcactacatacgaaacgttaagactgtgtctcgatgagctgaactctctagagtggtccgctgtgatagtggacgaggcccacaggattaaaaatccaaaagcacgtgtcacagaggtgatgaaggctctgaagtgcaatgtcagaatagggctcacaggaacgatcctgcagaacaatatgaaggagctctggtgcgtgatggattgggccgtccccggactcctcggatctggcacatactttaaaaagcagtttagtgaccctgtcgaacacggtcaacgacacacggccaccaagagggaattagccacgggcaggaaagccatgcagcggctggcaaagaagatgagcggttggttcctgaggaggactaagactttaatcaaagaccaacttccgaagaaggaggaccgcatggtgtactgtagtctcacggatttccagaaagctgtataccagaccgtccttgagacagaagatgttacactaatcctccagagttcagaaccttgcacatgccgatccggtcagaaaaggcggaattgctgttacaaaacaaattcccatggggagacggtcaaaacactgtacctgagctatctgaccgttctacagaaggtggctaaccacgtggctcttctgcaagccgcatcaacttccaagcaacaagagacattaattaaacgcatttgcgatcaggtttttagccgatttcccgatttcgtgcaaaagagcaaagacgcagccttcgagactctaagtgatcccaaatatagtgggaaaatgaaagttctccagcagttgctgaatcactgcagaaagaaccgcgacaaggttctgctgtttagctttagcactaaattgctcgacgtgctccagcagtactgcatggcttccggccttgactatcgcagactagatggttccacgaagagtgaggagcgtctgaagatcgttaaagagtttaattcgacccaagacgtaaatatttgcctcgtctcaactatggctggcggcctgggtctaaattttgtcggtgctaacgtcgttgttctgtttgatccaacatggaatcccgcaaatgacctacaagcgatcgaccgagcatacaggattggccagtgccgtgacgtgaaagtgttacggttgatttctctggggacagtcgaggagataatgtatctgaggcagatttataagcagcagcttcactgtgtggtcgtcggcagtgagaatgctaagcggtactttgaagcagtccaggggtctaaagagcaccagggcgagctgtttggaatacacaacttattcaagttcagatctcagggttcctgccttacaaaagatatattagaagtgtag

SEQ ID NO: 16796 - DNA, 1179 bp, synthetic construct
  source 1..1179: mol_type = other DNA; note = Synthetic coding sequence
atgggtactacctgcctgcatttagggacgcttgagcagagtctagttttcgagaacaaggttaactccgagaaggtcaagctctctctcaggaactttccccacaatgactacgaggatgttttcgaagagccatcagagtccgggtcagacccttccatgtggacagcccgtgggccctttcggagagacaggtggagttctgaggacgaggaagcagctggcccttcccaggctttatcccctctgctttcagacacccggaagattgtgagtgaaggggagctggaccagctggctcagatccggccactaatttttaattttcacgagcaaacggctatcaaggattgtcttaagatcctagaggagaagactgcagcatatgatatcatgcaggagtttatggccctggagcttaaaaatctgccaggcgaattcaactccgggaatcaacctagcaatagggagaagaaccgttatagggacatattaccgtatgactccacgagggtgcctctgggaaaaagtaaggattacattaacgcctcttatattcgaattgtgaattgcggagaagaatatttctacatcgccacccagggacctctactgtccacaatagacgacttttggcagatggtgctggagaataactctaatgttatcgctatgatcaccagggagattgagggagggattattaaatgctaccactactggccaatttctctgaaaaaacccctggagctaaagcacttccgagtcttcctggaaaattaccaaatacttcagtactttatcatacggatgttccaggtggtagaaaaatccacaggcacatctcacagcgttaagcaactccagttcaccaaatggcccgaccacgggactcccgcctctgccgactcctttattaagtatatacggtacgcacggaaatcacatctaaccggtcctatggtggtgcactgttcagccggcataggacggacaggcgtgtttctgtgcgtggacgtagtgttctgcgccatcgttaagaattgcagttttaacattatggacattgtggcacagatgagggaacaacggtctggcatggtccagacaaaggagcagtaccacttttgttacgacatcgtcctcgaagtgctgcgtaagttgttgaccctcgattag

SEQ ID NO: 16797 - DNA, 1566 bp, synthetic construct
  source 1..1566: mol_type = other DNA; note = Synthetic coding sequence
atggagcaaagttcactgtacttctgggacctgctagaagggtccgagaaggcggtagtcggtaccacctataaacaccttaaggacctgctgtcaaagctgctgaacagtgggtacttcgagtctataccggtgcccaaaaacgcaaaagagaaggaggtccctctcgaggaagagatgttgattcaatccgagaagaagacgcagctgagtaagaccgaaagcgtaaaggagtctgagagcttgatggagtttgcccaacctgagattcagcctcaagagttcctgaacagaaggtatatgacggaggtagattatagtaacaagcagggagaagaacagccgtgggaagcggactatgccaggaagcccaacctgcccaagcgctgggacatgctgacagaacctgatggccaggaaaagaaacaggaaagctttaaatcatgggaggcgtccgggaagcatcaggaggtaagtaagcccgctgtgtctctggaacaacgcaagcaagatactagtaaactgcgcagtactttgccagaagagcagaagaaacaggagatctccaagtcgaagcctagccccagccagtggaagcaggatacaccaaaatctaaggccggatatgtgcaggaggagcagaagaagcaggaaacaccgaagttgtggcccgtccaactgcagaaggaacaagacccaaaaaagcaaactcctaagtcatggacgccaagcatgcaatccgagcaaaacacaacgaagagctggacaacccctatgtgtgaggagcaggattcgaagcagcccgagacgcccaaaagctgggagaataatgtggaatctcagaagcattcattgacctctcagtctcaaattagccccaaatcttggggcgtcgccactgcaagtctcattcccaacgaccagttacttccaagaaaattaaatacagaacccaaagatgtgccgaagccagtgcatcagcctgttggttcctcctccactctgcccaaagacccagtcctccggaaagagaagttgcaagacttgatgacacaaatccagggaacatgcaactttatgcaagagagtgtgttggatttcgacaaaccatcatcagcgataccaactagtcagcctccttctgccacccctggttccccagtggcaagcaaggaacagaatctgtctagtcagtccgatttcctccaagaacccctccaagcagcgattccaccgggcaagcagcccagctccctcgcctcccctaaccctcctatggcaaagggcagcgagcagggatttcagagtccccctgcatcatcaagcagcgtgactattaatactgctccgttccaagcaatgcaaaccgtttttaacgttaacgcgcccttgccgccacgcaaagagcaggagataaaggaatcgccctattctcctggctataatcagtcttttaccacagcatcaacgcagacaccaccccaatgccaacttcccagcatccacgttgagcagacggttcactctcaagagaccgcgccaggcaaccatcacagcaccttctag

SEQ ID NO: 16798 - DNA, 480 bp, synthetic construct
  source 1..480: mol_type = other DNA; note = Synthetic coding sequence
atggccacctccgctcccctgcggagtctggaggaggaggtaacctgctccatttgcctggattatctaagagacccagtcactatcgattgtggccatgtattttgtcggagctgtacaacggacgtccgtccgatcagcggaagccgtcctgtttgtcccctgtgcaagaaacccttcaaaaaggagaacattaggcccgtatggcagttagaaaagatccttaaccatttgtccacactccgacgcgacagggataaaattcagggatttcaggccaagggtgaggctgacatactggccgcccttaaaaaattgcaggatcaacgacagtacatcgttgcagaatttgagcaaggccatcagtttttaagagaacgggaggagcatctcctcgagcagttggccaagctggagcaggagctgaccgagggaagagaaaaattcaagagcagaggcgtcggcgagttggcccgctag

SEQ ID NO: 16799 - DNA, 270 bp, synthetic construct
  source 1..270: mol_type = other DNA; note = Synthetic coding sequence
atgtccgagcagggcgacctcaatcaggccatcgccgaggagggcggcacagaacaagagaccgctaccccggagaacgggattgtgaaatcagaaagcctggatgaggaagaaaaactagagctgcaacggcgactggaggcacagaaccaagaaagacgcaagtcgaaatctggcgccggaaagggaaaattgacccgtagcttagccgtgtgcgaagaatccagcgcacggcccggaggcgagtctcttcaagaccagactctgtag

SEQ ID NO: 16800 - DNA, 1356 bp, synthetic construct
  source 1..1356: mol_type = other DNA; note = Synthetic coding sequence
atggctgagggcgcccagccccaccagccaccccagcttgggcctggggccgcggccaggggaatgaaaagggagtctgaactcgaactccctgtgcccggtgctggaggtgacggcgctgatccgggactgagtaagcggcccagaactgaagaggccgctgccgacggcggaggtgggatgcagaacgaacccctcacacccggttatcacgggtttcccgcccgggatagccaagggaaccaggagccgaccactacccccgacgcaatggtgcaaccctttacgaccatcccattccctccgccacctcagaatgggattcccaccgagtacggagtccctcacacgcaggactacgcggggcagaccggagaacacaacctgaccctgtacgggtctactcaggcgcacggagagcagtcttccaactcacccagtactcagaatggttcgcttacacagactgaggggggtgcccagacggacggtcagcaatcacagacccagtcaagcgaaaattccgagagtaagtcaacccctaagaggctgcatgtgtcgaacatcccttttcgattccgggatccagatctccggcagatgtttggacagtttggtaagattctcgacgtggagatcattttcaacgagagaggctcaaagggattcggatttgtaacttttgagaacagcgccgatgccgacagggcacgcgagaagttgcacgggactgtggtggaaggccgaaagattgaggtgaataatgctacagcccgcgtgatgaccaataagaagatggtgacgccgtatgccaacggatggaagctctcaccagtagtcggcgccgtctacggccccgagctttatgccgccagcagttttcaggcagatgtgtccctaggaaacgatgcagcggttccattgagcggccgtggaggaattaatacctatattcccctgatttctctgccactcgtgcccggttttccgtaccccacagccgccacaacagccgcggcatttcggggtgctcacctgagggggaggggccgcacagtttacggtgccgttcgtgccgtgcccccaaccgcaatccccgcctatccgggagtcgtgtatcaggacgggttttatggcgctgacctttacggtggctatgccgcttacagatatgcccagcccgccacagcgacggcagcaacggccgccgctgccgccgctgcagcctactcagacggatatggacgggtctataccgccgatccttatcatgccctggcacctgctgcatcttatggagtaggcgctgtagcttctctctatcgtggaggatactctaggttcgcgccatactag

SEQ ID NO: 16801 - DNA, 855 bp, synthetic construct
  source 1..855: mol_type = other DNA; note = Synthetic coding sequence
atgttctctcgccgcagtcacggggacgtcaaaaaatcaacccagaaagtcctggaccccaagaaggatgtgttgactcgtctgaagcatcttcgagctctgcttgataatgtggatgcaaacgacctgaagcaatttttcgagacaaactacagccaaatctattttatattctatgaaaattttatcgccctggagaattccctgaaactaaaaggtaataacaagtcacagcgggaggagctggattccattctgttcctttttgagaagatcttacagttcctgcccgaacgaatcttctttcggtggcactatcagagtattggctccaccctgaaaaagctgctccataccgggaactccatcaaaatcagatgcgaaggaattcggttgttcttactatggttgcaagccctacagaccaattgtgccgaggaacaggttcttatcttcgcatgcctggtccctggattccctgcagtaatgagctccaggggaccatgtacgcttgagaccctaattaatcccagcccctccgtagccgacgtcaagatataccctgaagagatcacaccattgctcccggccatctcgggtgagaaaatagccgaagaccagacctgcttttttttgcaaattctcctgaaatacatggtgatccaagctgcctccctcgagtggaaaaacaaggaaaaccaggacaccggcttcaagtttttattcacactgttcaggaaatattacctgccccatctcttcccctctttcacaaaactgactaacatttacaaacccgtgcttgacatcccgcacttaagacccaaaccagtgtatataacaaccacacgctag

SEQ ID NO: 16802 - DNA, 846 bp, synthetic construct
  source 1..846: mol_type = other DNA; note = Synthetic coding sequence
atgggagacaccgtcgttgagccagcgccccttaaaccgaccagcgagccgacctctggaccccctggcaataacggaggtagtctcctatcagttatcaccgaaggggtcggcgagctgtccgtgattgatcccgaagttgcccagaaggcctgccaggaggtcctggaaaaggtcaagttactgcacggaggagtcgccgtgtcatccagaggcacaccactggagcttgtgaatggagatggggtggactccgagatccggtgtttggacgacccccctgctcaaattagggaggaggaggatgagatgggggctgccgtagcaagtgggactgcgaagggggctcggcggagaagacaaaataactcagcaaagcagtcatggctgctgcgcttgttcgagtctaaactgtttgacattagtatggctatctcctatctatacaatagtaaagagccgggtgtgcaggcatatataggcaaccggcttttttgctttcggaacgaggatgtcgatttctacctgcctcaattactcaacatgtacatccacatggacgaggacgtcggcgatgcaatcaagccttacattgtccaccgttgcaggcagagcatcaacttctccttacagtgcgctctgctgctgggggcatacagttcggacatgcacattagcactcagaggcacagtcgtggcacaaaactccgtaaactgattctgagtgatgaactgaagcctgcgcacaggaagagggagctaccatctctctcccccgctccagacaccgggcttagcccctcaaagaggacacaccagcggtcaaagagcgatgccactgcttag

SEQ ID NO: 16803 - DNA, 591 bp, synthetic construct
  source 1..591: mol_type = other DNA; note = Synthetic coding sequence
atggaggatctttttgaaacctttcaggatgagatgggtttctccaacatggaggacgatgggcccgaagaagaagaaagagtagctgagcctcaagctaatttcaacaccccacaagcactccggttcgaagaattgttagccaacctgctcaacgagcagcatcagattgccaaagagctgtttgagcagctgaaaatgaaaaaaccgtctgccaagcagcagaaggaggtagaaaaggtgaagccacaatgtaaagaggtgcaccagactctgattctcgatccagcccagcgaaagagactccagcagcagatgcaacagcacgtacagttactgactcagattcacttgctagctacatgtaacccgaacctgaatccagaagccagtagcacacgaatctgccttaaggagctcggaacctttgcccagagttccattgccctgcatcaccaatacaaccctaagttccaaacccttttccagccttgtaatctcatgggcgcaatgcagctgatcgaggacttcagtacccacgtcagcatcgactgttccccccacaaaaccgtaaagaagaccgtctgttag

SEQ ID NO: 16804 - DNA, 1620 bp, synthetic construct
  source 1..1620: mol_type = other DNA; note = Synthetic coding sequence
atggcgacttcggcgcccctgcgctctcttgaggaggaggtgacctgcagcatttgcctggactatctacgcgaccccgtgacaatcgactgcggacacgtattttgtcggtcgtgtacgacagatgttcgcccaatatctggaagtaggccggtatgtcctctgtgcaagaagccattcaagaaggagaacatccgacctgtctggcaactcgcatcactggttgagaacatcgagagactgaaggttgataagggccgacagcctggtgaagtaacgcgtgaacaacaagatgccaaactgtgcgagaggcacagggaaaaattacactattattgcgaggacgatggaaagttgctgtgcgtcatgtgccgcgaaagccgcgagcaccggccacacacagccgtgctgatggagaaggccgcccagccccacagggagaagatcctcaatcatcttagtaccctgaggcgagaccgggataaaattcaagggtttcaggcaaaaggtgaggcagatattctagccgccttgaaaaagctgcaagaccagcgtcaatatattgtcgcagaatttgagcaagggcaccagtttctgcgcgaacgggaggaacatctgttagaacagcttgctaagcttgagcaggaactgactgaaggccgagaaaaatttaaatcgcgcggcgtgggcgagctggccagactggccctggttatctcagagctggaaggcaaggcacagcagccggccgccgagctaatgcaagatacccgggactttctgaacagatatcctcgaaagaagttctgggtaggcaaacccatagcccgcgtcgtcaagaagaagaccggcgagttcagcgataaactgttgagcctgcagaggggactgcgcgagttccagggaaagttactccgggatctcgagtacaaaacagtgtcagtcaccctggacccccaaagcgcctccggctatcttcagttgagtgaggattggaaatgcgtcacatacactagtctatacaagtcggcgtacttgcacccacagcagttcgattgcgagcctggcgtgctgggcagtaaaggctttacttggggtaaagtgtactgggaagtggaggtggaacgagaggggtggtcggaggatgaagaggagggtgatgaggaggaggagggcgaggaagaggaagaagaggaggaagccgggtatggagatggctacgacgactgggagacagacgaagatgaagaatcactgggagatgaagaagaggaggaggaggaggaggaggaagaggtgcttgagtcctgtatggtaggagttgccagggacagtgtcaaaaggaagggggatctgtcactgcggcccgaggatggtgtctgggccctcaggctatcttcttccggcatctgggccaacacatcgccagaggcagaactgttccccgcgctgcggcctcgaagagtgggcatcgctttggattacgagggcggaactgtgacttttaccaatgccgaaagtcaggagctgatttatacatttactgctaccttcactaggagacttgtcccttttttgtggttgaaatggcccggaaccaggttactgctgcgtccctag

SEQ ID NO: 16805 - DNA, 1086 bp, synthetic construct
  source 1..1086: mol_type = other DNA; note = Synthetic coding sequence
gtgacgaccgaaaaaacatatacttcaacgtcaaataattccatctctggctctctcaagaggttagaggacacaactgctcgatttactaatgctaactttcaggaggtgtcagctcacacctcgtcaggcaaggatgtatccgaaacaaggggttccgaaggaaagggaaagaagagcagcgcccatagttcaggacaacggggccgcaaaccgggcggggggagaaacccaggcacaactgttagtgccgcgagcccgtttccacaggccgggtataagagggcccagaccagcggtatcgaagaggaaaccgtgaaggagaagaaaaggaaggggaataagcaaagcaaacatggtccaggaagacccaagggcaataaaaaccaagagaatgtctcccacctctccgtctcctctgcaagtcctacgtcatctgttgcttcagccgcgggttccattacgtcttcttctctccagaagtcccctacactgttgcgcaatggcagcttgcagagcttgtcggtcggatctagtccggtgggttccgagataagcatgcagtatcgccacgacggcgcctgccctacgactactttttcagaactgctgaatgcaatccataacgatcggggagacagcagcactctcactaaacaagagctgaagttcatcggaatatacaactctaatgatgttgccgtgtcatttccaaacgtggtgagcgggtcgggaagctcaaccccagtgtcctccagccaccttccacagcagtcgtctgggcatttacagcaggttggtgctcttagcccatccgcagtgtcgagcgctgcacccgctgtcgccaccacgcaagccaacacactgagcgggtcctcacttagtcaagctcctagccacatgtatggcaaccgcagtaattcgtctatggctgccttaatcgcacagtcagaaaacaatcagacagaccaggacctcggtgacaactcgagaaacctggtgggtcgaggcagttcacctagagggtctctgagcccaaggtcacctgtctcttcgctgcagatccgctatgaccaacctggttag

SEQ ID NO: 16806 - DNA, 426 bp, synthetic construct
  source 1..426: mol_type = other DNA; note = Synthetic coding sequence
atggcagccgcaccaccttcctactgcttcgtggcatttcctccccgcgcaaaagacgggctggtagtgttcggcaagaattccgctaggccccgtgatgaagtgcaggaggttgtctacttctccgccgcagaccatgaacccgaatctaaagtcgagtgtacctacatcagcatagatcaggtgccccgcacttatgcgatcatgattagccgacctgcttggctctggggggccgagatgggcgcgaacgagcacggtgtctgcatcgcgaacgaggctataaataccagagagcctgctgccgaaatagaggccctgctcggcatggatctggtccgtctcgggcttgaacgtggggagaccgcaaaagaagccctagatgtaattgttagtctgctggaagagcacggccaaggggggtag

SEQ ID NO: 16807 - DNA, 573 bp, synthetic construct
  source 1..573: mol_type = other DNA; note = Synthetic coding sequence
tagcagctggcagccctcaaagaaatccaggcagaggtgcaggagaaggaaagcgatgctgtcaaacccaaaaaccaggatattcagggtgggaaggcagctcctgccgaggcactgggaatcccagacgaacattacttagataacctttgcattttttgtggagaaaggtcagaatccttcaccgaagaggggctagatctgcactattggaaacactgtctcatgctcacccgctgtgatcactgtaaacaggtggtggagatctcctcactcacagaacacctgctcaccgagtgtgataagaaagatggattcggaaagtgctaccggtgctcagaagccgtatttaaagaagaactacctcggcacattaagcacaaagactgcaatcccgctaagccagagaagctagctaacagatgccccctttgccacgagaatttcagtcctggagaggaggcctggaaggcccacctgatgggcccggctggttgcaccatgaacctccgcaagacccacatactgcaaaaggcccccgcacttcaacctggagaggggcagcgccggtag

SEQ ID NO: 16808 - DNA, 723 bp, synthetic construct
  source 1..723: mol_type = other DNA; note = Synthetic coding sequence
atgacggtggggaagagtagtaaaatgttgcagcacattgactacagaatgaggtgcatattacaagatggcagaatattcataggcaccttcaaagctttcgataaacacatgaatctgattttgtgcgactgcgacgaatttcgaaaaatcaagccgaagaacagtaaacaagccgagagagaggagaagagagtcctcgggttggtgctcctgcgtggcgaaaacctggtgagcatgaccgtggaggggcctccgcctaaggatacaggaattgctcgcgtgcccctggcaggcgcagccggcggtcccggtatcggccgcgcagctgggcgcggaatccctgctggagtgccaatgccacaggcccctgccggactggccggccctgttcggggcgtgggtgggccaagccagcaagtaatgacccctcaggggaggggcaccgtggccgcagcagctgccgctgccaccgcttcaattgcaggggcgccgacccagtacccacccgggcgcggtggccctcccccccctatgggccgcggcgccccacccccagggatgatgggccccccaccaggcatgagacctcccatgggccccccaatgggcataccgcccgggaggggcacacccatgggcatgccccctcccggaatgagaccaccacctccagggatgagagggccccctcctcctggaatgcgccctccccgcccatag

SEQ ID NO: 16809 - DNA, 420 bp, synthetic construct
  source 1..420: mol_type = other DNA; note = Synthetic coding sequence
atggaaacagattgcaaccccatggaactcagctccatgtcaggtttcgaagaagggtctgaactcaatggttttgaaggcaccgatatgaaggacatgcggttggaagccgaagccgttgtgaatgatgtcctgtttgcagtaaacaatatgttcgtatccaagtccctgcgatgtgccgacgatgtggcatatataaacgtggagaccaaagagcgcaaccgttattgcttggagctgacagaagctgggctgaaagtggttggctacgctttcgaccaggtggatgaccatcttcaaaccccttaccacgaaacggtgtactccctcctggataccctgagccctgcctaccgggaggccttcggcaatgctttgctgcagaggctcgaggccctcaagcgagatggacagtcctag

SEQ ID NO: 16810 - DNA, 606 bp, synthetic construct
  source 1..606: mol_type = other DNA; note = Synthetic coding sequence
atggccggcctggaagtcctgttcgccagtgcagctcctgctattacctgcaggcaggatgccttagtgtgttttctgcattgggaagtagtcacacacggctacttcggtctgggcgtgggcgaccagcccggccctaacgataaaaagtccgagttgctccccgccggctggaacaataacaaggacctatatgtcctgaggtacgaatataaagacgggagtcgtaagcttctcgtgaaagcgattacagtggagtctagcatgattttaaacgtgctggagtatggtagccagcaggtcgccgacttaacactgaatctggatgactacatcgacgccgaacatctgggggattttcataggtgcgacccactgggtcctttcgtggtgggaggagaggaccttgacccctttggccccaggagggggggaatgattgtcgatccactgcggtcgggattcccacgggctctgatcgacccgagtagcgggctacctaaccgtctgcctccgggtgctgtgccaccgggtgctcgctttgatccatttgggcctattggcaccagcccccccgggccacgcccagacagaaggggccagtag

SEQ ID NO: 16811 - DNA, 747 bp, synthetic construct
  source 1..747: mol_type = other DNA; note = Synthetic coding sequence
atggctaccagcgcaccattgcgttcattggaagaagaagtaacttgcagcatctgcctcgattatctgcgtgatcccgtgacaattgattgcgggcatgtgttttgtcgcagttgtactaccgacgtacgacctataagcggcagcagaccagtgtgtcccctgtgcaagaaacccttcaagaaggagaacattagacctgtgtggcagctcgcctcgctggttgaaaacatcgagcgcttaaaggtggacaagggccgtcaacctggtgaggtcacacgggaacaacaagacgcgaaattatgcgaaagacatagggaaaagctgcactactattgcgaggacgacgggaagcttttgtgcgtaatgtgcagggaaagcagagagcaccggcctcatactgccgtccttatggagaaagcggctcagcctcatcgggagaaaatactcaaccatcttagtaccctgaggcgcgaccgcgataagattcagggttttcaggcaaaaggtgaggccgatatcctggccgctctgaagaaactgcaggaccagcgacaatacatagttgctgaatttgagcaagggcaccaatttctaagggaaagagaagagcatctgctggagcagttagccaagttagagcaggagctgactgaaggtcgggaaaagttcaagagtagaggagttggagagctggctagactggccctggttattagcgagcttgagggcaaagcccagcagtag

SEQ ID NO: 16812 - DNA, 1842 bp, synthetic construct
  source 1..1842: mol_type = other DNA; note = Synthetic coding sequence
atggcaactatcccagattggaaattgcagctgttagcccgaagaagacaagaggaagcaagtgtccggggcagagaaaaggctgagagagagaggctgagccagatgccagcttggaagcgagggctactggaacggaggcgtgccaaactgggactgtctcccggcgaaccttcaccagtgctgggaacggtggaggccggaccacccgatccagatgagtccgcggtgctgctggaagctatcggcccagtgcatcagaatcggttcatccgccaagagagacaacagcaacagcagcagcaacaacgaagcgaagagctactagctgagcggaaaccaggacccctcgaagcccgggagagaagaccttcccctggagaaatgagagatcagagccccaaggggcgcgagtcccgggaggaaagactcagtccacgggagacacgagagaggcgtctgggtattggcggcgcgcaggagctgagtctgaggcccctggaggccagggattggaggcagtcgcccggcgaagtgggagataggtcttctcgactcagtgaagcctggaagtggcggctctccccaggcgagactccagagaggtccctgaggctcgccgagtcccgggagcagtccccccgtaggaaggaagttgaaagccgcctttcccccggagagtccgcctaccagaagctgggactgaccgaggcccacaaatggaggccggacagccgagaatctcaagagcagagcctcgtgcagttggaagctacagagtggagactccgtagcggggaggaaaggcaggattattccgaggaatgcggtagaaaggaggagtggcctgttccaggggttgcgcctaaggaaacagcagagttgagcgagacgctcaccagggaagcccaaggcaattcttccgccggagtcgaggccgccgagcaaagacctgtcgaggatggggaacgaggaatgaagcccacagaaggctggaagtggaccctcaatagtggaaaggcacgcgagtggacgccacgggacattgaggcgcaaacccagaaaccagagcctcccgaaagcgcagagaagctcttagagagtcctggcgtagaagccggcgaaggagaggccgagaaagaggaagctggagcacagggacggcctttaagggcactgcagaactgctgttcagttccatctccacttcctcctgaggacgccgggaccggaggtctgcgtcaacaggaggaggaagcagtggagttgcagcctcccccccccgcccctcttagcccaccccccccagcgcccaccgcccctcagcccccaggggatccgctgatgtcacgacttttttacggtgtgaaggcaggccctggcgttggcgccccacggagatcggggcacacttttacagtgaaccctaggaggtcggtaccccccgccacacccgccaccccaacctctccagctactgtggatgcagcagtgccaggtgccggaaagaagcggtacccaaccgctgaggaaatccttgtgctcggaggatatcttcgcctctctcggtcctgcctggccaaaggaagccctgaacgccatcataagcagctgaaaatcagtttctctgagactgccctagagactacataccagtacccatcagagtcaagcgttctggaggagctcggtcctgagcctgaggtcccaagtgcacccaatcctcccgccgcccagccagacgacgaggaagacgaggaggagctgctactccttcaacctgagctccagggaggcctccggacaaaggctctcattgtggatgaaagctgccgacggtag

SEQ ID NO: 16813 - DNA, 1620 bp, synthetic construct
  source 1..1620: mol_type = other DNA; note = Synthetic coding sequence
atggctacaagcgcccctctgcggagcctagaagaagaagtgacctgttctatctgtctggactatttacgtgaccccgtgacgattgactgcggccacgtgttttgcaggtcatgcacaactgacgtcagaccaataagtggctcccgccccgtctgtccactttgtaaaaagccgttcaaaaaagaaaatatcagaccagtatggcagctggcctccctcgtggagaatatcgaaagactgaaggtcgacaaaggccgacagcctggggaggtgactcgcgaacagcaggatgctaaattatgcgaaaggcaccgggagaagctgcactattactgcgaggatgatggcaaactgctctgcgtgatgtgccgggaatctcgggaacacaggccccatacagcagtcctgatggagaaggcggcgcagccgcacagggagaaaattctgaatcacctctctactctgagacgcgatagagacaagatccagggcttccaggcaaagggagaagccgatattttagccgccctcaaaaagttgcaagatcagaggcagtacattgtcgctgaatttgagcagggacaccagtttcttagagaaagagaggaacatctgctggaacaattagccaagctggagcaggaactgactgagggtagggagaagttcaaatctcggggggtgggcgaactggctagattagcactggttatatctgagctggaagggaaggcgcaacaacccgctgctgaactgatgcaagacacccgtgatttcttgaatagataccccaggaagaaattctgggtgggcaagcccatcgcgagagtcgtgaagaagaagacaggagaattctctgacaagttactgtctctgcagagaggcctgcgggagttccaagggaagctgcttagggacctagagtacaagaccgtctctgttacactggatcctcagtccgcctctggttacctccaattgagcgaggactggaagtgcgttacttacactagcctatataagtccgcttatctgcacccacaacaatttgattgcgagcctggggtcctgggatccaaaggcttcacatgggggaaagtctattgggaggtggaagtcgaacgggaaggttggtccgaagatgaggaggaaggagatgaggaagaagaaggggaggaggaggaggaagaggaggaggccggctacggagacggttacgacgactgggagaccgacgaggatgaggaaagtctgggcgacgaggaggaagaggaggaggaggaagaggaagaagtgttggagtcctgtatggtgggagtggctagggattcagtgaagaggaagggggacctgtctttgagaccagaggacggcgtatgggcactacgactgtcttcctcgggaatttgggcaaatacgagtcctgaggctgagctgttcccggcgttgaggccccggagggtgggcattgccctcgattatgaagggggcactgtgacctttaccaatgctgagtcgcaggagctcatctatacctttaccgctacatttacccgccggctcgtcccattcctgtggctgaagtggcccggcaccagacttttactgagaccctag

SEQ ID NO: 16814 - DNA, 1089 bp, synthetic construct
  source 1..1089: mol_type = other DNA; note = Synthetic coding sequence
atggctcccaagccaggtgctgaatggtccacagccctcagtcatctcgtccttggtgttgtgtcactccatgccgcagtatcgacggctgaggccagccgtggcgctgcagctggattcttactgcaagtccttgcggctacgaccacccttgcaccagggttatcaactcatgaggactgtcttgcaggcgcttgggtcgcaaccgttataggattgcctctactggcttttgatttccactggtgcacaaatggacacctgatgtgtgccggttgtttcatccaccttctagccgatgcccgtctgaaagaagagcaggccacttgccctaactgtcggtgtgagatctccaagtcactgtgttgtcgcaacttggctgtcgaaaaggcagtgtcagaactgccgagtgagtgcggattctgtcttcggcaattcccccgatctctgctagagagacaccagaaagaagagtgtcaagatcgcgttacacagtgtaaatacaagcgtataggatgcccttggcatggcccattccatgagttgactgtccacgaggcagcttgcgcccacccaaccaaaacaggcagcgagctgatggagattctagatggtatggatcagtcacatcgtaaggaaatgcagctgtataactccatcttcagcctgctgtcctttgagaaaattggatacaccgaagttcagtttcgcccgtaccgaaccgatgacttcattaccagattatactacgaaacaccacgctttaccgtccttaaccagacgtgggtgctcaaggcaagggtcaatgacagtgagcggaatccgaacttatcttgtaagcggacactctccttccagttgctgcttaagtccaaggtgactgcacctctggaatgcagctttctcctcttaaaaggaccgtacgacgatgtccggatcagcccagtgatttatcacttcgtgttcaccaatgagtccaatgaaacagactatgtcccgctgcccataatcgattccgtggagtgtaacaagctactggctgccaaaaatattaatctgaggctgtttctgttccagattcagaagtag

SEQ ID NO: 16815 - DNA, 273 bp, synthetic construct
  source 1..273: mol_type = other DNA; note = Synthetic coding sequence
atggccatggcaccctctcccagtctggtccaagtttatacatcacccgcagctgttgctgtttgggaatggcaagacggcctcggaacctggcatccttacagcgctactgtttgtagttttatcgagcagcagttcgtgcagcagaaagggcaacgatttggacttgggagtctggctcatagtataccactgggtcaggccgatccctcactggccccgtatataatcgaccttccatcctggactcagttccgacaggatactgggtag

SEQ ID NO: 16816 - DNA, 2502 bp, synthetic construct
  source 1..2502: mol_type = other DNA; note = Synthetic coding sequence
atggctgtggaggattccaccctgcaggtggttgttcgtgtcaggcccccgacgcctcgagaactcgacagtcagcgtcgacctgttgttcaggttgtggacgagcgagtcctcgtatttaacccagaagaacccgacggaggttttccaggactgaaatggggaggcacccacgacgggcctaagaagaaaggcaaggatctaacattcgtgttcgacagagtcttcggtgaggctgccacacagcaagacgtctttcagcatacaacacatagtgtactggactcctttcttcagggatacaactgttctgtttttgcctatggagctacaggggccggtaagacgcataccatgctgggtcgggaaggagatcccggtattatgtacctgaccaccgtggaattgtacaggcgcctggaggcccggcagcaggagaagcactttgaagtgttaattagttatcaggaggtgtacaacgaacagattcatgatcttctcgaaccgaaaggtcctttagccattcgcgaagacccggataaaggcgttgttgtgcagggactaagtttccatcaaccagcctcggcagaacagcttttggagatcttaactagaggtaataggaaccggacccagcatcccacagacgctaatgcgacttcgagcagaagccacgccatattccagatcttcgtcaagcagcaggaccgagtcccaggattaacccaagccgttcaagtcgccaagatgtctctcattgatctggcgggatccgagcgggcctccagcacccatgccaaaggtgagagacttcgcgagggggccaacattaaccgatctctcctcgcattaattaacgtacttaacgccttagctgacgcaaaggggcggaagacccacgtcccttatcgggattccaaactgactaggctgctgaaagactctctggggggcaattgccgcacagtgatgatcgctgccatcagccccagcagcttgacatacgaggatacctataacaccctcaaatacgcggatcgcgccaaggagatacgcctttccctgaaatccaacgtgacatcgctagactgtcacatcagccagtatgctacaatctgccaacagctccaggccgaggtggccgcactccggaaaaaactccaggtttatgaaggagggggccaaccgccacctcaggatctaccgggatctcctaaaagcggccccccccccgagcacctccctagctccccactgccaccccacccaccgtcgcagccgtgtaccccggaactgcccgctggacctcgggctctgcaggaagagagcctaggcatggaggcccaggttgaacgtgcaatggagggtaactccagcgaccaggagcagagcccagaggacgaagacgaagggcccgctgaggaggtgcccacacagatgcccgagcaaaatcctacacacgccttacccgagagtccacgcctcaccctgcagcccaaacccgtggtgggtcacttcagcgcccgagaattagatggcgaccgaagcaagcaactcgctctgaaggtgctttgtgttgctcaaaggcagtatagcctgctgcaggcagctaacctgctaactccggatatgatcacagaattcgagaccctgcaacagctcgtacaagaagaaaaaatcgagccaggtgccgaggctcttcgcacatctgggttggcacgcggagccccactggcacaggagctttgcagcgagagtataccagtgccctcacccctctgccccgaaccacccggctatactggacctgtgactagaaccatggcacgccgcctgagtgggcctctgcatactttaggcataccgccaggccccaattgcactccagctcaaggatcacgctggcccatggaaaagaaacgtcggagaccttcagccctggaagccgactccccaatggctccaaagaggggtactaaaagacaaagacagtcatttctgccttgtcttaggcggggatctctgcctgacacacagccttcccagggtcccagcactcctaaaggtgagagggcctcctctccttgccacagtccacgagtgtgccctgctaccgtgatcaagtctagagtccccctgggcccgtccgctatgcagaattgttccactccgttagctctcccaacgcgggacctgaatgctaccttcgacctctcagaagagccccccagcaaaccctctttccatgaatgtatagggtgggataagatccctcaggagctatcgcggttggaccagcctttcatcccgagagctccagtgcccctcttcacaatgaagggccctaagccaacatcctctctgcccggcacttccgcctgtaaaaaaaaacgggttgcctcatctagcgtctcgcacggaaggagcagaatagccaggttaccttcatcaacactcaagcggcccgccggcccgctcgtcctcccgggagattggcattag

SEQ ID NO: 16817 - DNA, 1842 bp, synthetic construct
  source 1..1842: mol_type = other DNA; note = Synthetic coding sequence
atggcaaccatccccgattggaaattgcagctccttgcacgccgtcgccaggaggaagcctccgtcagggggagggagaaggccgagcgcgagcgcctttcccagatgcccgcatggaaaagggggttgctggaaagacgacgggctaagttgggtctaagtcccggggagccctcccctgtgcttggcacagtggaagcagggccaccagatccggacgaatccgctgtgttgctcgaagccattggccccgtacaccagaaccgcttcattagacaggaaaggcagcagcagcagcagcaacagcagagatcagaggagcttttagctgagcggaagcctgggccactggaggccagagaaaggcgaccgtcccctggagagatgagagatcagtccccaaagggaagagagagcagagaggaacggcttagccctagagagacaagggagcggcgcctaggcatcggcggtgctcaggaactttccttacgtcccctggaggcacgggactggaggcagtcacccggcgaggtaggggatagatcctcgcggctttcggaagcctggaaatggaggctctcacccggcgagacaccagaacggagcctgagactggcggaaagtcgagagcagtcccctagaagaaaggaagtagagtcacgactgagtcccggcgagtccgcgtaccagaagctgggcctgactgaggctcacaagtggaggcccgatagcagggagtctcaggaacaaagcttagttcaactcgaagccaccgaatggcgactgcgctccggcgaagagcggcaggactattcagaagagtgcggtcgcaaggaggaatggccagtccccggggtggccccaaaggaaaccgctgagctgagcgagaccctgaccagggaggctcaagggaatagttcagctggcgtggaagctgcagagcagagaccagtagaggacggcgaaaggggcatgaaaccaacagaagggtggaaatggacacttaattctggtaaagcacgagaatggactccccgagatattgaagctcagacgcagaagccagaacctcctgaatccgccgagaaacttctagaatcaccaggagtcgaagccggcgaaggagaagcggaaaaagaagaagcgggagctcaggggagacctctcagggccctacaaaattgctgttcagtccctagcccactccctcctgaggacgccggaacgggtgggctgcgccaacaggaggaggaagccgtggagcttcagcctcctcctcctgcccccctctccccaccaccccccgcacccaccgccccacaacccccgggagaccccctgatgagccggctattttatggagtgaaggcggggcctggagtcggcgcacccaggcggagcggccacactttcacagttaatccgcgcaggagtgtcccaccagccaccccagccacgccaacgagtcccgcaaccgtcgatgcagccgtgcctggcgctggcaaaaagcgatatccgaccgcagaagaaatactggtattgggcggctatctgcgactgtcccgctcatgtctggccaaggggagcccggagagacaccataagcagctgaagatttcattttccgaaacggccttagaaactacttaccagtaccctagcgaaagttccgtattggaggagcttggccctgaaccagaggtgcctagcgcgcccaacccacccgctgcccagcctgacgacgaggaggatgaggaagaactgctccttctgcagcccgagctgcagggcggccttcgcacaaaggctcttatcgtggacgagagctgtcgacggtag

SEQ ID NO: 16818 - DNA, 654 bp, synthetic construct
  source 1..654: mol_type = other DNA; note = Synthetic coding sequence
atgaattcacagccacaaacgagaagtccctttttccagaggccgcaaattcaaccgccccgagctacaatacccaattcaagcccttcaataaggcccggtgcccagaccccgacggccgtgtaccaagccaatcaacatatcatgatggttaaccacctcccgatgccgtatccggtgccacaggggcctcagtactgtatcccccagtaccggcattctgggcccccatatgtaggccctccgcagcaatacccagtgcaaccacctgggcccggtccattttacccggggcccggcccaggagatttccccaatgcatatgggacaccgttttatccttcccaacccgtgtaccaatccgccccaataattgtgcctactcaacagcagcctcctccagctaagagagagaagaagactatccgcatccgggatccaaaccagggcggaaaagatatcactgaagagattatgtctgggggcgggtctcgtaatccgacacctcccatcggccggccaacatccaccccgactccaccgcaacaattaccctcacaagttcccgaacatagtcccgtcgtttacggtaccgtagagtccgcccatctggcggcatccactcccgtgacggccgctagtgaccagaagtag

SEQ ID NO: 16819 - DNA, 969 bp, synthetic construct
  source 1..969: mol_type = other DNA; note = Synthetic coding sequence
atgtacttttgctggggggccgatagccgagagttacagcgccggcgtacagcgggctccccgggcgctgagttgctccaggcagcttcaggcgaacgtcactctctgctccttctgacgaatcatcgcgtgctcagctgtggagataacagccgcgggcagttaggccgtcgcggcgcgcagcggggcgagctccctgaacctatccaggcactggagacgctaatagtggatctggtgtcctgcggcaaggagcatagtctcgctgtttgtcacaagggccgggtgttcgcatggggcgcaggcagcgagggccagttaggtattggcgagtttaaggaaatctcatttacgccaaagaaaatcatgaccctgaatgacatcaaaattatccaggtgtcgtgtggccactaccatagtctggccctgtctaaagacagtcaggtgttctcatggggaaaaaactctcatggacagctcggtttaggaaaggaatttccttctcaggctagtccccagcgtgtcaggtctcttgagggcattcctttagcgcaagtcgcagcaggcggggcacatagttttgctctgagcctctgcgggacttcctttggatggggcagtaattctgccggtcagctagccctgagtggaagaaacgttccggttcaatctaataagccactcagtgttggagctctgaagaatttgggagtagtgtatatttcatgcggggatgcacacaccgctgttctgacccaggatgggaaggttttcacattcggggacaataggtccggccaactagggtattctcccacccccgagaagcgaggcccgcagttggtcgagcgcattgatgggcttgtgagccagatcgattgtggcaggcttcgcgggtgtagttctcagactcatttttgctggaacatctgtcagctgtgtgacaactccagcgtaaagctcgagtag

SEQ ID NO: 16820 - DNA, 1743 bp, synthetic construct
  source 1..1743: mol_type = other DNA; note = Synthetic coding sequence
atgcgggccctgactgtgcagcgcgtgaagtttgccatggatcttcctttactcaaaagggcaggccaggacctagctgaaaaaaccaaaaattttgtgtctaggagtctggtgatcggggaggtgctgtctatggcagacatggcgaccggtgttaagtgtggcatcatctactggctattcggcggggcaatcagaaatctgggctccccagaacacgtgaccaaatggttccaacccctccaggagcaaaaatacacaggtatgtttgccatgaccgaaagagggcacggctccaatgcaagaggaatccaaactgaagccacatttgatttgtcagcccaagagttcgtaatcgatactccctgcgagaatgcagagaagatgtacataggaaacgccatgtatggcaactatgccgccgtcttcgcgcagctgattatcgatgggcgatcgcaggggcctcattgtttcatagtcccagtaagggacgagaacggtagcctctatccaggtgtgacagcgatcgatatgatgtacaaggagggtctccacggtgtcgataatggcatcttgatttttgataaagttcgtattccacgtgagaacttactggacaaatttggttccgtcgcccctgatgggcagtaccattcccccataaggaataaatctgctaggttcaacgccatgttggccgctctcactccttcacgtctggcagtggcatttcaggccatgggggccatgaagcttggactcactattgccattcgctatagccattcccgacgccagttcgggccaaaaaccaaggaggaggtcaagatcatcgaacaccaaacccaaactttaaggctgatgcctcacctggcgacagctcttgcgttgacttttgtgtctcggtacgctggtgcccttcttgatgaggatgtctttcaggggaaggagctagtgaacagccgttccctccaggcccttgtggctggcctcaaagcctacagtacctgggaaaatatccgctgcctacaggactgtcgggagtgtactgggggtatggttgttgggcgggagctcctggcacaatataccaaacagtatgaggagaagcctctttttggcctgctgcaaaattgggccgaatccgttggggataaactcaggacctctttcctagcttttaatatggacacggtggacgacctggcctttctgcttaaagcggtaaagtttcgcgaacgggttctacagcggggtctggtggcaagaatttattataaagtcaagactaagaaagaagacttcttccacgcatggaacagttgtttgcatcatgtcgctagtctgtcactggcccatactcatagagtgactcttgagcaattcagtcttgcagtgaagagttgccccgatcaggaggatcaaaccctgttgatgaaattctgccttttatacggcactaagcttgtgttccaagaaagagcttggtacctagaacataaatacctcaccccgatggcctcgacccggattcgaaaccaacttctggatctgtgtgactccgttaaagacgatgccaggagggtgattagtacgttcaacatcccccatacgtatctgcatgcacccatagccggtatttccaatccaagagctgcatgggccttttaccctgcgcccctgcagccgagaccgcgcgaagaggcccgcagtagaagaccaaagctgggggcaaagctctag

SEQ ID NO: 16821 - DNA, 561 bp, synthetic construct
  source 1..561: mol_type = other DNA; note = Synthetic coding sequence
atgggggtgaaccagtctgtggggttcccgcccgtcacagggcctcacctggtcggatgtggtgacgttatggagggccaaaacttgcaagggagctttttccgcctgttttacccttgccagaaggcagaagaaaccatggaacaaccattatggattccacgatatgagtattgcaccggcttggcggaatacttgcagtttaacaagcggtgtgggggcttgctttttaatctcgcggttgggagttgtcgacttcctgtgagctggaatgggccctttaagaccaaagattcaggatacccacttattatcttctcccacggccttggggcattcaggacactgtactcggccttttgcatggaacttgcttcgcgtggctttgtggtggcggtgcctgagcacagatgtgtctatttcagggatcggtcggctgcaactacttacttttgtaagcaagcccccgaggagaaccagccaaccaacgagagcctgcaggaggaatggattccttttcgccgcgttgaggaaggtgaaaaggaattccacgtgaggtag

SEQ ID NO: 16822 - DNA, 1620 bp, synthetic construct
  source 1..1620: mol_type = other DNA; note = Synthetic coding sequence
atggccacatcagcccctctccgatcccttgaggaggaggtgacctgttctatctgcctcgactaccttcgcgatccagtcaccatcgactgcggccacgtgttctgccgctcctgcactaccgacgttcgcccaataagcggctctaggccagtttgtcctttgtgtaagaagcccttcaagaaggagaacattcgcccagtgtggcaattggcgtccctcgtggaaaatatcgagcgcttgaaagtggataagggaaggcagccaggagaagtgacacgggagcagcaggatgccaaactgtgcgaacgccacagagaaaaattgcactattattgcgaggacgacggcaaactgctgtgcgtgatgtgtagggagagccgagagcatcgcccacacaccgccgtcctcatggagaaggccgctcagccacacagagaaaagattctgaatcacctgtcaactcttaggagagacagagacaagatccaaggatttcaggctaagggagaggctgacatcttagccgctcttaaaaagctgcaggatcagagacaatatatcgtggctgagtttgagcaaggtcatcagttcctccgcgaacgagaggaacacctgttggaacagctggctaaattggaacaggagttgacggaggggcgggagaaattcaaaagccgaggcgtcggcgagttggctaggctggcactggtgatctccgagcttgagggaaaggctcaacaaccagccgccgaactgatgcaggatactcgggactttctgaaccgatacccccgcaagaagttctgggtcgggaaacctatcgcacgcgtggtgaagaagaagactggcgaatttagcgacaaactgttgagcttgcaacgggggctccgggaatttcagggaaaactcctgcgcgatctcgaatacaagactgttagtgtcacactggatccccagtctgcatccggctatcttcagctatccgaagattggaagtgcgtgacctatacttcgctgtacaagtcagcatacctacacccccagcagtttgactgcgagcccggcgtgcttggctccaaagggttcacctggggtaaagtgtactgggaggttgaagtggagcgggagggatggtctgaagacgaagaagaaggagatgaagaagaagagggcgaagaggaggaggaagaggaggaggcgggttacggcgacggttacgatgactgggaaaccgatgaggatgaggagtccttgggggatgaggaggaagaagaggaggaagaggaagaggaagttctggagtcttgcatggtaggagtggctagagactcggtgaaaaggaagggcgacctgtcattgaggccagaggatggcgtgtgggctctgaggctgtcatcctcaggaatttgggctaacactagtcccgaggctgagctgttcccagccctgcgaccccgaagggtgggcattgctttagattacgaaggcgggaccgtaacatttacaaacgctgagtcccaggaattaatttacacattcacggccaccttcacacgcaggttggtgccattcttgtggctgaagtggccaggaacccggctactgttgcgcccatag

SEQ ID NO: 16823 - DNA, 2613 bp, synthetic construct
  source 1..2613: mol_type = other DNA; note = Synthetic coding sequence
atgtcaaggaatcctagctcaaattcacccgaggaagacaccgtaccggtccccaaaggtagtgtgcccgcagcccggccatcccgcggtggaatgtccgtagtaggtatcgacctggggttcctcaattgttacatcgcagtcgcgcgatcagggggcatcgaaacgatcgctaatgaatatagcgaccggtgcaccccagcgtgcatcagtctgggctccaggacgagggctatcgggaatgctgctaagtctcagattgttacgaacgtgagaaatacaattcatggcttcaaaaagttgcacggtaggagcttcgacgaccccatcgtgcaaactgagcgtattagactgccctatgagctccagaagatgccaaacgggtctgccggagtgaaagttcgatatctggaggaagaacgccctttcgcgatcgagcaggtcaccggtatgttgttggcaaagctaaaggagacatctgaaaatgcgctgaagaaaccggtggctgattgtgtgatatcgatcccaagtttcttcactgacgcagaacgcaggtctgtcatggcagctgcacaggtcgctggactgaattgcctgcgactgatgaacgaaacaactgccgtggcactagcttacggcatatacaagcaggacctgccacccctcgatgaaaaaccgagaaacgttgtcttcatagatatggggcactcagcataccaggtgttggtctgcgcattcaataagggcaagctcaaggttctcgcgaccacattcgacccctatctcggtggccgcaactttgacgaggcgctggtcgactatttttgcgacgagtttaagaccaaatataagattaacgttaaggagaattcacgagccttgctccgcctgtatcaggaatgtgagaaacttaaaaagctgatgtcagcaaatgcttctgatcttcctctcaacattgaatgttttatgaatgacctggacgttagcagcaagatgaatcgggcccagtttgagcagctttgcgccagtctgctggcccgagtggaaccacccctgaaggctgtgatggagcaggctaacctccagagagaggatatctcatcaattgagatcgttgggggagccaccagaatccctgctgtgaaagagcagattactaagttcttcctcaaagatatatctaccactctgaacgccgacgaggctgttgccagaggatgtgccctccagtgcgccattctgagccccgctttcaaggtccgggaattttctattacggacctcgtgccatattccatcaccctgcgatggaagactagcttcgaagatggctcgggagaatgtgaggtattttgcaagaatcatcccgcaccattctccaaggtgattacatttcataagaaggaaccgtttgaactagaagcattctataccaatctgcacgaagtcccctacccagatgcccgtatcggcagctttaccatacaaaatgtgtttccccaaagtgacggcgacagctctaaagttaaggtgaaagtgagagttaacatccacggaattttttccgtggcgtccgcaagcgtgatcgagaaacagaaccttgaaggtgaccatagcgatgcccccatggagactgaaacatcctttaaaaacgagaacaaagacaacatggataagatgcaggtggatcaggaggaaggccatcagaaatgtcacgctgaacacacccctgaggaggagatagatcacaccggggccaaaactaagtccgcagtctcggataaacaggaccgtctgaaccagacgctgaagaagggaaaggtgaaaagcatcgacctaccaatccagtccagtctctgccgtcagctagggcaggaccttctgaacagttatatcgagaatgaggggaagatgataatgcaggacaagcttgagaaagaaaggaatgacgctaaaaacgcagtagaggagtatgtatatgatttcagggatcgcctgggcactgtctacgaaaagttcatcacaccggaggacctgtctaagctttctgcagttctggaggacaccgagaactggctgtatgaggatggagaagatcagcctaagcaggtgtatgtcgacaagctgcaggagctgaaaaagtatggacaacctattcagatgaagtacatggagcatgaggagagacctaaggccctgaatgacttgggaaagaagatccaactcgtgatgaaggtaatcgaggcataccgcaataaagacgagcgatacgaccacctggatcccacagagatggaaaaggtggagaagtgtatctccgacgctatgtcctggttaaattctaagatgaatgcccagaacaaattgagcttgacacaagaccccgtcgtgaaagtgtcagaaatcgtggccaaatcaaaggaactcgataacttttgcaatcctattatctacaagccaaagcccaaggcagaggtcccagaagataagccaaaagctaacagcgagcataatgggcctatggatggtcagagtggaacagagacaaaatctgactccactaaagattccagtcagcacaccaaatccagtggagagatggaggttgattag

SEQ ID NO: 16824 - DNA, 5463 bp, synthetic construct
  source 1..5463: mol_type = other DNA; note = Synthetic coding sequence
atggaacctcctcaggagaccaatagacccttctcaaccctcgacaataggagtggccaggttcaggtgctctcagccactcccttgttgcaaaggaatccctattcgtctccagacattatgcacatcaagggatccgaagcctcatctgtgccttacgcactgaatcaggggacgaccgcccttccgaagaacaaaaaccaagaaggaacaggccatcggctcctgaacatgctcaggaaaacgctgaaggagagtgactccgaggaattagaaatcacccaggagactccgaacctcgtaccattcggggacgtggtggggtgtcttggaattcatatcaaaaactgcagacattttatgcctaagatttcactccaacactacgccaaccttttcattaggatttcaatcaacaaggcggtgaagtgcacaaaaatgtgcagcttactatccaagaatgacgagaaaaacacagtgataaagttcgacgaggtcaaatatttctcagtacaggtacctcggaggtatgacgataagcggaacaacatccttcttgaattaatacagtacgacaaccgtgagaagagggcctttctgctggggtcagtgcagatccatctatatgaggtgattcaaaaaggctgctttatcgaggaggtgcaggttctgcatgggaacatcttcgtttgtcgcctcgaggtggaattcatgtttagctacgggaattttggctatggcttttctcaccaactgaaacctcttcagaaaatcaccgagccctccatgttcatgaaccttgcaccacctcccgagcgcacagaccctgttacaaaggtgattaccccacagacggtggagtaccccgccttcttatccccagatctgaatgtgactgtgggcacgccggccgtacagagctccaatcagccaagtgtcgtgaggctcgaaaagctgcaacaacaacccagagagcggctagaaaagatgaaaaaagagtatcgcaacttgaacacgtggattgacaaagccaactacttggagagcatactaatgcccaagttagagcacaaggatagtgaagagacgaacattgacgaagcttcagagaacaccaaatcgaaccatcctgaagaagaactagagaacatcgtgggagtggatattccattagtcaatgaggaagccgagacaaccgccaatgagctgctggataacgactctgaaaagggactgactatacctaccctgaatcagagcgaccaggacaacagcaccgcagacgccagtaagaatgacgagtctaccccctcccctactgaagtacacagtctctgtacaatttctaaccaagagaccatcaaggcaggcagaattccccctttaggcgagcggcaatcggaatctatgcctgatcgaaagatgaagaacgttttctttccccttgaggtcaagctaaaagacaattatccctcgattctcaaagccgattcttccctctctgaagtcgccttcagccctaaggagtataactcacccagtttcaggccagaatatatcgagtttaaacccaagtttcaatttcagaaattcaacaagaatggattcgacccatttctgaggaacataaataaaatgtccgtacggaaacgcaaggaccaggacatctacaaatacaggaacattctcggtgccgaggttatcgaacatgaagaccaagacccaccctatccagcccagtctaagacggctggcccagccaacaccacctgggctcatgaccctaacatcttcactaccaagatgttagaaactgagaataagctcgcgcccgaccccactatcaatacgattaagggcctcgataccaagaactctttaaaagagaatctgcctaacgtgagcctcccgtccattaagggtgagtcctcaagggcggggaacgtgcaggccaatacctgtcacctgagtaaatctcttaatttcactccccacatagagtatttgaagcaatccatgatcctgaagagtatcctatccgaaaacctgcaggatctttccgacaagctcttctctaagcccgaagtgagcatgaacagcgaagcaagagagaagagctcttctcctctgctgtccatacacgacaaatcttctagctctatggaggacaacgtgctggagaaaaaacaagatctgaataactggctgtctgaaaaagatattctcaattccaagacaaccctgtcccagataatcaaaaacatccctgccgattcctttagcgaagggagccagattatcgaaaacatcccagccgattctctgctggagggcggacaggttatcaagaatatcccagagtatagcctgtcagaaggagggcagattataaagaacatccctgcagattctttccttgagtcaggtccaggccaatctcctgaggttgaggagcacgttagcaagaaacacttcgaggcggatgaacgtgacttcccaatcaagaaaaattccagcactaaaaagaagcatctgatctctgaggtgccgaattccaaaagtgggagttcaggcaccgttcacgattatatcatgagacagatctttacggcgcccatttttagcgagctagagatcgaggtgaaggagccgtccgaaacccccatgaacttggagaatcagctcccaacgccctggaagaggtcgttgtcatcgcacattctgttccacgaagagaatgctgacgaaatcgaattaccccaacccagaagtgcaacatcccagataattcaggcctttcccatcgacacgctcctcgagagcggcataatcaaggtgatagagcttgataaggaacatcataagtcatctcttctcggcacagggattacttcaccaaaggggaacctgaaagacagccaagagtactactctgagatccgctctgagactgaaccactgtcagagcagtctatccctattatcccaaaggacacaaccagtgtgtcgagggctgagttcatccaagaggaccagaatatgttcccacaggactcatcctactactcgatcgccaataaagagctgtatctcccaaggaatggtcagcgcctgtgtaaggataagaatgacttatcatctaccctggaatctctgaccaatagtcttatggataagttgtccgaatccgatgagataatgttgaaatctttccttaagaacatatttaatgtcttcttcaaatacaatcactctgagaggcggggccaaccagagaaggaattagaacgcctcattcagccctcgtttacttccgacacagagcatcttgaggagcttcaagaggattttgataaggccgacaaactggacaggaaaccaattctgtcccccaagctgagagtattcctggaagagctaagtgagagtgaggtcaagcacctgaagtctgaactctccaagcagatccagcactatctggtggaaagactttctgaatccggtcatatcaccaaggaggatctccctaaaatctaccagaatttataccttatgaatgagaaggctgagcagaagggacctaactcatttcagggaaagtacagtgagactgtaaaggagatcatgtcatttgttaacaacttcaatcatcactttatcgacaagcatctggaaatcaaactgcggtcctttctcaaagagatcctgcagaactacttcctgaaaaacatatctgaaagttccttgttcaatgaaaccgcctctgagactatctatcccaacatttcctctctcagaacaaagagcgtgtctatctcttttcacgaacttgagcaggacatttccaagggctcctttgggaggcggtttgagattaacatgaagtaccctctcagcaaatccttgcagaactatcttattgctctgagtgaaaatgaactgctgcaccttaaggccgatctctccaagcacctccagagcctttttatcgaaaaattaagtaagagcggcttgatgaccaaaaagcagcttgaaggcataaatcagcacattaaccttcttaatagctcctcaatccccctaaagtatattaagacacacttgcccttcagggatgactgccactttgtggagaaacactctgaaaaacagaataagtattcccgcatcgtgcagcagacaacactccaaactgtgagcgaggacaaactgagggaggctgagctaattcgggagaaagagaagaagtacttccccctccagaatctgaagggaaactcaagtctgattaaggagcagaaatcttattatacaaaagaggaggccaagaccccttcacttatcaaagtgcaaccatcaagcaatgaaaacatccaggcatcaccgctgtctaagagcagcgaaatactcaccgacattctgctgaagaagctccgcaaagagcacgtatttacccagctcccccaggcagaaaacagcgtgcataaaactgagatacaggacccctacagctggggtggaaaatccaagatcacacagtctaaggcttggtgcgaaaagaccctaaagatgaaatccttggacagaaaggagcacgtgaacatttacaagtggactgtgcaggaaaaacccgaagccgtgctaacctcttacccccgcatccctaacgcaaggatgcctagagaggatgagtatctcaataggataacatttcccagctggcagtcaagtaccttgacacactttaatacggagacgggagaaaagagcaaactcgaggaccagtactgccaaacccttaagggtaacaacaacaacaataagaaacacttagtgactttcgcgcaatataagaaggagattcaaacgctgtacattaaaccagacgagatctgcagtgaaaaatgcgctaaattcccagagattcagtcctttcagtacaaggtggtggaggacgagaagaatctcaaaccacatttgtttccggagctgtttaagatagaagatctcaaacccaaagtgcggaaggaacgggatcgtgtggcgcagcctaagaagtcatttaataaaatcgtgcgcattctgcctacaactttgccaacgactaggatccacctgaagaagtctgtccccagaacgctcttacactggaccgctaggaggacaattcacgactgttctgacaagtttgaggacctccacgatatgacctctttcacccatctcaaaaaagtaaagagcaggagtcgccttctcggcaagtcatccgacgatatccacaatcatgcgagacatagtgcccggccatatacagccccggaggtcaacaaacaacgcgagtcttactccggcaagtttaccagccgccggatggtatcgtccggactggttcacatcaatgataagacatctgattatgagatgcataaaatgagacctaaaaagatcaaaagagggtactag

SEQ ID NO: 16825 - DNA, 498 bp, synthetic construct
  source 1..498: mol_type = other DNA; note = Synthetic coding sequence
atggagcctacaagagattgtcctctgttcggtggggcattctcagcaattctgcctatgggggcaatcgatgttagcgaccttcgacccgtcccagataatcaggaagtcttttgtcacccagtgacagaccagagtctcatcgttgaactgctagaacttcaggctcacgtgcgcggagaagccgcagccaggtatcacttcgaggatgtgggaggagtccagggggcacgagctgtacatgtggagagcgtgcaacctctgagtctggaaaacctcgctctgcgagggcgctgccaagaagcttgggttttgtcagggaagcagcagatcgccaaggagaatcagcaggtgcgagcgcgagagtgtgttatgtcctggaagggcggctcaggcgatgctgaaattcaagtgagcatcctcactttaattcctctaggctctaaaggcagggatactagttctggattagccgaagcagctcccgtgccagactag

SEQ ID NO: 16826 - DNA, 4482 bp, synthetic construct
  source 1..4482: mol_type = other DNA; note = Synthetic coding sequence
atggcttcgatcacgcagctcttcgacgatctttgcgaggccctgctgcccgccgctaaaacacacttgggccaacgatccgtcaaccgcaaacgcgctaagagatctctcaagaaagtggcatacaacgccttgttcaccaatctgttccaagacgagacacagcaactccagcctgacatgagcaagctgcctgcacgtaataagattctgatgctgagcttcgaccttcgcgtcggcggactgggccctaaagctgatcggcttgaagaactggtggaagagctcgaggcagccccttgctgccccttgctcgaagtcgggtccgttttggacttactagtgcagcttgccgggtccggcccaccccaagtcctgcctagaaaacgtgattatttcctgaacaataagcacgttggaagaaacgtgccctacagtgggtatgattgcgatgacttatccgtgttcgagatggacgttcagtcactcatatctagggaggagtgcctgtgccacagcatgattcaggagacgcttcaggttatggaagcagcccccggcaccggcctacccactgtggggcttttcagttttggggacccgtgtggcgaccgattcgagcgagacacaagagtctcactgttcggcgccctcgtccattccaggacatatgatatggacgtgcgcctgggtctcccaccagtcccggacaacgcggacctgtctggtttggcaatcaaggtacctccctcagttgaccaatgggaagatgaggggtttcaaagcgcaagcaatctgactcccgacagtcagagtgagccatctgtcacgccggacgtcgatttgtgggaagcagcgcttacctacgaggcctccaaacgacgatgctgggaacgcgtcggctgccccccgggacacagggaagaaccctacctaacagaggcgggacgagatgcatttgacaaattttgtcggctgcaccagggcgagctccaactcctggcgggcggggtgctgcaggctccccaacctgtactggtaaaggagtgtgagcttgtaaaggatgtgcttaatgtgctgatcggcgttgtgtctgctacattcagtctatgtcaacccgctcaagctttcgtcgtcaaacgtggggtgcacgtgagtggggcctcccccgagtctatatctagcctgctgtcagaagtggctgaatatggcacttgctacactcggttatcacatttttccctccagccagtacttgactcgctgtacagcaaaggtctggtgtttcaagctttcactagcgggctgcggcggtatctgcagtactatagggcttgcgtactgtcaacaccgcctaccctttccttgttaacaatcggatttctgttcaaaaagcttggccggcagttacgctatctcgcagagctttgcggcgtcggcgccgtgcttcctggaacctgcgggggcgggcctcgcgcagcatttcccaccggtgtgaaactgttgtcctacctctatcaagaggctctccacaactgtagtaacgaacactaccccgttctgctgagtctgcttaagacttcatgcgaaccctacacccgttttatccacgactgggtctactccggggtgtttcgggacgcttatggagagttcatgatccaggtgaaccacgagtacctttcattccgggacaagctgtactggacacatggctatgtactgataagtaaagaagttgaggattgtgtacctgtgttcctgaaacatatcgcccatgacatttacgtatgcggtaaaacaatcaatctactgaagctgtgttgtcctaggcactacctgtgttggtcggatgtcccagtgcccaggatttctgtgatttttagcctcgaggaattaaaggaaatcgagaaagactgcgctgtgtacgtgggcagaatggaacgggtcgctcgccacagcagcgtcagcaaggaagagaaagagctgcgtatggagatcgccaaacaagaactgatcgctcatgctcgcgaggcggcttcccgggtgttgtcagccctcagtgaccgccagatgtcggagcggatggccctcgatgccagaaaacgggaacagttccagagactgaaggagcagttcgtaaaagaccaagagcgccggcaagccgctcgacaggaggagctcgacgacgacttcagctatgctcgcgaactacgggacagagaacggcggcttaagagcctcgaggaggaacttgagagaaaggcccgtcaggccttggtggaccactactctaaactgtccgccgaggctgccaggagggagcagaaagccttgtggaggattcaacgccacagattagagtctgctcgcctgagatttctgcttgaggatgaaaaacatattcaggaaatgctgaaagctgtttccgaggcccatcagccacaggagcctcctgatgtgctgctatccgtgcacccccaagtcacctcgccggggcccgaacatcccgagggcggccagggatgcgacagcggatccgcggaacagcattctccggcatgggatggctggaacagacctggcctcttaactcctcagccattgaagccactagcggtgggagccggaggacggggcctgcagcaagcagaaggagcacgccctttctccgactccctgtcaatcggagattttctgccggttggcccgggagccgagccttcagtgcagaccggcatggtcccactgcttgaggtggcacttcagaccattaaccttgatcttcctcctagtgcaccaggagaagcaccggctgccgcttcgactcagcccagtagaccccaggagtatgacttctcgacggtgctcaggcctgctgtagcgacgagcccagcccccggccccctgcaggcagccgagtgctcacttggcagttccggacttcagctgtgggaggactcctgcgggaaaatggacgcttgtgggtccgcatcgcgcgagacacttctgcccagtcacccacccagaagggccgctctggaggaaggaagctcccagcctaccgagaggctgtttggtcaagtgagcggtggggggctacccacaggtgactacgcatccgaaattgcgcctacacgcccccgttggaatactcacgggcacgtctctgacgcatctatcagggtgggggagaacgtgtccgacgttgcgcccacgcagcctagatggaacacccatggccatgtgagcaatgcaagcatctctctgggtgagtcagtgtcggacgtggcccctacccgtccgcgctggaacatccacggccacgtaagtaacgctagcattcgagtgggcgagaatgtctctgacgtagctcctactcgcccaaggtggaatacccacggccacgtgtccaacgcgtccatcagagttggcgaaaatgtttccgatgttgctcccacccgccctaggtggaatacacacggacacgtcagtgacgccagcatctcactgggtgaatcagttagtgatatggctcctgcacgcccacgctggaacacccacggtcatgttagcgatgctagtatttctctgggggagagcgtatccgacatggctcccacgcggcctaggtggaatacacatggacatgttagcgacaccagtattagggtcggggagaatgtaagcgacgtcgctcccatcagatcgcgatgtaacactcacggccacgtcagtgacgcatcaattagtctgggcgagccagtgagcgacgtggtgtccactcgcccacgatggaacacccacgttcctatccccccaccccacatggtcctgggcgccctgtcgcctgaggcagagcccaatacgcctcgcccgcagcagagcccccctgggcatacatctcaatcagccttgagccttggcgctcaatcaaccgtcctggactgcggcccgcgcctccccgttgaagtcggaccgagtctatcttccccatcctctggatgtggcgagggatcaatttcagtcggagaaaatgtgtcagacgtggcgcctactcaaccctggtggcctaacactcctggcgactccgtgtccgaagagctgggccaatctcgtgtggcagggggccaggaatgggactgtggcacgcatcgggcgtgggaggccctgggcggggcaggtaccctacgaacttcactccagatcggcctgagcacacacaggaaaacccagctcccacgcgccgcacaagccgttgtgagacgcagacggcaccggcgcagacgtctgagggtgggatctagaccaacctggcaagcttggcaggggtctacaacctggtctggcacgcgtacagttacatccccatgtccaagccgtccattactcatcttctgcgctccctgctttccaggaccatctccctctccctggacaccgaggagttctctgccactaatgagactgctgtgttcatag

SEQ ID NO: 16827 - DNA, 1077 bp, synthetic construct
  source 1..1077: mol_type = other DNA; note = Synthetic coding sequence
atggcccctcagaatctgagcactttttgcctgctcctgctctacttaatcggcgctgtgattgccggcagggacttttacaaaattcttggtgtgccccgctctgcttcaatcaaggatatcaaaaaggcctataggaaactggcactgcagctacatcctgacaggaaccctgacgatccacaggctcaagagaaatttcaggatttaggtgccgcatatgaggtgctttctgacagtgagaagaggaagcagtatgatacatatggtgaggaaggcctgaaagacggccatcagtcgagccacggcgacattttttctcatttcttcggagactttggcttcatgttcggtgggaccccacggcagcaggataggaatattcctaggggatcagacattatcgtcgatctggaagtgacgctggaggaggtgtatgctggtaacttcgtggaggttgtgcgcaacaagccggttgccagacaggctcccggaaaacggaaatgtaattgtcggcaagaaatgagaacgacccagctgggtcccggtcgctttcaaatgacgcaagaggtggtctgcgacgagtgtcctaatgttaaattggtgaatgaggagcgaactctcgaagtcgaaattgaaccgggagtgcgggacggtatggagtatcctttcattggcgagggggagcctcatgtggacggcgagcccggtgatctccggtttagaatcaaagtcgtgaagcaccctatattcgagcgccggggtgacgatttgtacacgaacgtgacaatcagcctagtggaaagcctggtcggctttgagatggatatcactcatttagacggtcacaaggtgcatatttctcgagacaaaatcacccgccctggtgctaaactctggaaaaaaggggagggtctcccaaatttcgacaataacaacatcaagggctccctcattatcacctttgatgtggacttccctaaagaacagcttaccgaagaggccagggaggggattaagcagttattgaagcaggggagcgttcagaaagtgtacaatggactgcagggatactag

SEQ ID NO: 16828 - DNA, 2757 bp, synthetic construct
  source 1..2757: mol_type = other DNA; note = Synthetic coding sequence
atggcctccctgagtcgcgccctgagagtagccgcagctcatccgcgccagtctccaacaagagggatgggcccatgcaatctgagtagcgctgccggacccaccgcggaaaagagtgtaccctaccaaagaacgcttaaggagggtcagggaactagtgttgtggctcagggtccaagccggcccctcccatctacagcaaatgtggttgtcatcggagggggcagcctcggatgccagacgctctatcacctggcaaagctaggcatgtctggcgctgtgttgctggagagggagagactgactagtgggaccacgtggcatacagccggactactgtggcagctgcgacccagcgacgtcgaagtcgagctgctggcacacactcggagggtggtgagtcgtgaactggaggaagaaacaggcctgcacacagggtggatccagaacggcggcctgtttatcgctagcaacaggcagagactcgatgagtacaagagactgatgtccttgggaaaggcttacggggtcgaatctcacgtattgtcgcccgctgagaccaagactttatatcctctgatgaatgtggacgacttgtatgggaccctgtacgtcccacacgacgggacgatggacccagctggtacctgcacaactctggcgagagccgcgtccgccaggggtgcccaggtgatcgagaattgccctgtaacgggcatcagggtgtggaccgacgactttggggtccggcgcgtagccggggtcgagacacagcacggctccattcaaacaccatgtgtcgtaaattgtgccggcgtctgggcttccgcagtgggccggatggcaggagtgaaggttccccttgtggctatgcaccacgcatacgtggtgacagaaaggatcgaggggattcagaacatgccgaatgtccgggaccacgatgctagcgtgtatctgcggctgcagggagacgctttgtctgttggaggctacgaggccaaccccatattctgggaggaggtgtctgacaagtttgcattcggtctttttgacttggattgggaagtgttcacccaacacatagaaggcgccataaaccgggtgccggtccttgaaaagacaggtattaagtctactgtctgtggacccgaatcttttacacccgatcacaaaccacttatgggggaagcccctgagctgcggggcttcttcttaggatgcgggttcaactcggccggtatgatgctcggcggcgggtgtggacaggagctggcccattggattatccacggaagacctgagaaagacatgcatgggtacgacattagaaggttccaccactccctgaccgatcatcctagatggattcgggaacggtcgcatgagagttatgcgaagaactattccgttgtgtttccgcatgatgaacctttagctggtcgcaatatgcgccgagatccccttcatgaagagctattggggcaggggtgtgtttttcaagagagacacggatgggagcgccccggttggttccacccccgcggcccagcacccgtattggaatatgactattacggtgcatacggttcacgagctcacgaagactatgcctatcggaggcttctagccgatgagtacacttttgcttttcccccacatcacgataccatcaaaaaggagtgtctggcatgtaggggtgcagcagccgtcttcgacatgtcctattttgggaaattctacctcgtcggcttggatgccaggaaggccgcagattggctgttcagtgcagacgtgtctcgaccaccaggcagcaccgtgtacacatgcatgctcaaccatcgcggagggaccgaatctgatcttaccgtcagccggctcgcaccgagccatcaggcttccccattggcccccgcctttgagggcgacggatactacctggccatggggggggcggtggctcagcacaactggtcacacatcactacagtgctgcaggaccaaaagagccaatgccaactgatagactcatcggaggacttaggaatgatctccatacaaggtccggcctcaagggcgatcctgcaggaggtgcttgatgccgacttaagtaacgaggccttccctttttctactcacaagttgcttcgtgctgccggacatttagtacgcgccatgagactgagctttgtgggggagttagggtgggaactgcatatcccgaaagctagctgcgttccagtctaccgcgcggtgatggccgcgggagctaaacatgggctcatcaacgccggatacagagctatcgacagcctttctatcgagaagggctatcgacattggcacgccgacttgcggcctgatgactctcctctggaggccggcctcgccttcacgtgcaaactcaagtcacccgtgccctttctgggacgcgaggcacttgaacagcaacgagccgccgggctgaggagacggttggtctgtttcacaatggaggacaaggtgccaatgttcggcttggaagcgatctggcgtaatgggcaggtcgtggggcatgtgcgccgggctgacttcggctttgcaatcgataagacaatagcttacggctatatccatgatccctccggtggaccagtgtctctggatttcgtaaaaagcggagactacgcactggagagaatgggagtgacttatggagctcaggcccacctcaaaagtccttttgaccccaacaataagcgggtgaaaggaatctattag

SEQ ID NO: 16829 - DNA, 222 bp, synthetic construct
  source 1..222: mol_type = other DNA; note = Synthetic coding sequence
atgtcttaccagcagcagcagtgcaaacagccgtgccaaccacccccccccgtgtgccggctgcctaagcgcccagaaccttgtccccctctcaaatgtcctgaaccgtgcccgccccccaaatgcccccagccttgccctccccaacaatgtcagcagaagtaccccctggttaccccaagccccccttgtcagcccaaatgccctcccaaatctaagtag

SEQ ID NO: 16830 - DNA, 576 bp, synthetic construct
  source 1..576: mol_type = other DNA; note = Synthetic coding sequence
atgggcaagaagaccaagagaacggctgactcctctagctccgaggatgaagaggaatatgtcgtcgaaaaagtattagatagacgcgttgtgaagggccaggtagaatacctattaaaatggaaggggttcagtgaggagcacaatacctgggagccggagaaaaatctcgattgtcctgagttaatctcggaattcatgaagaaatataaaaagatgaaggaaggtgagaacaataagccccgggagaaatccgaaagcaataagagaaaaagcaatttttcaaactcagctgatgacatcaagagtaagaaaaaacgggaacaatcaaatgacatcgctaggggtttcgagcgagggctggagcccgaaaaaatcataggggccactgacagctgtggggacctgatgtttttgatgaaatggaaagacacggatgaagccgacttggtcttggccaaagaggccaacgttaagtgcccgcaaattgtaattgctttttatgaagagagactgacctggcatgcctatccggaggatgccgaaaacaaagagaaagaaaccgcaaaatcatag

SEQ ID NO: 16831 - DNA, 60 bp, synthetic construct
  source 1..60: mol_type = other DNA; note = Synthetic coding sequence
atgctgaagaataagggacacagttcgaagaaagataatctcgctgtcaatgccgtgtag

SEQ ID NO: 16832 - DNA, 1026 bp, synthetic construct
  source 1..1026: mol_type = other DNA; note = Synthetic coding sequence
atggaatcaaacttcaatcaagaaggtgtgccaaggccctcttatgtttttagtgcagacccaatcgctcgaccaagtgaaattaactttgatggtattaagctggatctcagtcatgaatttagcctggtcgcgccgaataccgaagccaactctttcgagagcaaagattatctgcaggtgtgtctcaggatacgccccttcacgcagagcgaaaaggagttagagtccgaggggtgtgtgcacattctggacagccagacagtggtgcttaaagaaccgcaatgtatacttgggagattgtccgagaagagcagcggccagatggcccagaagttcagctttagcaaggtgttcggcccagccaccactcagaaggaatttttccagggatgcattatgcaaccagttaaagacctacttaaggggcagagccgattgatttttacctatggattaaccaactctggaaaaacctacacatttcagggcacagaggaaaatataggtattttaccaaggaccctgaacgttctgttcgatagtctgcaggaacgcctctatacaaaaatgaatctgaaaccccacagaagccgcgagtatctgagactgtctagtgagcaggagaaagaggaaatcgcctcaaaaagtgcacttctcaggcagatcaaggaggtgactgtgcataacgactctgacgatacactgtacggttccctaacgaactcattaaacatctctgagtttgaagagtcgatcaaagactatgagcaagccaatctgaatatggccaattcaataaagttctctgtgtgggtatccttttttgagatctacaatgagtatatttatgatttatttgtgcctgaattggctaagacaaagggcgagttgattaagaccaaggaagaactgaaaaagcgcgaaaacgaatcggactccctcatacaagaacttgaaacctctaataaaaagattataacgcagaaccaacggatcaaagaattgattaacatcatagattag

SEQ ID NO: 16833 - DNA, 27 bp, synthetic construct
  source 1..27: mol_type = other DNA; note = Synthetic coding sequence
atggcagacactgatctgttcatgtag

SEQ ID NO: 16834 - DNA, 2628 bp, synthetic construct
  source 1..2628: mol_type = other DNA; note = Synthetic coding sequence
atgatgtacactgttctgcccgatggatcaccggtgcctcagggtatggccctgtatgccccccccccacctctcccaaataacagcaggcccctaacacctggaacagtagtctatgggcctcctcctgctggagcacctatggtttatggcccaccaccccccaatttctccatcccttttatccccatgggggttctccactgtaacgttcctgagcaccacaatttagagaatgaagtgagccgcttagaggacataatgcagcatttaaagagcaagaaaagggaagagagatggatgcgcgcaagtaagagacagtcagagaaggagatggaggagctccatcataacattgacgatctgctacaggaaaagaagagtttggagtgcgaagtggaggagcttcatcggaccgtccaaaagcgccagcagcagaaagactttattgacggcaatgtggaatccctgatgacagagctggagattgaaaagtccctcaaacaccatgaggacattgtggatgagatcgagtgcattgagaagacactgctcaaacgccggtcagagctgagggaagcagaccgcctgctggcagaggccgagagcgagctctcctgtactaaggaaaaaaccaaaaatgccgtggagaaattcaccgatgctaagcgttccctgttacagactgagtctgatgcagaggaattagagcgtcgcgcacaagaaaccgctgtcaacctggtgaaggcggaccagcagttgagatctctgcaggccgacgccaaagatttagaacagcataaaatcaagcaggaggagatactcaaggaaattaacaaaattgtggcagctaaggattcagattttcagtgtctcagcaagaaaaaggagaaattgaccgaggagctgcagaaattacagaaggacatagaaatggccgaacgaaacgaggatcaccacctgcaagtgttgaaggagagtgaagtacttttgcaggccaaacgcgccgaactggagaagttgaaaagccaggtcacaagccaacagcaggagatggccgtgctggatcgacagttggggcataagaaggaggagttacatctgcttcagggcagcatggtgcaggcaaaagccgatctgcaggaggctctgcggttaggtgagacagaagtgaccgaaaagtgcaaccacattcgcgaggtgaagtctctattagaagagttaagtttccagaaaggcgaactaaacgtccaaatctctgagcgcaaaacacaactgacgctgatcaagcaggaaattgagaaggaggaagaaaacctgcaggtggtcttgcgacagatgagcaaacataaaacagaactgaagaatattttggacatgctgcagctggagaaccatgaattgcagggccttaaactgcagcacgaccagcgggtctctgagctggagaagacacaggtcgcagtgttggaagaaaagctggaattggagaatctccagcagatatctcagcagcaaaagggcgagatcgagtggcagaagcagctgcttgaaagggacaaacgagaaatcgagcgcatgacagcagagtccagggcactgcaatcatgcgtagagtgcctgtcaaaagagaaagaggatttgcaggaaaaatgcgacatctgggagaagaagctcgcccagacaaagcgggtattagccgcggccgaagagaattcaaaaatggagcagtctaacctagaaaaacttgaactgaatgtaaggaaactgcaacaggaactcgatcaattgaatcgcgataaactgagcctgcataacgatataagcgcaatgcagcagcagttgcaagagaagcgagaggctgtgaacagccttcaggaggaactggctaacgtccaggaccatctcaatctcgccaagcaggatctgctgcacactactaaacaccaagacgtgctgttgtccgagcagacgcgactccagaaggacatatcagaatgggcaaaccgcttcgaagactgccagaaggaggaagagaccaagcagcaacaactgcaggttctgcagaatgagatcgaggagaataaactcaagctggttcagcaggagatgatgtttcagagattgcagaaggagagggagtccgaggagagcaagctcgagacaagcaaggtcaccctgaaggagcaacaacatcaactggaaaaggagctgacagatcaaaaaagcaagctagatcaggtcttatctaaggtactggccgccgaggaacgggtgaggaccttacaggaagaggagcgctggtgcgaatcccttgagaagaccttgtctcagacgaagcggcagctgagcgagcgggagcagcagttagtggagaagtccggtgaactactcgcgttgcagaaggaagccgatagcatgcgcgcggactttagcttattacgaaaccagttcctcaccgaacgcaagaaggccgaaaagcaggtcgctagcctgaaggaggccctcaaaatccagcgaagccaactggagaagaatcttctaaccgctagggaagctgaggcccaaaagctgaagaagcaggtatgtgcccagaaagcccagctggcctctctcggtagagaatag

SEQ ID NO: 16835 - DNA, 1188 bp, synthetic construct
  source 1..1188: mol_type = other DNA; note = Synthetic coding sequence
atggaaccccctcaggagactaaccggcccttctccacgctggataaccggagcggacaagtccaggttctgagtgctacgcccctgttacagagaaatccttactctagtccagacattatgcacattaaggggtctgaagcatccagcgtcccctacgctctgaaccagggcaccaccgccttgccgaaaaacaagaaccaggaaggcaccggccatcggttgctcaatatgctcaggaaaaccttaaaggaatctgactcggaggagctggaaataacccaggaaacacccaacctggtacctttcggagacgttgtagggtgcctgggcatccacatcaaaaactgtaggcattttatgccaaagatctcactccaacactatgccaacttatttatccgtattagtataaacaaggccgtgaaatgcaccaagatgtgtagtctgctgagtaagaatgatgaaaaaaacaccgtgataaaattcgacgaagtgaagtatttcagcgtgcaggtgccccgtcggtatgatgacaaacgtaataacatattgctcgagctcatacagtacgacaaccgggagaaacgcgctttcctccttggatcagttcagatccatctgtacgaggtgatccaaaaagggtgtttcattgaagaagtgcaggtgctgcacggcaacatcttcgtatgtcggctggaggtcgagtttatgttttcatacggtaacttcgggtacgggttctcacaccagctgaaaccactgcaaaagatcacggagccttccatgtttatgaatctggccccaccgccagagcggacagaccccgtcacgaaagtaatcacaccccagaccgtggagtatcccgcctttctgagtcctgatctgaatgtgacagtgggaacacccgccgttcaaagttctaatcagccttccgtcgtgcgcctggaaaagctccagcagcagcctcgtgagcgactggaaaagatgaaaaaagagtaccgcaacctcaatacctggatcgataaggcaaattacctggagagtatactgatgccaaaattggaacataaggatagcgaggaaaccaatatcgacgaggctagtgagaacactaagtctaaccaccccgaagaagagttagagaacatcgtgggcgttggaggcttcttcaccaaacggatctag

SEQ ID NO: 16836 - DNA, 282 bp, synthetic construct
  source 1..282: mol_type = other DNA; note = Synthetic coding sequence
atgtcatattatcaacggcctttcagtccttccgcatactcactgccagcatccctgaactcttcaatcgttatgcaacacgggaccagcttagattcaacagacacatacccccagcacgctcagtccctggacggtacaacttcctcatccattcccctgtatcggagcagcgaggaggagaaacgcgtgactgtgatcaaagccccccactaccccgggattggcccagtggacgagtctggcattcctaccgccatcagaactacagtcgacaggtag

SEQ ID NO: 16837 - DNA, 558 bp, synthetic construct
  source 1..558: mol_type = other DNA; note = Synthetic coding sequence
atggctgccagcgtggaacagcgcgaggggaccatacaagtgcaagggcaggccctgttcttcagggaggcactcccgggatcaggccaagccaggttttctgtgttattactgcacggcatcagatttagcagcgaaacttggcagaatttaggcacgctgcatagactggctcaggccgggtaccgagctgttgcaattgacctgcccggcctgggacatagcaaggaagccgccgcacccgctcctatcggcgagctggcccccggaagcttccttgctgccgtagttgacgcattagaactcggcccgcctgtggtcccagtggctccaatttgcacggacaaaatcaatgctgctaactacgcttcggtgaagactccggccttgatagtgtatggcgaccaggatccgatggggcaaacgtctttcgagcatctgaagcagctgcctaaccaccgcgtgttaattatgaaaggcgcaggccacccttgctacttagataagcctgaagagtggcatactgggctactcgatttccttcagggtctgcagtag

SEQ ID NO: 16838 - DNA, 1443 bp, synthetic construct
  source 1..1443: mol_type = other DNA; note = Synthetic coding sequence
atgcttgagaggcccccggccctcgctatgcctatgccaacagagggcaccccgccccccttgagtgggacccccatccccgttccagcctactttagacacgcagagcccggattcagcctgaagagaccaagaggcctgtccagatcgttgcctccccctcctcctgcaaaggggtctattccaatcagcaggctctttcctccgaggacccccgggtggcatcagctgcagccccgcagagtgtcattcagaggtgaggcctccgagacactccagtccccaggctatgacccatctcgtcctgagtctttctttcagcaatcctttcaacggctgagtcggttgggtcatggatcctacggcgaggtcttcaaagtgaggtccaaagaggacggccgactctatgctgttaaaaggagcatgagccccttcagagggcctaaagaccgcgcacggaagcttgccgaggtgggctcccacgaaaaggtgggccaacacccttgttgtgtacgccttgaacaggcctgggaagagggcggtattttgtatctgcagaccgaactctgtgggccatctttgcagcaacactgcgaagcttggggcgcatccctacctgaggcacaggtttgggggtacttaagagatacactgttagctttggctcacctccattcccaagggctcgtacacctggacgtgaagcctgcaaatatattcctgggtccgcgaggcaggtgcaagctgggagactttgggctgctcgttgaactggggactgccggagccggagaagtccaagagggggacccgagatacatggcaccggagctactccagggctcttacggcaccgcagccgacgtgttcagtttgggactcacaatcttggaggttgcctgtaacatggagctaccacacggcggggaaggatggcaacagttgcgccaggggtacctgccaccagagtttacggcaggcctgtcttcggagcttaggagcgttctggtgatgatgcttgaacccgacccgaagcttagagctaccgcagaggccctgctcgccctgccagtgctcaggcagccccgtgcgtggggcgtcttgtggtgtatggccgcagaggcactgagccgcggttgggccttatggcaggcccttctcgcactgctctgttggttgtggcatggcctcgctcatcctgccagctggctgcagcccttaggacctcctgccacacctccgggcagccctccctgcagcctcctgctggacagcagtctaagctcaaactgggacgatgactccctgggcccaggccatccaccttgtctggcatgtcccccggccggacttcactcaccgctgaggctgtcctggccaggtctgtggggtgcaccaccacctcccggcgcgggagcccatcccggcatgccttggacatag

SEQ ID NO: 16839 - DNA, 1740 bp, synthetic construct
  source 1..1740: mol_type = other DNA; note = Synthetic coding sequence
atgagcgccgccaaccccgagacacctaatagcacaattagtcgggaagcttccactcaatccagttcagctgccgcgagtcaggggtgggttctgcctgagggcaaaatcgtacccaacactgttttcgtgggagggatcgacgcccgcatggatgaaaccgaaatcggatcctgctttggacgctacggttcagtaaaagaggtgaagatcattactaaccgaaccggcgtgtctaaaggttatggattcgtgagcttcgtcaatgacgttgatgtacagaagatcgtcggatcacagatccacttccatggcaaaaaactgaagcttgggccggctatacgtaagcagaaactgtgcgcgagacacgtccagccacgcccgctcgtggttaatccaccgccccctccccagtttcaaaatgtttggcgcaacccaaacactgaaacctatctccagcctcagattacccctaaccctgtaactcagcacgttcagtcagcggcgaaccccgagacccctaattctactatctctagagaagccagcactcagagctcgtcggcggccgcaagccaggggtgggttctacccgaaggcaagattgtgcctaatacagtttttgtcggtggtatcgacgctcggatggatgagaccgagatcggcagttgcttcggaaggtacggcagtgtcaaggaggttaaaattattacgaaccgcacaggagtgagcaaggggtacggttttgtcagtttcgtgaatgacgtagacgtgcaaaaaatcgtgggatcccagattcactttcacggtaagaagctcaagttgggccccgcgatccgcaaacagaaactgtgcgccagacatgtccagcccagacctcttgttgtcaatccaccaccaccaccacaattccaaaatgtctggcgcaatccaaacaccgagacctacttacagccgcagatcacaccaaaccctgtgacccagcacgtgcaagcctacagcgcttatccccactcccccgggcaggtgattacagggtgccagctccttgtctacaattatcaggaataccccacctatccagactctgcgtttcaggttacgaccggataccaactccctgtgtataactaccagcccttccccgcatatccaagaagcccattccaagtcaccgccgggtatcaacttccagtttacaactatcaagcctttccagcctaccctaatagccctttccaggtggccacaggataccagttccctgtttacaattatcaacccttccccgcctaccctagttctcccttccaggttactgccggttatcagctccctgtgtataactatcaggcttttcccgcctaccctaatagtccatttcaggttgccactggctaccagttccctgtttacaattaccaggcctttcccgcctaccccaatagccctgtgcaggtaacaactggctatcagttaccggtttataactatcaggcgttcccagcctacccaagcagcccgtttcaggtgacaacaggatatcaacttccagtgtacaactatcaggcattcccagcttaccctaattccgcagtgcaagtaacaactggttaccagttccatgtgtacaattaccagatgccaccccagtgtccagtcggagagcaaaggaggaatctgtggaccgaagcttataagtggtggtacctggtatgccttattcagaggagggattag

SEQ ID NO: 16840 - DNA, 975 bp, synthetic construct
  source 1..975: mol_type = other DNA; note = Synthetic coding sequence
atggaagctctggggccgggaggggaccgggctagtccggcatcctcgacgtcgtcgcttgatctctggcatctttcgatgcgggcggattctgcctactcaagcttcagtgccgcgtcagggggaccagaacctaggactcaaagcccggggacagatctccttccttacctggactgggattatgtgcgggtggtgtggggcgggcctggcccagctccaccggatgcggccttgtgcacatctccccgaccaaggcccgcagtggcggccaggtctggcccccaaccaacagaggtgccaggcacccccgggcccctgaacaggcaggccacacctctcttatatgctctagccgccgaagctgaggccgccgcacaggccgccgaaccaccttctcccccagctagcagggccgcttaccggcagcggctgcagggtgcccagcgtcgggttctgagggaaactagctttcagcgcaaggagctcagaatgagcctccctgctcggctccggcctaccgtgccagctaggccgccagcgactcatcctagatccgcttctctgagccaccccggaggggaaggggaaccagctaggtcacgagctccagctccgggcacagcgggtcgcgggccactggccaaccagcagcgcaagtggtgcttcagcgagcctggcaaactggacagagtgggacgtggtggcggacccgcaagagagtgtctaggtgaggcgtgctccagcagtggtcttcccggaccagaaccactggagttccaacacccagcgctcgctaaatttgaggaccacgaggtgggttggctccctgagacccaaccacaaggttcgatgaatctggattctggctcattgaagctgggggatgcctttcggcccgcctccaggagcagatctgcctcgggagaagttctcgggagctgggggggtagtggcggcaccattcccatttag

SEQ ID NO: 16841 - DNA, 780 bp, synthetic construct
  source 1..780: mol_type = other DNA; note = Synthetic coding sequence
atgccccgcgccaggtccgggcggcgatctcggggggctggaggccgcgaagaaaccttcctgcgtgtacgcgctaaccggcaaacaaggctgaacgcccgaatcggaaagatgaaacggcgtaagcaggatgaggggcagagggaaggctcatgtatggctgaagacgatgctgtcgatatcgagcatgaaaacaacaaccggtttgaggaatacgagtggtgcggccagaagcgaatacgggcaaccacactgttggaaggggggtttcgaggctcaggatttattatgtgttcgggtaaggagaatcctgacagcgacgccgacctggatgttgacggcgacgatacattggagtatgggaagcctcaatacactgaagctgacgtgatcccttgcacaggggaggaaccgggggaggccaaggagcgggaagcacttagaggagctgtcctgaatggtggccctccatcaacaaggattactcctgaattcagcaagtgggcatctgacgaaatgccctcaactagtaacggggagtcttccaaacaggaggctatgcagaaaacttgtaaaaattctgacatcgagaagatcacggaggatagcgcagtgaccacctttgaggctctcaaagccagggtacgagaattagagcgccagctctcacggggtgatcgttataaatgtctaatctgcatggactcctacagcatgccccttacatccattcaatgctggcacgtccattgtgaggaatgctggcttcgaactctttag

SEQ ID NO: 16842 - DNA, 369 bp, synthetic construct
  source 1..369: mol_type = other DNA; note = Synthetic coding sequence
atggccacctccgcccctctccgttctcttgaggaggaggtcacctgcagcatatgccttgattacctacgtgatcccgtcacaatagactgcggacacgtgttttgtcgaagttgtacaacagacgtccgcccaatcagtggcagtagaccagtgtgtcccctgtgcaagaagccatttaaaaaggaaaacattcgacccgtttggcagctcgcatctttagtcgagaacatcgagcggctgaaggtggacaagggcaggcaacctggagaagtcaccagagagcagcaggacgctaagctctgcgagaggcatcgggaaaaacttcactactactgcgaggatgatggaaaactgttgtgcgtttag

SEQ ID NO: 16843 - DNA, 984 bp, synthetic construct
  source 1..984: mol_type = other DNA; note = Synthetic coding sequence
atggcctccttcctgaaaggggcccatgtgactattaacgccagggcggaggaggatgtggagcctgaatgcatcatggaaaaagtggccaaggcctccggagcaaattactcattccacaaggagtcaggacgatttcaggatgtgggcccccaagcacccgtggggtctgtgtatcagaaaactaatgctgtcagtgagattaagagagttgggaaggacagcttctgggctaaggctgagaaagaggaagagaaccggcgattagaagagaagcgccgagcagaagaagcgcagaggcagcttgaacaggagaggcgggagcgggagcttcgggaggcagctagacgtgagcagcgatatcaagagcaagggggtgaggcctccccccagagaacatgggagcaacagcaggaggttgtcagccgcaatcggaacgaacaagaatccgctgtacatcctagggagatcttcaagcagaaggaacgagctatgtctactaccagcatctcttcccctcagcctggcaagctcaggtcaccgttccttcaaaaacaactcactcaacccgaaacccacttcggccgcgagcccgcagcggccatcagccgtccacgcgcggacttgcccgcggaggagcccgcccccagtacacctccctgcctagtacaggcagaagaggaagcagtctatgaggagccgccggagcaggaaacattctacgaacagcctcccctcgtgcagcagcaaggtgccggaagcgaacacatcgaccaccatattcaagggcaagggctgtcagggcagggcctctgtgctcgcgccttgtacgactaccaagctgccgacgacacagagatttcctttgaccccgaaaatctgatcacaggaattgaagtgattgatgaggggtggtggcggggttacggaccagacggacatttcggaatgttcccagccaactacgtcgagctgatcgagtag

SEQ ID NO: 16844 - DNA, 438 bp, synthetic construct
  source 1..438: mol_type = other DNA; note = Synthetic coding sequence
atgcagggccgcatcactaaagtgctcaacatgaaacctccggaaatcctgtccatgattgaagaagccgccggcacaaggatgtatgagtacaaaaagatcgctgcccagaaaactatcgagaagaaggaagccaaattgaaggaaatcaaaacaatcctcgaggaagagattacaccgacaattcaaaagttgaaggaggagagaagcagttacttagagtaccagaaggtaatgcgtgagatagaacatctcagcaggctctatatcgcttaccaattcctcctggccgaagatactaaggtgagaagtgcagaggagctgaaggagatgcaggataaggtcatcaaacttcaggaggaactgtctgaaaatgataagaaaattaaggccttgaatcatgagatcgaggagctcgagaagaggaaggataaatag

SEQ ID NO: 16845 - DNA, 816 bp, synthetic construct
  source 1..816: mol_type = other DNA; note = Synthetic coding sequence
atggaaaaagagacagggatctcgcagcaaaggaactactactttacgcaatccaagggggagcctttgcaaatcgaccacttggtgttcgtggtccacggcataggccccgcctgtgatctgagatttcgatcaattgtccagtgtgtgaatgatttccggtccgtcagcctcaatctgctccaaacacacttcaaaaaggcacaggagaatcaacaaattggacgggtcgagttcctcccggtcaattggcattctccccttcattcaactggcgtggacgttgatctgcagagaattactctaccaagcattaatcggctgaggcattttactaacgacactatacttgatgtgttcttttacaactcccccacatactgtcagactatcgtagataccgtagcaagtgagatgaataggatttacaccctgttcttgcagagaaaccccgacttcaaaggcggagtctccatcgccggtcactccctcggctccttaattctatttgatatcctgaccaatcagaaagattcattgggggacattgattcggaaaaggattcattgaacatagttatggaccagggtgatacacctacactggaggaagacctcaagaagctgcaactttcagaattcttcgacatcttcgagaaggaaaaggtcgataaggaagccctcgcattgtgtactgaccgcgacctccaagagatcggaattcctctgggacctagaaaaaatctgtctagcgccgtggctgtgatcctagaaatggtgaccatttggatgctcgcattgggacgatgcctgtag

SEQ ID NO: 16846 - DNA, 1818 bp, synthetic construct
  source 1..1818: mol_type = other DNA; note = Synthetic coding sequence
atgggcggctgcttctccaagccaaaacctgtggagctaaaaatcgaggtggtgttgcctgagaaagagagaggcaaggaggaactctctgcctcaggaaaaggttctccaagagcctaccagggcaacggaacagcgaggcactttcatactgaagaaagactctctaccccccacccctacccttcaccccaggactgtgtggaagccgccgtttgccacgttaaggatttagagaacggccagatgcgagaggtggaactgggttgggggaaggtgctgctcgttaaagataatggcgaattccacgccttagggcacaaatgcccgcactatggagcccctctggtcaagggtgttctctctaggggtagagttagatgtccctggcacggcgcttgcttcaatatttccaccggggatctggaggatttcccaggtctggactctctgcacaaattccaggtaaagatcgagaaggaaaaggtctacgtgcgggcctcaaaacaggctttgcagctgcagcggcggaccaaagtcatggccaaatgtatcagtcccagtgctggttatagttcctcgacaaatgtactcatcgtgggcgctggtgccgccgggcttgtgtgcgctgagaccttacggcaagaggggttctcagacaggatagtactttgcacacttgaccggcatttgccttacgatcgtcctaagctgagcaaatccctcgacactcagcccgaacagctggctctccgacccaaggagttttttcgggcatatgggattgaagtgctgactgaagcccaggtggtaacggtcgacgttaggacaaagaaggtggtgtttaaggatgggtttaaactggagtacagtaaactgctcctggcccctggcagtagtcccaagaccctcagctgtaaggggaaagaggtcgagaacgtgtttacaatccggacaccagaggatgcgaatagagtagtccggcttgcaaggggtcgcaacgttgttgtcgtcggggccgggttcctgggtatggaggttgccgcgtacctgaccgaaaaagctcacagcgttagcgtggttgagctggaggaaactccctttcggcggttccttggagaacgcgtaggcagagctctgatgaaaatgttcgagaacaatcgagtcaagttctacatgcagacagaagtaagcgagctgcggggtcaagaagggaagctaaaggaggtggtcctgaaatcctctaaggttgttagggccgatgtatgtgtggtcggcatcggggcagtccccgccacaggatttctccggcaaagcggcattgggttagatagcagaggatttatcccagtgaacaaaatgatgcagacgaacgttccaggtgtgttcgccgcaggcgacgctgtcacctttccattggcatggcgcaataatcggaaggtaaatatcccacactggcagatggctcacgcacagggtcgcgtcgccgcccagaatatgctggcgcaggaagccgagatgagtactgtgccatatctctggaccgccatgtttggcaagtctctccgctacgcgggatatggcgaggggttcgacgatgttataatacagggagatcttgaagaacttaagtttgtggctttttacacaaaaggggatgaggtgattgcagtggcatcaatgaattacgaccccatcgtgtctaaggtcgcagaagtgctggcaagcggcagggcaatcaggaaacgggaggtagaactgttcgtcctgcacagtaagacaggcgacatgtcatggctcacaggcaagggctcgtag

SEQ ID NO: 16847 - DNA, 294 bp, synthetic construct
  source 1..294: mol_type = other DNA; note = Synthetic coding sequence
atgcagaccagttcttcacggagtgtgcacttgtctgagtggcagaagaactacttcgctatcaccagtggtatttgcaccgggccaaaggccgacgcctatagggcacaaattctcagaatccagtacgcctgggctaatagtgagatatcccaggtgtgtgctacaaaacttttcaaaaagtatgcagagaaatactctgccattattgacagtgacaacgtcgagagcggcctgaataattatgccgagaacattctcacattggccggcagccagcagactgattcgtag

SEQ ID NO: 16848 - DNA, 333 bp, synthetic construct
  source 1..333: mol_type = other DNA; note = Synthetic coding sequence
atggaggagattccggctcaagaggccgctggatcccccagagtgcagttccagagcctagagacccagtccgaatgcctaagccccgaacctcaatttgtgcaagataccgacatggagcagggattgacaggcggtatcctacttagactccctacgaccaggatccacagcgtgaacagttgtccggccttgtctcatacgcaggctagcgcgttctccggggagacactcgccgtgcttactgccgggatatcaaagagatggccaaagtacagactgcccattgacatcgcgaggccttgttccgaaacaccttttcctcgcctttag

SEQ ID NO: 16849 - DNA, 627 bp, synthetic construct
  source 1..627: mol_type = other DNA; note = Synthetic coding sequence
atggagccaccaatggaaccatcaggcggagaacaggagcctggcgcggtcagattcctcgatctcccatgggaggacgtgcttctgccccacgtgttgaatcgcgttcccctccgtcaactgctaaggctacagcgcgtctcccgagccttccgttccctggtccagctgcacttggctggactgcggcgcttcgacgccgcacaagtcgggccccaaataccacgcgctgcgttggcacgactcctaagggatgcagaggggctccaggagctggctctggcgccatgtcacgaatggttgtccgacgaggacctagttccagtgctcgctcgcaatccacagctgcgatccgtagctctcgggggatgtggccagctgtctagacgcgctttgggcgctctggccgaagggtgtccccgcctgcagcgcctgtccctggctcactgtgattgggtggatggcctggcgctgcgcgggctggctgatagatgtcccgccttagaggaactcgatcttactgcttgtcggcaattgaaagacgaggcaatcgtgtacctggcacagaggaggggcgccggactccgctcattatcactggccgtgaatgcaaacgtaggagactag

SEQ ID NO: 16850 - DNA, 1419 bp, synthetic construct
  source 1..1419: mol_type = other DNA; note = Synthetic coding sequence
gtgactcattataagcaatatcctcctaatacgagtaaggtgtactcctatttcgagtgtagagagaagaagactgagaacagtaagttacggaaggtgaaatatgaagaaacggtgttttacggcctccagtatattcttaacaaatatctgaagggtaaagttgtgactaaggaaaagatccaggaagctaaagatgtttacaaagaacacttccaggacgatgtggttaatgagaaggggtggaattacatccttgaaaagtatgacggccacctccctattgaaatcaaagctgtgccagagggctttgtcatccctcgaggaaatgtgctgtttacagtggaaaataccgatccagaatgctactggctgaccaattggattgagactatcctggtacaatcgtggtatccgattacagtggccaccaatagtcgcgaacaaaagaaaatcctggccaaatacctgttagagacctccgggaacctcgacggtttagaatacaaactccatgattttggctaccggggagtgagttctcaggagactgcggggatcggggcgtcagcccatctggtgaatttcaaggggacagatacggtggctggactggccttgaataaaaaatactacggtacaaaagatccagtccccggctatagtgtaccagccgccgagcattccacaattactgcctgggggaaggaccacgaaaaggacgcctttgaacacatcgtgacccagtttagctcagtgcctgtctccgtagtgagtaactcctatgacatttacaacgcctgcgagaagatctggggggaggatctgaggcacctgattgtgtctcggtctactcaggcccctctcataatcaggcctgattctgggaacccgcttgatacagtcctcaaggtactggaaatcctgggcaagaaattccccgttactgagaattccaagggttacaagctgctacccccctatttacgggtgattcaaggtgacggtgtggacattaacactttgcaagagattgtggaaggcatgaaacagaagatgtggagcatcgagaatatcgcatttgggagtggggggggcctcctgcagaagttaacccgtgatcttttgaactgctccttcaagtgtagctacgtcgtgacaaatgggctcggtatcaacgtatttaaggatcccgtggccgatcctaacaagcggtcaaagaaaggacggctgtccctccaccgcaccccagctggtaattttgtgacactcgaggagggtaagggtgaccttgaggagtatggccaggatctgctccataccgtcttcaagaatggcaaagtgacgaagtcgtattcctttgacgagatccggaaaaacgcccagttgaatatagagttagaagccgcccaccactag

SEQ ID NO: 16851 - DNA, 519 bp, synthetic construct
  source 1..519: mol_type = other DNA; note = Synthetic coding sequence
tgcaagcaaagtacaaagactgaagagaagctgaggccaactcggacatcatcggagagtatatattcccgaccaggcagcagtattcctggatcacctgggcacactatctacgctaaggtggacaacgagattctcgattataaagacttggccgccattccaaaggtcaaagccatctatgatatagaacgtcccgacctgattacttacgaacccttttacacctctgggtacgacgataaacaggaacgacagagccttggcgagtctccgcgcaccctctctccaacccccagcgcagagggctaccaagacgttagggatcggatgatacatcgctctacatcccaaggcagtattaactcaccagtgtattctaggcactcatatacacctacaaccagtcgctccccgcagcatttccacagacccgaccagggtatcaatatttacagaaagccccccatctacaagcagcacgtgctgttcgaagtgatcctcctgctgcttatttag

SEQ ID NO: 16852 - DNA, 2445 bp, synthetic construct
  source 1..2445: mol_type = other DNA; note = Synthetic coding sequence
atgcggttgttggacggaaaacaaaccagccgctactcagagaatgcctgcgagaaaaagatattctctatctacggccactatccagtcgtgagagcggccctccgcagaaagggctgggttgaaaagaaatttcacttcctccccaaggtaatcccagatgtggaagacgaaggcgctcgtgtgaatgacgacacctgcgcaaaggtgaaggagaatcaggagatggcacttgagaaaaccgacaatattcacgatgtcatgtcacgactcgttaagaatgagatgccatatctgctgtggaccatcaagagagacataatcgattaccactctctgacatacgaccaaatgctcaaccattatgcgaaaacagccagctttaccaccaaaattggtctgtgtgtaaatatgagatcccttccatggtacgtgcccgctaacccagatagcttcttcccacgatgctattctctctgcactgagtccgaacaacaggaattcctcgaagacttccgtagaaccatggcgagctcaattcttaaatgggtggtctctcaccaaagctgtagtcgctcttcgaggtctaagcctcgagatcagcgcgaggaagccgggagctccgatctttcctccaggcaggatgcagagaatgccgaggcaaaactgcgcggactccccggccagcttgtcgacattgcctgcaaagtgtgtcaagcctatttaggccagctcgagcacgaagacattgatacttctgccgatgccgtcgaagacttaacggaagccgaatgggaggatctaactcagcagtattacagccttgtgcacggagacgccttcatttcaaatagtcgtaattattttagccaatgccaagctttattgaaccgtattacatctgtgaatccacagacagatatcgatggacttcgcaacatctggatcattaaacccgcagccaaatcacgaggccgcgatattgtgtgcatggaccgagtggaggagatcctcgaactcgctgctgcagaccatcctctgtctcgggataacaaatgggttgtccagaagtacattgaaactccattattaatatgcgacaccaagttcgacatccgccagtggttcttagttaccgactggaaccccctcactatttggttctataaagagtcatacctccggttcagcacccaacgcttttcgctagataaattagactcggccatccacctgtgcaacaacgccgttcagaagtatctgaagaacgatgtgggtaggagccccctactgcccgcacataacatgtggacatcaactaggttccaagagtacctgcaacggcaaggcaggggtgcagtctggggaagtgtgatttatcctagtatgaagaaggccattgctcatgcgatgaaggtagctcaggaccacgtcgagccacgcaaaaactcctttgaattgtatggtgcagacttcgtgcttggtcgtgacttcaggccatggctgattgaaatcaactctagcccgactatgcatcctagcactcctgtgactgcacagttatgtgctcaggtccaggaggatacaatcaaggttgctgtggatcgatcctgtgacatcggcaacttcgagcttctgtggcgccaaccggtggtagagccaccccctttttcaggctctgatctgtgcgttgctggcgttagcgttcgccgcgcccgccggcaggtactgccggtctgcaatctgaaggcaagtgccagtctgctggacgcgcagccattgaaagcaagaggacctagtgccatgcctgatcccgcacagggccctcccagcccggccctccagcgggacctcggtctcaaagaggagaagggactgccccttgccctgctggctccccttcgaggcgcagctgaaagcggcggcgccgcccagccgacaaggaccaaggccgccggcaaggtagaattaccagcctgtccatgccgccacgtcgatagccaagctcccaatactggagttcctgtggcacagcccgccaaaagctgggacccaaatcagctcaatgcccacccactggagccagtgctgcgaggactgaagactgcagagggggctcttcgaccacccccaggggggaaaggcgaaggtacagtgtgttcccggcttcctcaccatggccatcacgttgccgcatgccaaaccaccggcactacttgggatggcggaccaggcgtttgcttcttgagacagcttctcgcttcggaactacccatgggcccgggtctgcctagggatcccagagcccctccttgtctggtgtgcagaggccttcttccccctgcaggcccctgtaagcgctgccggtccttctgtgccgcagtcctgcagggggcctcattcgtccgactggggggcagatcttgcagccccagaactccttag

SEQ ID NO: 16853 - DNA, 318 bp, synthetic construct
  source 1..318: mol_type = other DNA; note = Synthetic coding sequence
atggacaagaatattggtgaacagttgaataaggcctatgaggcctttcgccaggcctgtatggaccgggattccgctgtgaaagagttgcagcagaaaacagaaaactatgaacaaaggataagggaacagcaggagcagctcagccttcaacagactattatagacaagctgaagagtcaactgctgctggtgaattccacgcaggacaataattacggctgtgttccccttttggaagattccgagacaaggaaaaacaacctgacacttgatcagccgcaggacaaagttatttccggtatcgctcgtgagtag

SEQ ID NO: 16854 - DNA, 816 bp, synthetic construct
  source 1..816: mol_type = other DNA; note = Synthetic coding sequence
atggcacccgttggtgtcgaaaagaagttgctgctgggtccaaatggccccgctgtcgcggccgctggagatctgacttctgaggaggaggagggccagtctctgtggtcgtcaatcttgagcgaggtctctacgagggcccgctccaagctcccttccggaaaaaacatactggttttcgatcatactcgctgcaacgtgtggatcctagacggcgatctgtatcacaaagggctgctgaaatttgctgttagcgcggagtcactccctgagactctggttattttcgtggctgatatgagtagaccctggactgtcatggagtccctccagaagtgggccagcgttctgcgagagcacattgataagatgaaaatcccaccagaaaagatgagagagctagagaggaagttcgtgaaagacttccaagattacatggagcctgaagaggggtgccagggctcgccgcagaggcggggcccactgacatcgggttccgacgaggaaaacgtggcgctgcctcttggcgataacgtactgactcacaacctgggaatcccagtgctcgtggtgtgcaccaaatgcgacgcagtgtccgttctggagaaggagcacgattatagggacgagcaccttgactttattcaatcccacctccggcgcttctgcttgcagtacggcgcagcactgatctatacctcggtgaaggaggaaaagaacttggatctgctttataaatatattgtgcataaaacttatgggtttcacttcaccacgccggccctcgtcgttgaaaaggatgcggttttcatgtag

SEQ ID NO: 16855 - DNA, 522 bp, synthetic construct
  source 1..522: mol_type = other DNA; note = Synthetic coding sequence
atggctgaccgaatgcagattgtggttatactgtcagagttcttcaacaccacctggcaagaggcaaattgtgcaaattgcctcacaaataatagtgaggagctgtcgaactctactgtgtattttctaaatctgttcaaccacaccttaacgtgctttgagcataatctgcagggcaacgcccattctctgctacaaactaagaactacagcgaggtgtgtaagaattgccgggaggcctataaaaccttgtcctctctctactccgagatgcagaagatgaacgagctggaaaataaggccgagcccggcacccatctctgcatcgacgtggaagatgctatgaacattaccaggaagctctggtcccgcacctttaattgttccgtcccttgtagtgacaccgtgcctgttatagcagtgtcagtgttcatactgttcctccccgtggtgttctacttgagctcatttttgcacagcgaacagaaaaaacggaagttaattctgcccaaacgactttag

SEQ ID NO: 16856 - DNA, 435 bp, synthetic construct
  source 1..435: mol_type = other DNA; note = Synthetic coding sequence
tgattcatccattgcactgatgacagcccggacccctgtattgaatatgagctggtgctgcgcaagtggtgcgagctgatcccaggggccgagtttcggtgctttgtaaaggagaacaaactcatcggcatttcccagagggactatacccaatattatgaccacatttctaaacagaaggaggaaattagaagatgtattcaggacttctttaaaaaacacatccagtacaagtttctggatgaggacttcgtttttgatatctaccgcgattcgcgaggcaaagtttggcttattgacttcaatccctttggggaagtaaccgacagtctgttatttacatgggaggaactcatctctgaaaataatctcaacggtgatttcagtgaggtagatgctcaagaacagaaaagaaaccagcaggaggacgactag

SEQ ID NO: 16857 - DNA, 978 bp, synthetic construct
  source 1..978: mol_type = other DNA; note = Synthetic coding sequence
tgaattcagggggaggctagcaggagagctgccggtgaaccggaggctggaagtgattatgtaaagttcagcaaagagaagtacatcctggactcgtctccggagaaactgcacaaggagcttgaggaagaactgaagcttagctcaactgatctcagaagtcatgcctggtaccacggaaggatcccacgggaagtcagtgaaactcttgtacagagaaacggcgattttcttattagagactccttgacgagcttaggtgattacgtcttgacctgccggtggaggaatcaggccctgcatttcaaaatcaacaaagtcgtggtgaaagctggtgaaagttacacccacatacagtacctcttcgagcaggaatccttcgaccacgttcccgccttagtgagatatcatgtgggctcccgtaaggcggtgtccgaacaatcaggggccatcatctactgccccgtgaaccggacctttcctttgcgatacctggaggctagctacggactgggacaggggagtagcaaacctgcatcccctgtgtctcctagcggccctaagggcagccacatgaaaaggcggtccgtcactatgacagacggcctcactgccgacaaggtaacccggtctgatgggtgcccgacgtccactagcctcccaagaccacgcgacagcatcagatcttgcgctttgagcatggatcaaattccagatcttcacagcccaatgtctcccatatctgaatccccgtcaagtcctgcctattctacagtgacaagagtacatgctgctcccgctgctccctctgctaccgcactgcccgcgtctcccgtggcccgcagatcttctgaaccacagttgtgcccaggctctgctcccaaaacgcacggggagagcgacaaaggaccgcacacaagcccaagccatactctggggaaggcttctcctagcccaagcctgagttcttattcctag

SEQ ID NO: 16858 - DNA, 330 bp, synthetic construct
  source 1..330: mol_type = other DNA; note = Synthetic coding sequence
atgtccagcaaagggtcctccacagacggccgcaccgaccttgctaatgggagcttgtcttcgagtcctgaagagatgtccggagccgaagagggtagggagacaagctctggcatagaggttgaggcatccgatctcagccttagcctgaccggcgacgatggtgggcctaatcgcacctctaccgaaagcagaggaacagacacagaatcgtcaggcgaagacaaggactccgacagcatggaagacacggggcactactccatcaatgatgaaaaccgcgtgcatgacagatccgaggaggaagaagaggaggaagaggaggagtag

SEQ ID NO: 16859 - DNA, 1638 bp, synthetic construct
  source 1..1638: mol_type = other DNA; note = Synthetic coding sequence
gccgccggagctcctaggctactagggcccggggccgtgagggggcccgcaggcgtgggacgcgttgctgccggggcgatggagggcgtgctatacaagtggacgaattatctttccgggtggcagccccgttggttcctgctgtgcggcggtatcctgtcctattacgacagcccggaggatgcttggaagggctgtaaggggtcaattcagatggctgtatgtgagattcaggttcattctgtggacaacacccgaatggatttgattatcccgggagagcagtatttttatcttaaggccaggtcagttgctgaacgccaacgctggttggtcgctctgggttccgccaaggcctgcctaactgattcccggacccagaaagagaaggagttcgccgagaacactgagaacctgaaaacgaaaatgtctgagctgcggctttattgcgatctgctggtccaacaggtggataagaccaaagaggtcactacgacaggtgtgtcaaacagtgaggagggaatcgacgttggtacgctgctgaaatctacttgcaacacgtttctgaagactctggaggaatgcatgcagatcgctaatgccgctttcacctctgagctgctttaccgaacgccacccgggtctccccagctagctatgttgaagtcatccaaaatgaaacaccctattataccaattcacaattccctggagagacagatggagttgagcacttgtgagaacggctctctgaatatggaaataaacggagaagaagaaattcttatgaaaaacaaaaactctctgtatctgaagagcgccgagatcgattgttccatctcttccgaggagaataccgacgacaacatcactgttcaaggcgagatacggaaggaggatggaatggaaaaccttaaaaatcacgacaacaacttgacccagagcgggtcagattcctcctgtagccccgaatgcctttgggaagaaggcaaggaggtgatcccaacatttttctcaactatgaatacaagcttttccgatatcgaactgctggaggactcagggattccaactgaagccttcttggcatcttgctacgcagtcgtcccagtcctagacaagcttggacccactgtgttcgcgccagttaaaatggatttagtcggcaacatcaagaaggtcaaccagaaatatattacgaataaggaagagttcactactctgcagaaaatcgtcctgcatgaagtggaagcggatgtggcccaagttcggaatagcgctacagaagctctcctatggctcaaacggggcctcaagttccttaaaggatttctaacagaggtgaagaacggtgaaaaggatattcagactgccctgaataacgcatatggcaaaacccttcgccaacatcacggatgggtggtcaggggggtgttcgctctggcacttagagcagcgccttcctacgaggatttcgttgccgcactcaccgtcaaagagggggaccatcagaaagaggcctttagtataggcatgcagcgggatctgagcctctacttaccggctatggagaaacaactcgcaatcctggacacactctatgaagtacatggcctcgagtctgatgaggttgtgtag

SEQ ID NO: 16860 - DNA, 522 bp, synthetic construct
  source 1..522: mol_type = other DNA; note = Synthetic coding sequence
atgtatacattgttatcaggactctacaagtacatgttccagaaggatgagtattgtattctcatactgggcttggacaatgccggcaaaacgacatttctagaacaaagcaagacgcgttttaacaagaactacaaaggcatgagtctctcaaaaatcaccaccacagtgggtctgaatatcggcaccgttgatgtgggcaaagcccgcctgatgttttgggacctgggggggcaggaagagcttcaatcactgtgggacaaatattacgcagagtgccatggcgtgatttatgtgatcgacagtaccgatgaggaaagattggcggagtctaaacaggcattcgaaaaggtcgtgaccagtgaagcgctgtgtggcgtgcccgttttagtactggccaacaagcaagacgtggaaacttgcctgtccatacctgacatcaaaaccgcctttagtgattgtacttccaagatcggtagacgggactgtctcacccaagcttgctctgcactcacaggctag

SEQ ID NO: 16861 - DNA, 729 bp, synthetic construct
  source 1..729: mol_type = other DNA; note = Synthetic coding sequence
atggggctcgtgtgtgtgctcggggacggtaaaaccgagcaaaagggtggggataagaaacggggcgtcaaaaggccccgagaggaccacggcagaggatactttgagtatattgaggagaacaagtacagtcgggccaagtccccccagccacccgtggaagaggaagacgagcattttgatgatactgtggtgtgtttagacacctataattgtgatttacatttcaagatctcccgggataggctgtcagcctcctcccttactatggagtcctttgccttcctctgggccggcggtcgcgcctcgtacggtgtgagcaagggcaaagtttgtttcgagatgaaagtgactgagaagatccctgtcagacacttgtatacaaaagacatcgatatccatgaagtgcggatagggtggtccttaacaaccagtggaatgctgctgggggaagaggagttctcttatggttattctctgaaaggcattaagacatgcaattgtgagaccgaagactatggggagaagttcgacgagaacgacgtcataacatgcttcgccaactttgagtccgatgaggtcgaattatcctatgccaagaatggccaagacctaggagttgcatttaagattagcaaggaagtcttggccgggcgacccttgttcccccatgtgctatgccacaactgcgccgtcgaatttaatttcgggcagaaggagaagccatag

SEQ ID NO: 16862 - DNA, 2922 bp, synthetic construct
  source 1..2922: mol_type = other DNA; note = Synthetic coding sequence
agctcatccgacaaagaatcaattctgacaatactcaaagtgctcggagatctcctctcagtcgggacggatcgccggattcattatatgatctctaaggggggcagcgaggcccttctgcagacactcgtggacacagctcgtactgcaccccccgactacgatatcctgttgccacttttccgcctactggcaaaagtcggactcagggataaaaaaattgggcggaaggccctcgagctggaggcattggacgtgacactcattttggctcggaagaatctctcacacgggcaaaacctgctacattgtttatgggctctgagagtgttcgcctctagcgtgtctatgggggccatgctgggtattaatggtgcaatggagctgctcttcaaggtaattactccttacaccagaaagcggacacaagccatacgggccgctaccgaggtgctggctgccttgcttaagtccaaatcgaatgggcgaagagcagtgaacagaggctacgtcacttctctcttaggtctgcaccaggactggcacagccacgatacagcgaatgcttacgtgcagatccggcgcggcttgctgctgtgtctcagacacatagcagctcttcgatccggacgggaggccttcctggccgcgcaaggcatggagatcctcttttccactacacagaactgcctagatgacaagtcgatggaaccagtgatttcggttgtgctgcagatcctgcgccagtgttaccctactagtccactccccctggtgaccgcgagctcagcatatgcgttccctgttccaggctgcataacgacagaacccccccacgacctgccagaagaagattttgaggatgatggagatgacgaagtcgacaaagacagcgatacagaggacggaaaagtggaggacgatgacctcgagacagacgtgaataagctgagtagtaagccaggactggatcgaccagaagaagaattaatgcaatacgaggttatgtgcctggagttgagctacagcttcgaggagcttcagagcaagctgggcgacgatctaaacagcgaaaaaacacaatacgctaaccatcaccacatcccagcagcagcctcatctaaacagcactgctactcaaaagaccagtcatcctgtggacaagaaagggaatacgccgtgcagacctctctgctgtgcagagtcaagaccgggcgttctactgtgcaccttggttccaaaaagaatccaggcgtcaatttgtaccaaaacgtgcaaagcaactctctccggagggattctagtgaatctgaaattcccgatatccaggcttcccccaaagctgatgcttgggacgtggacgccatattctgtcctcggatgtcggcatcattctctaattctaccagaaccagggaagttgttaaggtgattgataagctcctgcagacacatctaaaacgcgtcccctttcatgacccgtatctgtatatggccaaggcccgaagaaccagctcggtggtggacttcaagatgatggcctttcctgatgtgtggggccattgccctcccccaacaacccagccaatgctggaacggaagtgcggcgtgcagagaatccggatttttgaggacataagacgcctgattcagccaagcgatgtgataaataaagtcgttttctctttggatgagccctggccccttcaagataatgcgtccaactgcctcaggtttttctcaaagtttgagagtgggaatcttcgtaaggcaattcaggtgcgagagtttgaatacgacttacttgtgaacgccgacgtgaacagcacccagcatcaacagtggttctactttaaggtctccgggatgcaggcagctatcccgtaccattttaacatcattaactgtgaaaagccaaattcgcagttcaactacggaatgcagccaacactgtactccgtgaaggaagcgctccttggtaagcccacctggatcagaacaggtcacgagatctgctattacaaaaaccactatcgccaatccaccgccgttgctgggggcgcctccggaaagtgttattataccctgacttttgccgtcactttccctcattctgaggatgtatgctatctcgcctaccattatccctacacgtacaccgccctaatgactcacctagatattctggagaaatctgtgaacctcaaagaagtttacttccggcaggacgtgctgtgccagactctgggaggtaacccctgccctctggtcaccattacggctatgcctgagagcaacagtgacgagcatctggaacagttcagacacaggccttaccaggtaataacagcgcgcgtgcatcccggagagagtaatgcatcttgggtaatgaaggggacactcgagtttctggtgagtagcgaccctgtggctcggctattgcgcgaaaatttcatttttaagattattcccatgctgaatccagatggggtaatcaatgggaatcatagatgctctctcagcggagaggacctcaacagacagtggttaagtccatcagcccacctgcagcccactatataccacgccaaggggctcctgtaccacctgagttcaatcgggagaagtcctgtcgtgtcacactttctgctggtcttctgcgacttccacggccactcacagaagaaaaacgtttttctgtatggctgttccattaaagagactttatggcaggcagcgtgtacggttggcacctcgactatcctggaggaggtaaactatcggacactgcctaagatccttgacaagctggcccctgctttcacaatgtccagctgctcctttttggtagagaagtctcgtgcatctactgccagagttgtggtgtggcgcgagatgggggtgtctcgctcgtatacctag

SEQ ID NO: 16863 - DNA, 7752 bp, synthetic construct
  source 1..7752: mol_type = other DNA; note = Synthetic coding sequence
tagagctctatcacattctctgttaaagtcgaggggagacctgtccccacagttcattggctgcgcgaggaagccgaacggggcgtgctgtggattggcccagacaccccaggctacacagtagcaagctctgcacagcagcactctttagtactgcttgacgtgggacggcagcatcagggcacctacacatgtatagctagtaacgccgcagggcaagccctgtgtagtgcgagcctccatgttagtggcttgcccaaggtggaggaacaagagaaggtcaaggaggctttgatctccaccttcctgcagggcaccacccaggctatcagcgctcagggacttgagacagcctcattcgccgatctcgggggccagagaaaggaggaaccactggccgcaaaagaggcgctgggccatcttagcctggccgaagtaggcactgaagaattcctgcagaagctcacatcccagataaccgagatggtgtcagcaaaaatcacccaagctaagctccaggtacctggaggcgactctgatgaggatagtaagactccctctgctagtcctagacatggccgctcccgacctagctcatccatacaagaaagctcttccgagtccgaggacggggacgcacggggagagatcttcgacatctatgtcgttacagctgactaccttccattgggtgcagagcaggacgcaattactttacgagaaggccagtatgtggaagtgcttgacgctgcacatccgctaaggtggctcgtgagaactaagccaacgaagtccagtccgagccgacaaggatgggtttccccggcttatctcgatcgaagactgaaactgagcccagaatggggggctgctgaggcccccgaatttcccggtgaggctgtatctgaggacgaatataaggcacggttgagcagcgtcattcaggagctcctttcttctgaacaagcgtttgtggaggagttgcagtttctgcaatcccatcacctacagcacctggagagatgtccgcacgtcccgattgccgtagctggacagaaggccgtgatctttcgcaacgtgagagatattggccggtttcacagctccagtttcttgcaagaactgcagcaatgtgataccgacgacgacgtggcaatgtgtttcattaagaaccaagctgctttcgagcagtacctggaattccttgtgggcagagtccaagcagaaagcgtcgtagtgtcgaccgctattcaggaattctacaagaaatacgctgaagaagctctacttgcaggtgacccatcccagcccccccctcctccattgcagcattatttggagcagcctgtggagcgtgtccaaagataccaggctcttctcaaggagttgattagaaacaaagcgcggaacagacaaaattgtgccttactggaacaagcctacgccgtggtgtccgccctgccccagcgggcggaaaacaagttacacgtgtccctgatggagaactatcctggcaccctgcaggccctgggagaacccatcaggcagggccacttcatagtatgggaaggcgcccctggagcaaggatgccatggaagggtcacaaccgacacgtttttctgttcagaaatcatctggtgatatgtaagcctagacgagactccaggacagacaccgtgtcatacgtttttcgaaatatgatgaaactaagctccattgacctgaacgaccaagtcgagggagacgaccgcgctttcgaagtttggcaagaacgtgaggatagtgttaggaagtacttgttgcaagcccgtactgccattattaaatcaagctgggtgaaagagatttgcggcattcagcagaggctggcgttgcctgtctggcgcccacccgactttgaggaggagcttgccgactgtaccgctgagctcggagaaacagttaaacttgcatgtcgggttactggaaccccaaaaccagtgatctcctggtataaagacggcaaagccgtgcaagttgatccacatcacatactgatcgaagatccagacggcagttgcgcactgattttggattcactgaccggagtggacagtgggcagtacatgtgcttcgccgcttccgccgccggtaactgctctacactgggaaaaatactggtgcaggtaccacctagattcgtgaataaggttcgcgctagccctttcgtagagggtgaggacgcccaatttacctgcacaatcgagggtgcgccctacccccagatccgctggtacaaggacggcgcccttctgaccactgggaacaagttccaaactctgtcagagccccggtctggccttctggttctggtgatccgggcagccagcaaagaagatctgggcttgtatgagtgcgagctcgtcaaccgacttggcagcgctagggcgtcagctgagctgcgaattcaaagccccatgctgcaggcacaagaacagtgccacagagagcagctggtcgccgccgtcgaagatactactcttgagcgggctgatcaggaagtgacttccgtcctgaaacgtcttctcggacctaaggcccccggacctagtacaggagacttgacaggaccgggtccatgcccacgcggtgccccagcgctgcaggagactgggtcacagccccccgtgactggaacctcagaagcccctgccgtgccacctagagttcctcagccactactgcacgaaggaccagagcaggaaccggaagctattgccagagcacaggaatggacagtccccataaggatggagggagccgcttggccaggggctggaacgggagagctgctgtgggacgtccatagccacgtggtccgcgagacgactcagcgaacgtatacctaccaggcgatcgacacacacaccgcacgcccaccctctatgcaagtgactattgaggacgtccaggcacagaccggcggtaccgctcagtttgaagccatcattgagggcgacccccaaccttcggtaacttggtacaaggattccgtacagctagtagattcgactcggctgtcacagcagcaggaaggaactacttactctttggttttacgacatgttgccagcaaggatgccggcgtgtacacttgccttgcccagaacactggagggcaggtgctttgcaaagcagagctgctcgtgctgggtggtgacaacgagccagactcagagaagcaaagtcaccggagaaaactccacagcttttatgaggttaaagaggaaataggccgaggtgtgttcggcttcgtgaagagggtgcagcacaaaggaaataaaattttgtgtgcagcaaagttcattccactgcggtcccggacacgcgcacaggcatatagggagcgcgacatcctagccgctctgtctcacccgctcgtcactggactgttggatcaattcgagaccagaaagactctgatactgatactcgagctgtgttctagcgaggagcttctggacaggctgtatcgcaagggggtggtcacggaggcagaggtcaaagtgtacattcagcagctggtagagggattgcattacctgcacagccatggggtgcttcacctggatatcaagccttccaacatcctgatggtacaccctgcgagggaagacattaaaatatgcgacttcggtttcgcccagaatatcacacctgctgagctacagttttcccaatatggttcccctgagttcgtgagcccagagataattcaacaaaatccagtttctgaagccagcgatatctgggccatgggagtcatttcctacctgtcactcacatgtagcagtccctttgccggagaatccgatagggccaccctgttaaacgtacttgaagggcgggtcagttggtctagccctatggcggctcatctgtctgaagatgccaaggattttattaaggcaactctccagcgggccccccaggctcgaccaagtgccgcccagtgtctgtcacatccatggttcttaaaaagcatgcccgccgaggaggcacatttcatcaatacgaaacagcttaaattcctgctggcaagatcacggtggcaacgatccctgatgtcgtataaaagcatccttgtgatgaggtccatccctgagttgttacggggtccccccgacagcccatcactcggggtggcgagacatctctgcagagatactgggggttcatccagtagttcatcgtcatctgataatgaactggccccgttcgcgagggccaaatctctccctccaagcccagtgactcacagccccctattacatccccggggctttctgcgcccaagcgccagcctccctgaggaggctgaggcttcagagcggtcaactgaggctccggctcccccagcctcacctgagggagctgggcctccggccgcccaggggtgcgtgccacgccattctgttattcgaagtctgttttatcaccaggctggagagagtccggagcacggtgccttggctccaggaagcaggcggcaccccgcccgacgccggcacctgctcaaaggagggtatatcgccggcgccctacctggcttgcgggagccactcatggagcaccgggtactcgaagaagaagccgcgcgagaagaacaggcgacacttcttgcaaaagctccatcattcgagacggcactgcgtctgcccgcctctggcacacacctggcccctggccatagtcattccttagagcacgatagcccttccacaccgcgaccttcgagcgaggcctgtggcgaggctcagcgactcccaagtgccccttcaggcggagcaccaatcagagacatgggccacccccagggcagtaagcagctcccatctactggcgggcatcccgggactgcacagccggagcgccctagtcccgacagtccatgggggcagcctgctccattctgtcacccaaagcagggctcagcacctcaggaggggtgcagcccacatcccgccgtcgctccttgcccgcccggcagctttccacccggttcatgcaaggaagcccctctggtgccgtcgagcccattcctcgggcagcctcaggctccacctgctcctgccaaggccagcccccctctggacagtaaaatgggtcctggtgacatttctctccccggaaggcccaagcctggcccctgtagttcccctgggagcgcaagtcaggcctcctcatctcaggtgtctagcctaagggtgggaagtagtcaagtcggcaccgaaccgggacctagtttggacgccgagggctggacccaagaggctgaggatctgtctgattccactccaaccctgcagaggcctcaggaacaggccacaatgagaaagtttagcctgggcggccggggcgggtatgcgggcgtagctgggtacggcaccttcgcatttggtggcgacgcaggggggatgctgggccagggccccatgtgggcccgcattgcctgggcggtaagtcagagcgaggaggaggagcaggaagaagcgcgcgcagagtcccagagcgaggagcaacaggaggctcgtgctgagagcccactgccgcaggtctcagcacggcctgtgccagaggtaggcagggcaccaacacggtcctctcccgaaccaaccccttgggaggacatcgggcaggtgtcattggttcaaatacgtgatctgtccggtgacgctgaggcggccgacaccattagcctggatataagcgaagtcgaccctgcatacctaaatctgtccgacttatatgacattaagtacctcccctttgagttcatgattttccgaaaggtgcccaaatcagcgcagccagagccacccagccctatggctgaagaagaactggccgagttcccagagcctacttggccatggcccggtgagctaggcccacacgccggtctggaaatcacagaggagagcgaggatgttgacgcactgctggccgaagctgccgtcggcagaaagcgaaaatggagtagcccctctcggtcactctttcacttccctggacgccatctgcctctcgatgagccggcggaactgggcctgcgcgaacgggtgaaagcaagcgttgaacatatctcacgcatccttaaaggccggcctgaggggctggagaaggaaggtcctcctcggaagaagcccggacttgccagttttcggctttcaggactcaagtcatgggatcgcgcacctacatttctgagagaattatccgatgagacggtcgtcctgggccagagtgtcaccctggcttgtcaggtttctgcacaacctgccgctcaggctacctggtccaaggacggggctcccctggagagttccagcagggtccttatttccgctacactgaaaaactttcaattgctcactatcctcgtagtggtggcagaggacctgggtgtgtacacctgttccgtttcaaacgcccttggcacagtcactacaacaggggtgctgcggaaggccgagcggccatcatccagcccatgccctgacattggcgaagtttacgcagatggagtgctgttagtgtggaaacccgtagaatcttatggacctgtgacttatatcgtgcagtgcagcctggagggcggatcttggacgactttggcttccgatatttttgactgctgttacctcacttccaagttatcccgtggaggcacctacacattcaggacagcgtgcgtgtcaaaagccggcatgggaccctatagttcaccctcggaacaggtcctacttggcgggccatcgcatttagcctctgaagaagaatcccaaggccgttccgcccagcctctcccatctaccaagaccttcgctttccagacccagattcagcgcggaagattctccgttgtgcgccagtgttgggagaaggcaagcggtcgggccctggcagccaagataataccatatcaccctaaagacaagactgctgtgctgcgggaatatgaggccctgaaggggctgcggcatcctcacttggcacagcttcatgctgcttacttgtccccgcggcacctcgttctcatcttggaactgtgcagcggacctgagctgctaccgtgtctggccgagcgggcctcatatagcgagtccgaggtcaaggactacttgtggcagatgctctctgctacgcagtatctccacaaccaacacatcttgcatctggatcttaggtccgaaaatatgatcattactgaatataacctgctcaaggtggttgatctcgggaatgcacagagtctcagtcaggaaaaggtcttgccctctgataaatttaaggattatcttgaaaccatggaactccttgaggggcagggtgctgtcccccagaccgacatctgggcaataggggtcacagcgttcataatgctgagcgctgaatatccagtttctagcgagggcgcaagagacctacagcgaggcctgagaaaggggctggtgaggctcagcagatgctacgctggactgtctggaggagccgttgctttcttgcgaagtaccttgtgcgcccagccttggggtcggccttgtgcaagcagctgcctccagtgtccctggttgacagaagaaggaccggcatgctcacggcccgcccccgtgacttttcctaccgcacgccttagggtatttgtgaggaatcgcgaaaagagacgcgcactgctgtataagaggcacaacttagcacaggtgcggtag

SEQ ID NO: 16864 - DNA, 1749 bp, synthetic construct
  source 1..1749: mol_type = other DNA; note = Synthetic coding sequence
atggaaaaagcggttaacgatggatcccactccgaggaattattttgccacctcaagaccatctcagaaaaagaagatctgccaagatgcacaagtgaatcccatttatcctgcctcaaacaggatattcttaacgagaagaccgaactcgaagccacattgaaggaggctgaattagtgactcactccgtcgagcttctcctgcctctctttaaagacactatagagaaaattaatttcgagaacgctaatcttagtgccctgaatcttaagatttctgagcagaaggagattctcatcaaagaactggacacattcaagtctgtgaagctggccctagagcacctactgagaaagagagactataaacagaccggggataacttgtcctcgatgttactcgagaacctcacggacaacgaatcagaaaacacaaacctcaagaagaaggtgttcgagaaagaggcccatatccaagagctctcgtgtctcttccagagtgagaaggcaaacaccctgaaagccaaccgcttctcacaaagtgttaaggttgtacacgagcggctgcagatacagattcacaaaagagaagccgaaaatgataagcttaaggagtacgtgaaatcgttagagacaaagatcgctaaatggaacctgcagtctaggatgaataaaaacgaggccatcgtgatgaaagaggccagcaggcagaaaacagtagcccttaaaaaagccagtaaggtatataaacagcgactggaccattttacaggtgctatcgagaaactgacaagccagatcagagaccaggaggctaagctctccgagacaatctcagcgtctaatgcttggaagagccattacgagaagatcgtaatcgagaaaactgaactggaggttcagatcgagaccatgaagaagcaaatcatcaacctgctcgaggatctgaagaagatggaagaccacggcaagaactcgtgcgaggagatcctgagaaaggtgcatagcatagagtacgagaacgagactctaaacctggagaacacaaagctgaagactacgctggcggcgctaaaggacgaggtggtgagcgtggagaatgaactaagcgaattacaggaggtggagaagaagcagaagacactcatcgaaatgtacaaaacccaggtgcaaaaattgcaggaggccgccgagatcgtgaaaagccgctgcgaaaacttattgcacaagaataatcaaatcaccaagaccaaaaacaagaatgtcgaaaaaatgcgaggacaaatggagtctcacctcaaggagctggagcgggtgtgtgatagtctgacggccgctgagagaagattgcatgaatgccaagttgatggcaaccataacctcttgacaaagctgtccctggaggaagaaaattgcctgatccaactgaagtgtgaaaatcttcagcagaaattggaacagatggacgccgagaataaggagttagagaaaaagctcgccaatcaggaagagtgcctaaaacacagcaatcttaagttcaaagagaaaagcgcagagtacaccgcattggcgcgtcagcttgaggccgctctggaggaaggacggcagaaagtggcagaggagattgagaagatgtcctcacgagaatccgcactccagataaagatcctcgatctggagacggagctcaggaagaagaacgaagagcagaaccaactggtgtgcaaaatgaatagcaccaatggttag

SEQ ID NO: 16865 - DNA, 384 bp, synthetic construct
  source 1..384: mol_type = other DNA; note = Synthetic coding sequence
atggtctccagtggcaggagatggcttcgggaacagcagcatcggcgctggcgcttgcactgcctaaagctgcagccattatcacctgtcccttcggatattgagataagcagaggccagaccccaaaagccgtggatgtactggccaaagagatcggattacttgcagacgaaattgaaatatacggtaaatcaaaagccaaagtgcggctgtcagtcctggagcggttgaaggatcaggccgacggaaagtatgtcctggtcgccggaattaccccgacgccccttggcgagggaaaatctaccgtcactattggcttggtgcaggcactgactgctcacctgaacgtcaattcattcgcctgcctcagacaaccctcttag

SEQ ID NO: 16866 - DNA, 1929 bp, synthetic construct
  source 1..1929: mol_type = other DNA; note = Synthetic coding sequence
atgaaaatcttctgctctagagccaaccctacaaccggttccgtcgagtggctggaggaggatgagcactacgattaccatcaggaaatcgcccgtagctcttacgccgatatgctgcatgacaaagaccgggtctttaagcctatggcagatgccgccgtcaaaatcgtggagaaaaacggcttttcggacaagattaaagttataaacaagcattctactgaggtcacagtcgggccagaaggggacatgccatgcagggccaatatcttggtaactgaactctttgacaccgagctcatcggcgagggagctttgccatcgtacgagcacgcccatcgccatctcgttgaggagaattgcgaagcggtgccccaccgcgcaacagtgtacgcacagcttgtggaaagcggcagaatgtggagttggaacaaactatttcccatacacgtgcaaacctcccttggcgaacaggtgatcgtcccacccgtggatgtggaaagttgccccggagctccaagtgtgtgcgacattcaattgaaccaagtgtccccagcagacttcactgtgctgagcgatgttctgccaatgttttcgattgacttttccaagcaggtttccagttccgctgcatgtcattcccgcaggtttgagcctcttacaagcgggagggctcaagtagtgctttcttggtgggatatcgagatggatcccgagggaaagatcaaatgtacaatggctccattttgggctcattccgaccccgaagagatgcaatggcgagatcactggatgcagtgcgtgtacttcctgccacaggaggaaccggtagtgcaggggagtgccttgtacctagtcgctcatcatgacgattactgtgtttggtacagcctgcagaggacatcccccgagaagaacgagagagttcggcagatgcggcccgtgtgcgattgtcaggcacacctgctgtggaaccggcccagatttggtgagattaacgatcaggatcggactgatcgctatgtccaagccttgcggaccgtgttaaagccggacagtgtttgtctgtgcgtcagtgacggatccctgcttagcgtcctcgcccatcacctgggcgtggagcaggtgtttaccgttgaatcgtctgccgcttcacacaagcttctcaggaaaatctttaaggccaatcatctagaagacaaaataaacatcatagaaaagcgtccagaactgcttaccaatgaggacctgcaggggagaaaagtctccttgttactcggcgaaccattttttacaacctccttgctgccttggcataatctctatttctggtacgttaggaccgcagttgatcagcatctgggtcccggggcaatggtcatgcctcaggcagcttcacttcacgcagtagtcgtggaatttagggacctctggcggatccgcagcccgtgcggggactgtgagggattcgacgttcacatcatggacgatatgataaagagggccctcgacttccgggaatcccgcgaggccgagccacatcccttgtgggagtatccttgccgcagtctgtcagagccgtggcagattctgacctttgactttcagcagccagtgcctttgcaacccctatgtgcagaagggaccgtggaactgagacggccagggcaatctcatgcggccgtactctggatggagtaccatctgacccctgagtgtacactctcgaccggactactggagccagcggaccctgaggggggatgctgctggaacccacactgtaagcaagccgtgtacttcttttctcccgcacctgacccccgggccttactgggcgggccccggacagtttcctacgctgtggagttccatccggatacaggcgatatcataatggaattccgccacgctgacacacccgattag

SEQ ID NO: 16867 - DNA, 300 bp, synthetic construct
  source 1..300: mol_type = other DNA; note = Synthetic coding sequence
atggtagtgaaactgctctctaacaaaagatcacaggctgtgggcatcttgatgtctagcttacacctcgacatgaaagacattcagcatgcagtggtgaacctggacaattccgtggttgaccttgaaacactccaagctctgtacgaaaaccgggctcagtctgatgaactggagaagattgaaaagcacggaagatcttccaaggacaaggagaatgccaagtccctggacaaacctgagcagttcctttacgagctgagtctgattcccaacttctctgaacgagtcttctgctag

SEQ ID NO: 16868 - DNA, 390 bp, synthetic construct
  source 1..390: mol_type = other DNA; note = Synthetic coding sequence
atggggggatgtttctccaagcctaagcccgtcgagctgaagatcgaagtcgtgctcccggaaaaagagcgggggaaggaagaactgtccgcttcagggaaaggaagccctagggcctatcagggcaatgggaccgcgcgtcattttcataccgaggaacgcctgtcaacaccccatccttatccatcgcctcaggattgtgtggaggcggccgtgtgccacgtcaaagacctggagaatggccagatgcgcgaagtcgaactcgggtggggcaaagtgctgctggtgaaagacaacggcgagtttcacgctctcggacacaagtgccctcattacggtgctcctctggtgaaaggtgtgctgtcacgcggacgggtgcgttgcccctag

SEQ ID NO: 16869 - DNA, 453 bp, synthetic construct
  source 1..453: mol_type = other DNA; note = Synthetic coding sequence
atgaatctcgcggagatttgcgataacgccaagaagggtcgggagtatgcactgctgggaaactatgactcctctatggtctactaccagggcgtgatgcaacagatccagaggcattgccagagtgtgcgtgaccctgctataaaagggaagtggcagcaggttaggcaggaactgctggaggagtatgagcaggtcaaatctatcgtctctactctagagtctttcaagatcgataagccccctgactttcctgtctcttgtcaggacgagcccttccgggaccctgcagtgtggcctcccccagtgcccgcagagcatagggcaccgccgcaaatcagacgccctaaccgagaagttcgcccactcaggaaagagatggccggcgtcggtgcccgagggcccgtgggccgagcgcatcctatctctaaatctgaaaagccatccacatag

SEQ ID NO: 16870 - DNA, 498 bp, synthetic construct
  source 1..498: mol_type = other DNA; note = Synthetic coding sequence
atgggagtgaaccagagtgtcggctttcctccggtcacgggtcctcatctcgtagggtgcggcgatgtgatggagggccagaatcttcagggaagtttcttcaggctcttctacccatgccaaaaggcggaagagacaatggaacagcccctgtggatcccccgctatgagtactgtactggcttggcagagtatctgcaattcaacaagagatgcggaggtctgctattcaatctggcggtagggtcatgccgcttaccagtgagttggaacgggccattcaaaacaaaagattccggataccctttaattatcttcagccacgggttgggtgccttcagaaccttgtattccgctttttgcatggaactcgccagtagggggttcgtggttgccgtccctgagcaccgcgacagatccgccgctacaacatatttttgcaaacaggcccctgaagaaaaccaaccaaccaacgagagccttcaggaggaatggtag

SEQ ID NO: 16871 - DNA, 270 bp, synthetic construct
  source 1..270: mol_type = other DNA; note = Synthetic coding sequence
atgtccgagcagggcgacctgaaccaggctatcgccgaggaaggcggcacggaacaggagaccgctacaccggagaacggaattgtgaaatccgaatcattagatgaagaggagaagctggagctccagagacgactcgaagctcaaaatcaggaacgacgcaagtctaagagcggcgctggcaaggggaaactgactcgatctctggctgtttgtgaagaaagttcagcccggccaggcggtgaatctttgcaggatcaaactctttag

SEQ ID NO: 16872 - DNA, 6009 bp, synthetic construct
  source 1..6009: mol_type = other DNA; note = Synthetic coding sequence
atggaggagcgaaagcacgagacaatgaatcctgctcacgtcctatttgatcgatttgtacaagcaacaacgtgcaagggaactctcaaagcctttcaagaactgtgtgatcacctggagttaaaacctaaggattatcgctctttttatcacaagctaaaatctaagttgaattattggaaggccaaggctctgtgggcaaaactggataagaggggctctcataaggactacaagaaaggcaaggcttgcacaaacacaaaatgccttataatcggtgctggcccgtgtggcttacgcacagcaatcgatctgagcctgctaggcgcaaaagtggtggtcatagagaagagagacgcgttctcacgtaataacgtgctacacttgtggccgttcacgattcacgacctcaggggcctaggcgccaagaagttctatggaaaattttgcgcaggggctatcgatcacatctccattcggcagctacagctgattctgcttaaggtcgccttgatcttaggtatcgagatccatgtgaacgtggaattccaaggccttatccagccgcctgaggatcaggagaacgagaggatcggttggcgggctctagtgcatcccaagacgcaccccgtgagtgagtatgagttcgaagtaatcatcggcggtgacgggagacggaatacgctggaagggtttcggagaaaggaatttcggggcaaacttgcgattgccattacagccaacttcattaaccgcaatactaccgcagaggctaaggtcgaagaaatcagcggtgtagcttttatttttaaccagaagttttttcaggagctacgcgaagcaaccggtattgacttggagaacatcgtgtactacaaagacgatacccactactttgtgatgacagctaaaaagcagtctctccttgataaaggagtgatactccatgattacgccgataccgagttactgctgtccagagaaaacgtggatcaggaggctctattgtcctacgccagggaagccgctgacttctccacgcaacaacaattgccctcccttgactttgccatcaaccactacggtcaacctgacgtggcgatgtttgactttacatgcatgtatgcttctgaaaacgcagcactagtcagagaacaaaacggccaccagttgttggtcgccctcgtcggtgatagccttctcgaacctttttggcctatggggactggcattgctcgcgggtttttagctgcgatggacagcgcttggatggtaagatcttggagcctgggaaccagtcctttggaggtgctggccgaaagggaaagcatctacaggctcttgccacaaactacacccgagaatgtttcgaaaaatttctcccagtattcgatagaccccgtgactcgatacccgaacatcaacgtgaatttcctgcgaccatcccaagtccgtcacctgtacgacacaggagagaccaaagatatacatttagaaatggagagcctggtcaactcaaggactacccctaaactcacacgtaacgaaagcgtagcacgctcctctaaactgctcggctggtgtcagcgccagaccgacggatatgccggagtaaatgtcactgaccttacaatgtcttggaagtcaggtctggcgctttgcgccatcattcatcgctatcgccccgatttaattgattttgactccctggacgagcagaacgtcgagaaaaataaccagctggcctttgacatagctgaaaaagaattgggcattagtcctatcatgaccggcaaagaaatggcctccgtgggggagccagacaaacttagtatggtcatgtatctcacccagttctatgaaatgttcaaggacagtcttccgtcgagcgacacccttgacctcaatgctgaagaaaaggcggtcctgatagcctccacacggtctccaatctctttcctgagcaagctcggccagacaatctcgcgcaagagatctcccaaagataaaaaagagaaggatctggacggggccggaaagcgtcggaagacaagccagtctgaggaggaggaggccccacgaggccacaggggggagcggcctacccttgtttcgacgctcacggaccgcaggatggacgttgccgtgggtaaccagaataaagtcaaatacatggccacacagctgctcgcaaagttcgaggagaatgcccccgcacagagcatagggattaggcgccaaggaagcatgaagaaggaatttccacaaaatttgggagggtctgatacttgctacttctgccagaaacgagtgtatgtgatggagcgcctgtcagccgagggtaaatttttccaccggagttgcttcaaatgcgagtattgcgccaccaccttaagacttagcgcttacgcctacgacattgaggatggcaagttttattgcaaacctcactactgttatagactgtccggttatgcacagaggaaaagaccagctgtggccccgctatccggcaaagaggcgaaggggccactccaagatggcgccacaacagatgcaaacggacgcgccaacgccgtcgcctcatctaccgaacgtaccccagggtcgggcgtaaacggtctggaagagcccagtatcgccaaacgtttgcggggaacccccgaaaggatagaactcgagaactacaggttgtccttgagacaggccgaagctctgcaggaagtgcccgaagaaacgcaggcggaacacaacttgtcatctgtcctcgataccggtgctgaagaggatgtagcttcatccagctcagaaagtgagatggaggaagagggagaggaagaggaagaggaaccccgtttgccaccaagcgacttgggtggcgtcccctggaaagaagcagtgcgtatccacgccttattgaaaggtaagagtgaggaggagctggaggcttccaagagcttcgggccaggcaatgaagaagaggaggaggaagaggaggagtatgaagaggaggaggaggaggactacgatgaagaggaggaggagtcgtcagaggctggcaatcagcgcttgcagcaggtcatgcacgccgcagatcccttagagattcaggctgatgtccactggacccatatcagagaaagggaggaggaagaaaggatggcacccgctagcgagtcctctgcaagtggcgctccactggatgagaatgacttggaggaggatgttgactccgagcctgcagaaatagaaggtgaagccgcggaggacggggaccccggtgacaccggggctgagctggacgatgatcaacactggtccgatagccccagcgatgcagatagagagctacgtcttccctgcccggccgagggcgaggcagagctcgaattgcgagtctccgaggacgaagaaaagctgcctgccagtcccaaacaccaggaacggggacctagccaggctacctcccccatcaggagcccacaggagtcagctctcctgttcattcctgtgcactcaccatctacagaaggtccacagctgccacccgttccagccgctactcaggagaagagtccagaagagcggttgttcccagagccattactcccaaaggagaaaccaaaagccgacgccccctctgaccttaaggcggtacattctcccataaggtcacagcccgtcaccctgcccgaagcccgcactccagtgagcccaggtagccctcagccccagcctcccgtggccgcaagtactccgccaccttcccctctaccaatttgtagccagccccagcccagtaccgaggctacggtaccttcacctactcagtcacccatccgcttccaacctgccccggcgaagacctccacacctctggcgccactgcctgtccagtcgcagagcgatacaaaagatagattaggcagcccactcgctgtggatgaagccctccggagaagcgatctggttgaagaattttggatgaagtctgcggaaattaggcggagccttggattaactcctgtggatcggtcaaaggggccagagccatccttccccacacccgccttcaggcccgtgtcattgaagagctattccgtggagaaaagcccccaggatgaaggactgcacctgttgaagcctctctctattcccaaacgtttgggtctcccgaaacccgaaggggaacccctttccctgcccacccctcggagcccatccgaccgagaattgcgaagcgctcaggaggagcgacgcgaactgagtagttcttctggtttggggttgcacggtagctcaagcaacatgaagaccttagggtcacagtctttcaacacatctgattcagcaatgttaaccccaccatccagcccaccccctccccctccccctggcgaggagccagccaccttaaggagaaagttaagggaagccgagccaaacgcctccgtggtgcccccccccctccccgctacctggatgaggccgcctagagagcctgcccagccccctcgagaggaagtccgcaagagttttgtcgagtcggtggaggagattccgttcgcggacgatgtcgaggatacgtacgatgacaaaacggaagattcctctctgcaggagaaattctttacgccgccatcttgctggccgaggccggagaagcctcgccaccccccgttagctaaggaaaacggacgcctgcccgccctcgagggcacattacagcctcagaagcgcggcttgcccctcgtaagtgcagaagccaaagagctcgccgaagaacggatgcgagccagggagaagagcgtcaaaagccaagcccttagggatgccatggccaggcagctgagtcgtatgcagcaaatggagcttgcctccggcgccccccgtccacggaaagcgtcatccgcaccctctcagggaaaggagaggcgcccagacagtcccacccgcccaacattaaggggaagcgaagaaccaacccttaaacacgaggctacatctgaagaagtgctatctcccccctccgacagcggtgggcctgacggcagtttcacgtctagtgaagggtccagcggaaagtccaagaagaggagttctctgttctctcctcggaggaacaagaaagaaaaaaagagtaaaggagaaggaagaccccccgaaaaaccaagctcaaacctgctggaagaagcagcagccaagcccaagtcactctggaagagtgttttttccggatataagaaggacaagaaaaagaaggctgacgataagagttgccctagcaccccaagcagtggtgctacagtggactctgggaagcaccgagtcctgcctgttgtcagagctgagcttcagctacgcagacagctgtcattcagcgaagattcagatttgagctccgatgatgtattagaaaaatctagccagaagagtcgcagagagccaagaacttacaccgaagaggagctcaatgctaaactcacacgacgcgtgcagaaggcagcaaggcgccaggccaaacaggaggagctcaagcgtctgcatagggctcagattatccagcgccagctgcagcaggtggaagagcgacaaaggagacttgaagaacggggggtggccgtggaaaaggcccttcgaggggaagccgggatgggcaagaaagatgacccaaaactcatgcaggaatggtttaaactggtgcaggaaaaaaatgcaatggtacgatatgagagcgaactcatgattttcgcacgcgaactggagctggaggaccgacagtcacggttgcagcaggaacttcgagagcggatggctgtagaagatcacctaaagaccgaagaagaactgtctgaagagaagcaaattctaaacgagatgttggaggtggtggaacagagggacagtctggtcgctctgttggaagaacagaggttacgtgagcgcgaagaagataaggacctggaagcggccatgctatctaagggtttttctctgaactggagttag

SEQ ID NO: 16873 - DNA, 540 bp, synthetic construct
  source 1..540: mol_type = other DNA; note = Synthetic coding sequence
atgtccagcaacgagtgctttaaatgcggccgctcaggccattgggctcgagagtgcccaactggcggaggccgtggcaggggaatgcgttcaaggggtagaggaggattcaccagcgacaggggtttccagttcgtatcgagcagcctacccgacatctgctatcggtgtggtgagtccgggcacctggccaaggactgcgacttgcaggaagatgtggaagcatgttacaactgcggcagaggcggtcatatcgccaaggattgcaaagagcctaaacgcgaacgtgaacagtgttgctacaattgcggcaaaccaggccatctggctagagattgcgaccacgccgatgaacagaaatgctactcctgcggcgagtttggtcacatccagaaagattgcacaaaggtgaagtgctatagatgtggtgaaaccggacatgtggctattaattgtagtaagacctccgaagtgaattgttacaggtgcggcgaatcagggcatcttgcgcgagaatgtacaatagaagctactgcctag

SEQ ID NO: 16874 - DNA, 1140 bp, synthetic construct
  source 1..1140: mol_type = other DNA; note = Synthetic coding sequence
gcccgggcagtacctgtcggatccggcctgcgagggctgcagcggacgctcccattagtggtcattctcggggcaaccggcactggcaaatctaccctcgcactgcagctcgggcaacgactgggcggcgagattgtgtctgctgatagtatgcagccacaagaaatgggaactgagaaagtgatcgaccgaaaagttgaactcgagaaagaggatggcttggttttgcataagaggctgtcgcaggtggacccggaaatggctgcgaagctgcatccacatgacaaacgtaaagtcgcccgtagtctccaagtttttgaagaaacaggcatttctcattccgagttcctgcaccggcagcatactgaagagggtggcggtcccttgggcggtcctcttaagtttagtaatccctgtatcctgtggctgcatgctgatcaggccgacgaacgactcgacaaaagggtggacgacatgctggccgcgggactgctggaggagctgcgtgatttccacaggaggtataaccagaagaacgtcagcgagaattctcaagactatcagcatggaatcttccagtccattggatttaaggagtttcatgaatacctaataactgaggggaagtgtacgctggaaacttccaatcagctgctgaaaaaaggcatcgaggccctgaaacaagtgacaaaacggtacgcccggaaacagaataggtgggtcaagaaccgtttcctctcccgacccggtcccatcgttcctcctgtctacggacttgaggtatctgacgtgtcaaagtgggaggaatcagtcctggaaccagccctggaaattgtccaaagctttattcaaggccacaagccaactgccactccaattaagatgccatataacgaggctgagaacaaacggagttaccacctgtgcgatttatgtgatcgaatcatcataggcgacagagagtgggccgcgcatatcaaatcaaaatcccacctgaaccagctaaagaagcgaagacggctggatagcgacgccgtgaacacgatcgagtcgcagtcagtttccccagaccataataaggagcctaaggagaagggatcccccgggcaaaacgatcaggaacttaaatgctctgtgtag

SEQ ID NO: 16875 - DNA, 483 bp, synthetic construct
  source 1..483: mol_type = other DNA; note = Synthetic coding sequence
atggaggcagaacggcctcaggaagaggaggatggcgaacaaggacctcctcaggatgaggagggctggcctccccctaacagtacgacccgcccctggcggtctgcgcccccctcacctccccctcccggcaccagacacaccgctctcggaccacggtctgctagcctgctgtctctccagacggagctcttattagatctggttgcagaggcacaatctaggagactggaggaacagcgggccaccttctacacccctcagaatccttcatctctcgcgccagcgccattgcggccgctggaggacagggaacagctgtacagcacaatcctctctcaccagtgccagagaatggaggcccaacggtctgagcctcctctgcccccgggaggtcaggagctgctggaactgctgcttagggtccaaggggggggacggatggaggagcagcggtccagacccccaacacacacatgttag

SEQ ID NO: 16876 - DNA, 816 bp, synthetic construct
  source 1..816: mol_type = other DNA; note = Synthetic coding sequence
atgaatctggagaagctgagtaagccagagctgctcacactgttctccattcttgagggcgagctcgaggcccgcgatttggtgattgaggcgcttaaagcccaacacagagacacattcattgaggagcgctacggaaagtataacattagcgaccctctgatggccctccagagagatttcgaaacactcaaagaaaaaaacgacggcgagaaacagcccgtgtgcaccaacccgctgtctatcttaaaggtggtcatgaaacagtgcaaaaacatgcaagaacgaatgctgagccagctggccgcggcagagtctaggcataggaaggtgatattggatctggaagaagaacgccagagacacgcccaggataccgctgaaggggacgatgtcacatacatgctagagaaagaacgcgagagactgacgcagcaactcgaatttgagaaatctcaggtgaagaagttcgagaaagagcagaaaaagctaagttcccaactggaggaagagaggagccgtcacaagcagctgtcatccatgttagttttggaatgtaagaaggcaacaaataaagcagcagaagagggacagaaagcaggggagctaagcctcaagctggaaaaagagaaatctcgagtgtccaagttggaggaggagctagccgcggagcgtaaaagagggctccagaccgaagcacaggtggagaaacagctcagcgagttcgatattgagagggagcagctgagggccaagttgaatagagaagaaaaccggacgaaaacccttaaagaagagatggaatcacttaaatag

SEQ ID NO: 16877 - DNA, 1482 bp, synthetic construct
  source 1..1482: mol_type = other DNA; note = Synthetic coding sequence
atggatcaggattacgaaaggcgcctactacggcagatcgtcattcagaacgaaaacacaatgccccgagtgaccgaaatgaggcgaactctgacccccgcctcgtcccccgtgtcgtctccatcgaaacatggggacaggttcattccctctagagcaggagccaactggtctgtgaactttcacagaattaatgagaacgagaagtcccccagtcaaaatcgcaaggctaaggacgcgaccagcgataacggtaaagacggcctggcctactctgctctcctgaagaatgagctgcttggagccgggattgagaaagttcaggatcctcagactgaggacaggcgattacaacccagtacacccgagaaaaaaggcctctttacttacagtctgtccaccaagaggtcatctcccgacgatggcaatgacgtatctccttactccttgtctcccgtttcaaataagtctcagaaactcctgagatctcctcgcaagcctacaagaaagatcagcaagattcctttcaaggttctcgatgccccggaactccaggacgatttctacctgaatctggtcgattggtcaagtctcaatgtgttgtctgtcggactgggaacctgtgtttatctgtggagtgcctgtacctcccaggtgacccgtttatgcgacctatccgtggaaggcgactctgtaacctccgtaggatggagcgagagagggaacctggtggccgtgggtacacataaaggtttcgtgcagatatgggatgccgccgctggcaaaaagctgtccatgctggagggacacacagctcgcgtgggggctctggcttggaatgccgagcagttatcctctggctccagagaccggatgatcctgcaaagggatatcagaacccccccactgcagagcgagcgacggctgcagggccaccgccaggaggtgtgtggtctcaagtggtccactgatcatcagctactagcctcaggggggaacgacaacaaactccttgtctggaatcacagctcactatcgcctgtacaacagtacacagagcatctggctgccgtgaaggctatcgcatggtctccacaccaacatggcctgctcgcttctgggggaggtaccgctgacaggtgcattcgtttttggaatacactaaccggacaaccactgcagtgtatcgacaccggctcacaggtgtgtaatctcgcatggtcaaagcatgcaaatgagctggtgtccacacatggctactcccagaaccaaatattggtctggaaatatccatctctgacacaagtggctaagttgacgggtcatagctatagggtgctgtatctggctatgagccccgacggtgaggcaatcgtcacaggagcaggtgacgagactctccggttctggaatgttttcagcaaaaccaggtccaccaaggaaagcgtgtccgttctgaatttattcacaaggatccgatag

SEQ ID NO: 16878 - DNA, 552 bp, synthetic construct
  source 1..552: mol_type = other DNA; note = Synthetic coding sequence
atgaagaaggagcacgtcctacattgccaattctccgcatggtatccttttttccgcggagtgacaattaaatcggtaattttgccgctgccccaaaacgtcaaagattatctgctcgacgatggaaccttggtggtctcagggagggacgaccccccaacccattctcaacctgacagtgacgacgaggctgaagagatccagtggtcagacgatgaaaacacggcaacattgaccgatgcctactggatagccatgaacagctccttgaagtgtaagaccctgtctgatatattcttactgtttaaatcttctgactttatcacccgcgattttacccagccctttatccattgcactgacgattcgcccgatccctgcatagaatatgaacttgtgctcaggaagtggtgtgaactcatccctggcgccgaatttagatgctttgtcaaggagaataagttgatcggcatctcacagcgcgactacacccaatactacgaccacatctccaagcaaaaggaggagatcagaagatgtatccaggactag

SEQ ID NO: 16879 - DNA, 672 bp, synthetic construct
  source 1..672: mol_type = other DNA; note = Synthetic coding sequence
atggaggatgtgaaactggaatttccgtctttgcctcaatgcaaagaggacgcagaggaatggacctatcctatgagacgggaaatgcaggagatcctaccggggctgtttcttggcccatatagctcagctatgaagtccaagctccccgtcctgcagaagcatggaatcacccacatcatctgcataaggcaaaacatcgaggcaaactttatcaaaccaaatttccagcagctgtttagatacctggttctcgatatcgcagataacccggttgaaaacataatacgattttttcctatgactaaagaatttatcgacggctctctgcagatgggcgggaaggtgttggtgcacggtaacgcaggcatttcgcgatctgccgccttcgttatagcttacattatggagaccttcggcatgaaataccgcgacgcgttcgcatacgttcaggagagacggttctgtatcaaccctaatgcaggctttgtgcaccagttgcaggaatacgaggctatctacctcgccaaactcactatccagatgatgtctcctctccagatcgagagatctctctcagtgcactccgggaccactggatctcttaagcggacacatgaggaagaagacgactttggtactatgcaggtcgccaccgctcagaatggttag

SEQ ID NO: 16880 - DNA, 348 bp, synthetic construct
  source 1..348: mol_type = other DNA; note = Synthetic coding sequence
atgccaattttactctttcttatcgacacatccgccagtatgaaccagcgcagtcatcttggaactacatatcttgacacggctaagggagccgtggagaccttcatgaagttgcgagccagagatccagcttctcgaggggatcgctatatgctggtaactttcgaggagccaccgtatgctataaaggccggatggaaggagaaccatgctacctttatgaacgaactgaaaaacttgcaggccgagggtctgactaccctgggccagtccctgcgtacagcgttcgacctccttaatctgaatagactggtcactgggattgataactatggccaggtgggttag

SEQ ID NO: 16881 - DNA, 390 bp, synthetic construct
  source 1..390: mol_type = other DNA; note = Synthetic coding sequence
atggccgaactgatacagaagaaattgcagggggaggtggaaaaataccaacagctgcagaaggatctgtcaaagagtatgtcggggcgccagaagttagaagctcagctgacagaaaataatatcgttaaagaggagcttgcccttctggacggaagcaacgtggtgttcaagctgctgggaccagtgctggttaagcaggagttgggagaagcaagggctacagttggaaagcgacttgactatattactgcggagatcaagcgttacgagtcccagcttagggatttagaaaggcagagcgaacagcagcgggaaactctcgctcaattacaacaggagttccaaagggcacaggccgcaaaagccggagctccaggaaaagcgtag

SEQ ID NO: 16882 - DNA, 2676 bp, synthetic construct
  source 1..2676: mol_type = other DNA; note = Synthetic coding sequence
atggtggcaccagtgctggagactagccacgtgttctgctgtcccaatcgtgtgcgaggagtcttgaactggtcctcaggtccccgaggattgctggctttcggaacatcttgctcggttgttctctatgaccccctgaaacgggtagttgtgacaaacctcaacggccacacagccagagtaaattgtatacagtggatctgcaagcaggatggtagcccgtcaaccgagttggtgagcggcggctcagataatcaggtaattcactgggaaattgaggacaaccagctgctgaaggccgtccacctgcagggacatgaaggcccggtgtacgctgttcatgcggtgtatcagcggcggaccagtgatccagcactatgcactttgattgtgtctgctgccgccgatagtgccgtcaggttatggagcaagaagggacctgaagtcatgtgcctccagacccttaactttggaaacgggttcgcgctggcgctgtgcctctcatttctgcccaacacagatgtgacatggaagacagggcaagtcgaacgaggccgggcttggaagccccctgcaagccttgcactgtgcagccgctcctgcgactctatggtgtcatgctacgcaagcattttgtgcaaagcactgtggaaagagaagctgcacactttctggcaccacaaccggatttcgttccttcccagcgcttttagacccattcccatcctggcctgtggcaacgatgattgcagaatccacatttttgctcagcaaaacgaccaattccagaaggtcctgtccctttgtgggcatgaagactggatcagaggcgtggagtgggctgccttcggcagagatctgttcttggctagttgtagccaagactgtttgatccggatctggaaactttacatcaagtccacttccttggaaacccaggacgatgacaacatccgcctcaaggagaatacattcacaatagaaaatgagtctgtgaaaatcgcgtttgcagtcactctcgagacagtgctggccggccacgagaactgggtgaatgcagtgcactggcagcctgtgttttataaagatggcgtgctccaacagccagttaggttgctcagtgcgtctatggataagaccatgattctctgggccccggacgaggaatcaggcgtatggctggaacaagtgagggttggagaggtcgggggcaacaccctcggattttatgactgccagttcaacgaggacggctctatgattatagcgcacgctttccatggagctttgcatctgtggaagcaaaataccgtgaaccctagggagtggacccctgagattgttattagcggccactttgacggagtgcaggatctggtatgggaccccgaaggggaatttataataaccgttggcaccgaccagacaacacgactgttcgcaccatggaagcgaaaagaccagtctcaggtgacatggcacgagatagcgaggccacagatccatgggtatgaccttaagtgcctggcaatgatcaataggttccaatttgttagcggagcggacgagaaagtgctccgggtcttttctgctccacgaaatttcgtcgagaatttttgtgccatcactgggcagagcttaaaccacgtgttatgtaaccaggatagcgacttacccgagggcgccactgtccctgccctgggtctcagtaacaaggccgtttttcagggtgacattgccagccagccaagcgatgaggaggaacttttgacgagtacaggatttgagtaccagcaagtcgcatttcagccgtctattcttactgaacccccgaccgaagaccatctgctgcaaaacacattatggccggaggtgcagaagctctacggacacggatacgaaatcttttgcgtcacgtgcaacagctccaaaacacttcttgcttctgcttgcaaggcagcaaagaaggagcatgcagccattatcttatggaacactacttcgtggaaacaagttcagaacctagtgtttcacagtctcaccgtgacccaaatggcattctcacccaatgagaaatttttgctcgcagtttctcgggaccgtacttggagtttatggaagaagcaagacacaatctcgcccgagttcgagccagtgttctcactttttgcgttcactaacaaaatcacttccgttcactcaaggatcatctggtcctgcgactggtctccagactcaaagtacttcttcaccggatcacgagataagaaggtagtggtgtggggcgagtgcgatagcactgatgattgtattgaacacaatatcggaccgtgcagcagcgtcttagacgttggcggagcagtgactgcagtgtcggtgtgtccagtgctgcatcccagccagcggtacgtggtggctgttggccttgagtgcggtaaaatttgcctctatacctggaagaagaccgaccaggtcccggagatcaatgactggacccattgcgttgaaaccagtcagagccagagccacaccctagccattcgaaagctgtgttggaaaaattgttcgggcaaaacagagcagaaagaggctgaaggggccgagtggctacatttcgcgagctgcggagaagatcacactgtgaagatacacagagtcaacaagtgcgccctgtag

SEQ ID NO: 16883 - DNA, 573 bp, synthetic construct
  source 1..573: mol_type = other DNA; note = Synthetic coding sequence
atgggcccccttccccggacggttgagcttttctacgacgtgcttagcccctacagttggttaggatttgaaattttgtgtcggtaccagaacatctggaatatcaacttgcaactgcggccatccttgattacgggcattatgaaagatagcggcaataagcctcccgggttgcttccacgtaaaggactttacatggctaacgatttgaagctattgcgacaccacttgcagatccctatccactttcccaaagatttcctaagcgtgatgcttgagaaggggtcattgtcagcaatgagattcctcaccgctgttaatttggagcaccctgagatgcttgagaaagcatccagggagttatggatgagggtttggagcaggaatgaagacatcacagaacctcagtccatcctggcggccgccgagaaggccggcatgagtgcagagcaggcccagggcctgctggagaagattgctacccctaaagtaaaaaatcagctgaaggaaacgactgaagcagcatgcaggtatggagaacgatctggttgggcgctctacctgcagccctag

SEQ ID NO: 16884 - DNA, 1482 bp, synthetic construct
  source 1..1482: mol_type = other DNA; note = Synthetic coding sequence
atgatgaagaggcagttgcatagaatgagacagctagcccaaaccggatctctgggccggactcctgaaaccgcggaatttctgggtgaggacctgctacaggtggagcaacgcctcgaacccgcaaaaagagccgcacacaatatccacaaacgactgcaagcatgcttgcagggtcagtccggcgccgacatggacaagcgcgtgaagaagctacctctaatggctctgagcactactatggcagaaagcttcaaggagctcgatcctgatagcagtatgggcaaggctctggagatgagttgcgcaatacagaatcagctggccaggatcttggccgagtttgaaatgactctcgagagggatgtactgcagcccctgagccggctgagtgaagaagagctgccagccatattaaagcacaagaagagcctgcagaagctggtgtctgattggaatacactgaagagccgcctgagccaggcaaccaaaaacagcggttcctcccagggcctcggaggatcacctgggtcccatagccatacaaccatggccaacaaggtggagaccctgaaggaagaggaggaggaacttaagcgaaaagtggagcagtgcagagacgaatatctagctgacctataccattttgtaacaaaagaagacagttacgcaaactactttatcagactgctagagatccaggcagactaccacaggaggagtctgagctcactggataccgcccttgcggaacttagggagaaccatgggcaggccgatcatagcccctccatgacagcaactcacttccccagggtatacggcgtctctttagcaacacacctgcaggagcttggcagggagatcgcacttcccatcgaagcctgcgtaatgatgctcctgagtgaggggatgaaggaggaagggctgttccggctggcggctggcgcctcagtgctgaagcggttgaaacagactatggcatctgacccacattcattagaagaattctgctccgatcctcacgccgtcgccggtgctctgaaaagttacttaagagagttgccggaacctctgatgacgtttgacctctacgacgattggatgcgcgccgcgtcccttaaggagcctggtgctcgcctgcaggcgctccaggaggtgtgttcaagactccctcccgaaaacttgagtaatcttagataccttatgaagtttctggctcgactcgccgaagaacaggaggttaataagatgacaccatctaatattgccattgtgttgggtcccaacttgctatggccaccagaaaaagaggggctggagtattcaggagccatttctgcgcactgcaacctacggttacctggaagttccgatagctcagcctccgcttgtcaggtggccggaacgaccggtacaagaccttcttggatgcagcccccttgtctccctagccgctggtgggccagcagccgcagatag

SEQ ID NO: 16885 - DNA, 45 bp, synthetic construct
  source 1..45: mol_type = other DNA; note = Synthetic coding sequence
atggctatggctccatccccttccctggtgcaggtctacacatag

SEQ ID NO: 16886 - DNA, 828 bp, synthetic construct
  source 1..828: mol_type = other DNA; note = Synthetic coding sequence
atgtctgccgaagtgaaggttactggtcagaaccaagaacaattcctgttactggcaaagtcagcaaaaggagccgccctggccacactgatccaccaggttttggaggctccaggagtctacgtatttggcgagctcctggatatgccgaacgtgagggaattggcagagagtgatttcgctagcacgtttagactgctgaccgtgtttgcttacggcacatatgccgactatctcgctgaggcccgaaatttgccaccactgactgaagcccaaaaaaacaaattgcggcacctgtcagtcgtaacactggcagctaaggtgaaatgcatcccctatgccgtcctgctggaggctctggcgctgcgtaacgttaggcagctggaggatctcgtcatcgaagccgtttatgcagatgtcctcagaggcagcctggaccaacggaatcagcgcctggaagtggattatagtattgggcgcgacattcagagacaggacctcagcgcaatcgcacgcactctacaagagtggtgtgtcggatgtgaagtagtgctgagcggcatcgaggaacaagtttctagagcgaaccaacataaagaacaacagctggggttgaagcagcagatagaatccgaagttgcaaatctgaaaaaaacaattaaagttaccacagcagccgcagctgccgccacatcccaggacccagagcaacatctaaccgaactgagggagcctgccccagggaccaaccaaagacagccctctaagaaggcctccaagggcaaagggcttaggggtagcgctaagatatggtctaaaagcaactag

SEQ ID NO: 16887 - DNA, 1506 bp, synthetic construct
  source 1..1506: mol_type = other DNA; note = Synthetic coding sequence
atggccgcacccgagcctgctcccaggcgcgccagagagagagagcgggagcgcgaggacgagtccgaagacgaaagcgacatcttggaggagagtccttgtgggagatggcagaaaagacgcgaacaggtcaaccagggcaatatgcccggacttcaaagtacctttctggccatggacactgaagagggcgtcgaagtggtgtggaatgagctccacttcggcgaccgaaaagcctttgctgctcatgaagagaagatccaaacagtgtttgagcaactagtcctagtagaccatccgaacatcgtgaagctccacaagtattggctcgatacatcagaggcctgtgcccgggtcatctttataactgagtacgtcagttcaggttcattaaagcagtttttgaaaaaaaccaaaaagaatcataaagccatgaacgcccgggcctggaaaagatggtgtacacagatcttgtccgctctctctttcctgcacgcttgtagccctcctattatccacggaaatctgacatccgataccatctttatccagcataatgggctcatcaagatcggatcagtatggcatcggatcttttccaatgccttgccagatgacctcaggagcccgatccgcgccgagagagaagaattgaggaacctccatttttttcccccagagtatggcgaggtggctgatgggacggcggttgacatattctcttttggaatgtgcgctctggagatggccgtgctcgagatacagacaaatggagacactagagtgactgaggaggctatcgcgagagcgcgtcattccctctcagatccgaatatgagggagttcattctgtgttgcctcgctcgagatcctgccaggcgccctagtgcccactctctgctgtttcacagggtactgtttgaagtgcatagcttgaagctgcttgcggctcactgttttattcagcaccagtaccttatgcctgagaatgtagtggaggagaagactaaggcgatggatttgcacgcagtcttagctgagttgcccaggcccaggaggccccccttgcaatggcgatattccgaggtcagctttatggagctggacaagttcctggaggatgtgaggaacggcatttacccactgatgaattttgcggcgacacggcctctgggactgccccgcgtgctggcccccccacctgaggaggttcaaaaggctaaaactcctacgccagagccattcgactccgagacaaggaaggtgatccagatgcagtgcaacttggagagaagcgaggacaaagcgaggtggcacttgaccctcctccttgtgttggaggacaggttgcatcggcagttgacatatgacttactaccaaccgactcagcacaggatctggccagtgaactcgtgcattacggttttttgcacgaggacgatcgcatgaagcttgccgcgtttctggaaagtacatttctgaagtatagaggcactcaggcctag

SEQ ID NO: 16888 - DNA, 36 bp, synthetic construct
  source 1..36: mol_type = other DNA; note = Synthetic coding sequence
atgactgctcctagttgtgccttccctgttcagtag

SEQ ID NO: 16889 - DNA, 534 bp, synthetic construct
  source 1..534: mol_type = other DNA; note = Synthetic coding sequence
atgctgctagacaagaacgtgcccaatcccaggatcaagttgatagacttcggcatagcccacaagattgaagccggcaatgagtttaaaaatatattcggtacccccgagttcgtggcccctgagatcgtgaattacgaacctctcggcttagaggctgatatgtggagtatcggggtgatcacttatattctcctttccggcgccagtccttttctgggcgagacgaagcaagaaacccttacaaatataagcgcggtcaactacgactttgatgaggaatacttcagcaataccagtgagttggcaaaggatttcataagacgcctcctggtcaaggaccctaagagacgcatgaccatagcgcagagtctggagcatagctggatcaaggctattcgtcgaagaaatgttcgcggagaggattctggaagaaagcccgagaggaggcgcttaaaaacaactaggttaaaagagtataccatcaagtctcattcaagcgcgagcccaattgtcgcccctgtggacgcctag

SEQ ID NO: 16890 - DNA, 615 bp, synthetic construct
  source 1..615: mol_type = other DNA; note = Synthetic coding sequence
atgggcgacaagaaatcgccaacgagaccaaagcgccagcctaaaccttcttctgacgagggctactgggattgttccgtgtgcacattccgtaattctgccgaagcctttaagtgcatgatgtgcgacgtgcggaagggaacctctactcgcagtaccctttttgaagtgattgtcagcgcgagccggacaaaagagccactgaagttcccaatcagtggcagaaagccaagaccggtttcacagttggttgcacagcaggttacgcagcaattcgttccaccgacccagagtaaaaaagaaaaaaaggacaaggtggagaaggagaaatcagaaaaagaaaccacgtctaagaaaaacagccacaagaagacccgcccaaggctaaagaatgtcgatcggtcttcagcccagcatctcgaagtcaccgtcggggatctgaccgtcatcattactgacttcaaggagaaaactaagtccccccccgcctcctctgcggcttccgcagatcaacactctcaatccgggagttctagcgacaatactgagcgcggaatgagccggtcctcgtctccacgtggcgaagcttccagcctgaatggtgagagtcactag

SEQ ID NO: 16891 - DNA, 1350 bp, synthetic construct
  source 1..1350: mol_type = other DNA; note = Synthetic coding sequence
atgatgctggggacagaaggaggagagggcttcgttgttaaggtgcgtgggctgccttggagctgctcagccgacgaggtccagcgatttttctccgactgcaagattcagaacggcgctcaggggatcagattcatatacaccagagaagggagacccagcggcgaggcatttgtggaactcgagtccgaggacgaagtgaaactcgcactcaaaaaggacagagaaaccatggggcaccgatacgtagaagttttcaagagtaataacgtggagatggattgggtgttgaagcacacggggcctaactcgcccgatacagcaaatgacggctttgtccggttgaggggcttaccttttggatgtagcaaggaggagatcgtgcagttttttagtggccttgaaatcgtgccaaacgggataactcttccagtggatttccaagggaggagtaccggtgaagcctttgtccagtttgctagtcaggaaattgcggagaaggctctcaagaagcataaggagcgcatcggtcatcggtatatagagatatttaagtcttcacgggccgaggtcagaacccattacgaccccccaagaaagctgatggccatgcaacgccccggaccatatgataggccaggggccggccggggctataactcaataggccgaggagcagggttcgaaaggatgaggaggggagcatatggaggggggtacgggggctacgacgattacaacggatacaatgatggttatggattcggctccgatagatttggcagggaccttaattattgcttcagcggcatgtccgatcatcgctacggtgatggaggtagcacctttcagtccaccactggccactgtgtgcacatgcgcgggctgccatacagagccactgaaaacgacatatacaatttcttctcgccgctgaaccccgtgcgagtgcatatcgagattgggcctgacggacgagtcactggggaagctgatgtggagtttgctacacatgaggatgctgtagcagcgatgtccaaagacaaggccaatatgcagcacagatacgtcgagttgtttctgaactctacagctggggcgtccgggggagcatacgagcaccgctacgtggagttgttcctgaatagtactgcgggtgcatctggcggggcttacggctcccagatgatggggggaatgggactcagcaaccagtccagctatgggggcccggcatcccagcagctgtctggcgggtacgggggagggtacggaggccagtcctctatgtctgggtacgaccaagtcttgcaggagaacagttctgactttcagtccaatattgcttag

SEQ ID NO: 16892 - DNA, 153 bp, synthetic construct
  source 1..153: mol_type = other DNA; note = Synthetic coding sequence
aagactggcctgaccggaagtccctcgagtttatgggacctgctcagggagatgtttgtcgtgtgtagtaaggagcagttgcagagcggtgggaagtactcccaccaggtctgggcgcctttttccccacttgcctcaggggccgcattctag

SEQ ID NO: 16893 - DNA, 4386 bp, synthetic construct
  source 1..4386: mol_type = other DNA; note = Synthetic coding sequence
atgcaaagagagctagtgtatgcccggggcgacggacccggtgctccgaggcctgggagtactgcgcacccccctcacgcaatacccaattcacctccgagtactccagttccccattctatgcctccctctccaagccgcatcccatatggagggacccgatctatggtggtgcccgggaacgccactattccacgagacagaatctcaagccttccagtctccagaccaatatccccgagcccatctgccatcctggagagacgcgatgtgaaacccgacgaagacatgtccggcaaaaatatagctatgtaccgtaatgaagggttttacgccgatccctatttgtatcacgaaggacggatgagcattgcctccagccatggaggccatccactggacgtcccagatcatatcattgcttatcacagaacggctatacgcagtgccagtgcgtactgtaatccctcaatgcaggctgaaatgcacatggagcaaagcctgtaccgccagaaatctcggaagtatcccgacagccacctcccaactctaggatcaaaaaccccaccagccagcccccatagagtcagcgatctccgtatgatcgacatgcacgctcactataatgcacatggaccaccccatacaatgcaaccagatagggcatcacctagtagacaggcattcaaaaaggagcctggaacattagtgtacatcgagaaaccaaggagcgccgccgggctcagcagcctggtagacttaggcccaccgttgatggaaaaacaggtatttgcatactctaccgcgactatccccaaagatagggaaacatcggagaagatgatgaaaaccaccgcaaacaggaatcacacagatagcgctgggactcctcacgtttctggcggtaaaatgctatccgcactagaatccaccgttcctccaagccagcctcctcctgtggggacttccgccatccacatgagcttgctcgagatgagacgttctgttgccgagctgcgactgcaacttcagcagatgcgtcagctgcagctgcagaaccaggaactactcagggctatgatgaagaaggccgagctcgagatatctgggaaagtgatggaaacaatgaagcggctggaagacccagtacagcgtcaaagagtcctggtcgaacaggagaggcagaagtatctccacgaggaggaaaaaatcgtgaagaagctttgcgaattggaggactttgtggaagatctcaaaaaagacagcaccgcagctagtcgactagtgaccctgaaggacgtcgaggacggagcctttttgctgcgacaggtcggggaggcggtcgcaacacttaaaggagagtttcctaccctgcaaaataaaatgcgagctatactgcggattgaagttgaggccgtgagatttctgaaggaggaaccccacaaactcgattcactgctaaaaagagtgaggtccatgacagatgtgttgactatgctaagacgacacgtgacagacggcctgctcaagggcacggatgcggcacaagctgctcagtacatggccatggagaaggccaccgccgctgaggtactgaagtctcaagaagaagcagcccacacctcagggcaaccatttcactctaccggcgcgcccggcgacgccaaaagtgaggtggtgccactttctggaatgatggtgcggcacgcccagtcatctcctgtcgtgattcagccctctcagcacagtgtagcactgctcaatcccgcgcaaaatttgccacatgtggcatccagtccagccgtccctcaggaggccacctccactttacagatgtcacaggctcctcagagccctcagattccaatgaacggtagtgccatgcagagcctcttcatagaggaaatccattccgtatccgccaagaatcgcgccgtaagcattgagaaggctgaaaaaaagtgggaagaaaaacgtcagaacctggaccattacaacgggaaagaatttgaaaagttgctcgaggaggcccaggccaacataatgaagtcaattccgaatttagaaatgccacccgcaacaggacctttgccaagaggggacgccccggtcgataaagtggagcttagtgaggatagccctaactccgagcaagacctggagaagctcggaggcaagtccccacccccgccccctcctcccccgagacgctcttacctgccgggatccggcctgaccactacccgtagcggcgatgtggtgtacacgggccgtaaggagaacatcacggccaaggccagcagcgaggacgcaggcccttcacctcagacccgcgctactaaataccctgcggaagaaccagctagtgcttggacacccagtccccctccggtcacaaccagcagctccaaagatgaagaagaagaggaagaagagggggacaaaatcatggccgagctacaggcctttcagaaatgctcctttatggatgtgaacagtaacagccatgcagaaccctccagagcggattcacacgtgaaggatacgcggagcggggccaccgttccccctaaagagaaaaagaacttggaattctttcacgaggacgtccgaaagagtgacgttgagtatgaaaacggaccccaaatggaattccagaaggtcactacaggcgccgtgagacctagcgacccacccaaatgggagcggggaatggagaactccatttcagatgcatccagaacatctgagtacaagacagagattatcatgaaggagaactcaatctccaacatgtctctgctcagagactcgagaaattactcccaagagactgtgcccaaggctagttttggcttttccggaatcagccccctggaggatgagattaataagggtagcaagatcagcgggcttcagtacagcattcctgataccgagaaccagactctcaactacggcaagactaaggaaatggaaaaacaaaataccgataagtgccatgtgtctagccataccaggctcacagagtcctcagtacatgattttaaaaccgaggatcaggaagtcattaccactgactttggacaggtggtgctccggccgaaggaggctcggcatgctaatgtaaaccccaacgaggacggcgaatcttccagctccagccccactgaagaaaatgctgccactgacaatatcgccttcatgatcaccgaaaccactgtgcaggtcctgtcgtccggagaagtccatgacatcgtatcccagaagggagaggatatccaaacggttaatattgatgcccggaaggagatgactcctaggcaggaggggaccgacaacgaggaccccgttgtgtgtcttgacaaaaaacctgtgatcatcatttttgacgagccaatggacatacgctccgcttacaaacgactgtcaacgatctttgaagagtgtgacgaggagcttgaacgcatgatgatggaggaaaaaattgaggaggaagaagaggaggaaaatggagactccgtcgtgcaaaataacaacacatcgcagatgtcccacaaaaaggtcgcacctggtaacttgaggactggccagcaggtcgaaactaagagccagccacactctttggccacagaaacccgaaaccctggtggtcaagagatgaaccgcaccgaactcaataagttctcccacgtggattcacctaattcggagtgcaagggagaggacgcaactgatgaccagttcgaatcacctaaaaagaagttcaagtttaagtttccaaaaaagcagctggctgccttgacccaggcgatcaggaccggtaccaaaaccggtaagaagaccctccaagttgtcgtgtacgaggaagaagaggaggatggaaccctgaagcaacataaggaagctaaacgctttgagatagcgcgtagtcagccggaggatacacccgagaacaccgttcgtcgtcaggaacaacctagcattgaatccacaagtccaattagccgcactgacgaaatccgtaaaaacacttacaggaccctcgatagtctcgagcagaccatcaaacagcttgagaacacaatttctgagatgagtcccaaggctttggtggacacctcgtgttcaagcaaccgggactcagtggcgtcctcctcacacattgcacaagaagcttccccacgccctctgctggtccccgatgaaggcccgacagctctcgaacctcccacttcaatcccgagcgccagcagaaaggggtctagcggcgctcctcaaacttcgcggatgcctgtgccaatgagtgccaagaatcgacccgggaccctggacaaacccggcaaacaatcaaaactccaggacccacgacagtatcggcagtag

SEQ ID NO: 16894 - DNA, 2118 bp, synthetic construct
  source 1..2118: mol_type = other DNA; note = Synthetic coding sequence
atgctcaccctcctcgctgaggaccgggccgtgccaagtgctcctacggggcccgggcctcttctggagttcgcactccacgaagatctgctgacacgggtcttaacctggcagctccagtgggatgagcttggtgacggtgtggaagagaggcgagccgaacagctgaaactgtttgagatgttggttagtgaggcgagacaaccgttactgcgtcacggtcccgtccgagaggcgctcttgacgctgctggacgcttgcgggcggcccgttcccagcagtcctgccttagacgagggcctggtcctgctgttgtcccagctgtgcgtatgcgtggcccaggagcctagtctgctcgagttcttccttcagcctcccccagaacctggcgccgccccacgcttactcttgttttcacgcctagtcccttttgtccaccgcgagggcacactggggcagcaggcacgcgacgccctcctgctccttatggcacttagcgccggatcacccacagttggaagatatattgcggatcatagctacttttgcccagtgttggccacaggactgagtgctttgtactccagtttgccacggaagatcgaggtcccaggcgacgactggcactgtctgaggagagaggattggctgggcgttcctgccctggccctgttcatgtcaagcttggaattctgcaatgctgtgattcaggtcgcacatcctcttgttcagaaacagttggtcgactacatccataacggttttctggttcctgtcatgggacctgcactccataagaccagcgtcgaagaaatgatcgcaagtactgcttatttggagttgttcctgaggtcgatatctgagccggctctgctgcggactttcctgaggtttctgctgctgcatcggcatgacacacatacaattctagacacactagttgccagaattgggtcgaactctcgcctgtgcatggtttccctgtctttattcaggactcttctcaatctgtcttgcgaagatgtcctgttgcagttggtgctccggtacctggtgccgtgtaatcacgtgatgctatctcagaagcctgctgtgagagacgtggatctctatggaagggccgccgataaatttctgagtcttattccccgatgctgccgccaccatgcacccagtccacctagacccgaacatgcctcctgggcccgcgggcccggaagtccgtccgtcgattcaagctctgtcactaccgtaccgcgcccatcgacgcctagccggcttgcactgtttctcaggcagcagtcactcggcgggtctgagagccccggtccagcaccctgctctcccggactgtctgcctctcccgcaagtagtcctggtaggcgacccacacccgcggaagagccaggcgaacttgaggataactacctggagtacctcagagaggcccgtcgaggtgtggatcgatgcgtgagggcatgccggacctggagtgcaccatacgacggcgagcgccctagcccagagcctagcccgttcgggtcccggactaaaaagcgctcattgctgccagaggaagacagaaataacgtaggtgaaggagaagaggaggagctgggccgaagaggacgggcaggcggcgcgggcgaaggccctgggcatcttccacctccacaactcaacggcgtgccggggtcatggcctgaaggcgcaaaaaaagtacgattggtgcctaaggaaggggcgggggagctgctggagggaatctcggaaggcatggctgggttagaaggcttcggccaagaactgcgcgagctggaagttgctctgtcaaacggcgggacagggtcggagtcgccactcgaaccccccctgcctttggaagaagaggaagcctacgagagctttacctgccctcctgaaccacccgggccctttctctcctccccactcagaacgctcaaccaattgccatcacagccatttaccgggccttttatggccgtcctctttgccaagttagaaaatatgcttcagaattcggccctgagctgttccacaccaacctggtcatccagtcccgtctcctccccatgctgtagatgttgggccctgtag

SEQ ID NO: 16895 - DNA, 804 bp, synthetic construct
  source 1..804: mol_type = other DNA; note = Synthetic coding sequence
atgatgaggggatatattaagaaggtcttgaaaaacacttcctatcacgtgaaccagtatctcttcattcagcacggatggagcgggtctggcgaccagtccgtgctctactcttgtaacctgatgcgcatggtgacacgcacaaagaagatatttgttggtggattatctgccaacaccgttgtcgaagatgtgaagcagtatttcgaacagtttggcaaggttgaagacgcaatgctgatgtttgacaagaccaccaatcggcatcgtggattcggatttgtgacatttgaaaacgaggatgtagtggagaaggtgtgtgaaattcatttccatgaaattaataataagatggtggagtgcaagaaagcacaacctaaagaggttatgtttcctcctggcaccagggggagggctcgtggtttaccctacaccatggacgccttcatgctgggtatgggaatgctgggctaccctaatttcgtcgctacttacggtcggggatatcctgggttcgcaccaagttacggataccagtttcccggattccccgctgcagcttatggtccagtggccgcggccgctgtcgccgcggctcggggctcgggcagcaacccggctcgcccggggggttttcctggtgcaaattcgcccggacctgtggccgacctttatgggcctgcctcccaggactcgggagtcggcaactacatcagcgctgcctctcctcagccaggaagcggatttggtcacggcatcgcggggccacttatagccaccgcttttacaaatgggtaccactag

SEQ ID NO: 16896 - DNA, 483 bp, synthetic construct
  source 1..483: mol_type = other DNA; note = Synthetic coding sequence
atgtctagcccactggcgagtctcagcaagacgcgcaaggtgcctctaccctccgaacctatgaatcctgggcggcgtgggatccgaatttatggagacgttcccgcctcacacgattctgagctcatggcgttcatgacccggaaactgtgggacctggaacagcaggtcaaggcgcaaaccgatgaaattctttctaaggaccagaaaattgcagcactcgaagatctggtacagaccctgcgaccccaccccgcggaagccaccttgcagcgccaggaggagctggaaacgatgtgtgtgcaactgcagcgacaggttagagagatggagcggttcttgtctgattatggtctgcagtgggttggagagccaatggatcaggaggactccgagtccaagacggtgtcagagcacggagaaagagactggatgacagcaaagaaattttggaagccaggggggctgattggcgctccctag

SEQ ID NO: 16897 - DNA, 462 bp, synthetic construct
  source 1..462: mol_type = other DNA; note = Synthetic coding sequence
tgatcagtccagagtcccgcccaacaacaggtgccggctaggcccggggctccgtctgtccaggtgccttcacctttcctgctgcagaaccagtatgagcctgtccagccgcattggttctactgcaaggaagtcgagtacaagcaattatggatgccgtttagcgtgtttgacagcctcaacctcgaggagatttataatagtgtgcaacccgatccagagagcgttgtcctcggtacagacggcggccgttatgacgtgtatctgtacgacaggattcgcaaggcagcttattgggaggaagagccagccgaagttagacgctgcacatggttttacaagggcgatacagactcacggtttattccctacaccgaagaattctccgagaaactggaggtacgcgtgctgtattttttcatgagcttctttaagaaatgtcgttcatatattcattggtag

SEQ ID NO: 16898 - DNA, 1062 bp, synthetic construct
  source 1..1062: mol_type = other DNA; note = Synthetic coding sequence
atggagcaagaactggaacagctggcccagctgccaagttcaaagaactcactgctgaaggacgccatggcgccgggcactcccaaaagcttgttgctgagcgcctccatcaaacgcgaaggtgagtcccctacagcaagcccacacagtagtgccactgacgacctgcatcactccgatcgctaccagaccttcctccgtgtcagagccaacagacagaccagattgaatgctcgcatcggtaaaatgaaacgacgtaaacaagatgagggccaggtctgtcctctgtgtaaccgacctttggctggatctgaacaggaaatgtcccggcatgtagaacactgcctgtcgaaacgcgagggaagctgtatggccgaggacgacgcagtagacattgagcacgaaaataataatcggtttgaggaatacgagtggtgtggacagaagcggattagagctacaaccctgctggagggagggtttagaggatctggattcatcatgtgtagtggcaaggaaaatcctgactccgacgccgatcttgacgtggacggagacgacaccctcgaatatgggaagccacagtacacagaagcagatgttataccttgcaccggcgaggaacctggcgaggccaaagagagggaggcactgagaggtgccgtcttaaatggtggacccccgagcacacggatcactccagaattctctaaatgggcctccgacgagatgccgtccacgtctaacggcgaatcctccaaacaagaggcaatgcagaagacctgcaagaacagcgacattgaaaagattaccgaggactccgccgttaccacctttgaagctctgaaggcccgggtgcgagagcttgagagacaactcagccgcggcgatagatacaagtgtcttatatgtatggactcttattcgatgccgctaactagcatccagtgctggcatgtccactgcgaggaatgttggctgaggacactgggtgccaaaaagttgtgtccccagtgtaacaccatcaccgccccaggggatctcagacgtatctatctctag

SEQ ID NO: 16899 - DNA, 1782 bp, synthetic construct
  source 1..1782: mol_type = other DNA; note = Synthetic coding sequence
atggaaaagctcagtgccctccaggagcaaaagggcgagctcagaaaaaggctgtcttacactacacataagctcgaaaagctggagacagagtttgacagcacgagacattacctggaaatcgagctgcggcgggctcaggaagagttagagaaagtgaccgaaaagctgagacgaattcagtcgaattatatggcactgcaaaggatcaatcaggagctggaggacaaactgtaccggatgggccagcactacgaagaggagaagagggcgctgagtcacgagatagtagccctgaacagtcatctcctcgaggccaaagtaaccattgataagttgtccgaggacaacgagctgtatcgaaaagactgcaatctggccgcgcagctcttgcagtgtagccaaacatatggccgggttcacaaggtgtctgagttgccatcagacttccaggagagagtgtcgcttcacatggaaaagcacggttgttccttgcctagccctttatgccatcccgcctacgcagactctgtgcccacttgcgtgattgccaaagtcttggagaaacccgatcccgcgtcactttcttcgcgattgtctgatgcatcagccagagatctggccttctgtgacggggtggaaaaacctggtcctcgccccccctacaaaggcgacatttactgttcggataccgcactgtactgccctgaggaaagaaggcgcgaccgaaggccctccgtggacgctccagtgacagacgtcggattcttacgtgctcagaatagtacagactcggccgctgaagaagaggaggaggctgaggctgcagcctttcccgcaggcttccagcatgaagcgtttcccagttacgccggaagtctaccaacttcctcctcctactcctcatttagcgccacaagtgaggagaaggaacacgcacaggccagcacattaacggccagtcaacaggccatctatctcaactcgagagacgagctttttgatagaaagccacctgccaccacttatgagggatctccacggttcgcaaaggcgaccgctgccgtggccgccccactagaagccgaagtcgcaccaggtttcggcaggactatgagcccttatccagcggaaactttccgattcccagcctcacccggtccacagcaagcactgatgcctccaaacctttggtccttgagagctaaaccaggaactgcccggttgcctggcgaagacatgcgagggcagtggcggcctctgtcagtggaggatattggggcttattcttatccagtgtctgccgcgggaagagcttccccatgctcattctcagagcgctactacggcggagccggcggctcgcccggaaaaaaggccgatggtcgtgctagccctctgtatgcatcatataaagccgactccttctcggaaggagacgatctgtcccagggacacctcgcagagccgtgcttcctgcgcgccggaggcgatctgtctctgtcaccagggagatctgctgatccccttccaggctatgcaccctccgagggcggagacggggaccggctgggggtgcaactgtgcggcacagcctcttcacccgaacccgaacaaggctcccgggacagtctggaaccctcgtccatggaggctagtccagagatgcatcctgccgctcgcctgagtccgcagcaggccttcccaagaaccggcggaagcggactgagccgaaaggattcactcacaaaggctcagctctatggcaccctgctgaattag

SEQ ID NO: 16900 - DNA, 363 bp, synthetic construct
  source 1..363: mol_type = other DNA; note = Synthetic coding sequence
ctggctcttcagattagcgaaaatctgtttagcaataaggtgctgaatgctctcaagcctgaaaaggacgtagacggagtgactgatatcaacctaggaaagttggtaagaggggatgcccacgagtgctttgtgagccccgtggccaaggcagtcattgagctgctcgaaaagtcaggggtgaacctggacggcaagaaaatcctcgtggtgggagcacatgggagcttggaagccgcattgcagtgcttgttccagaggaaagggtctatgaccatgagcatccagtggaagactaggcagcttcagagcaaaaccgagtcaagaagcgtcactaggctggagtgccgtagagtgatctag

SEQ ID NO: 16901 - DNA, 1167 bp, synthetic construct
  source 1..1167: mol_type = other DNA; note = Synthetic coding sequence
atgtctgggacatttttgatccggaagcctcagttgctgcaaggagtgtacgccatgggattcaaccgaccctcaaagatccaggaaaacgcattacctatgatgttggccgaacctccgcagaacttgatcgcccaaagccagtctgggactgggaaaactgcagcttttgtgcttgccatgttgagtagagtggaaccaagcgacaggtacccccagtgtctgtgtctatccccgacgtatgaattagctctgcagactggcaaagtgattgagcagatggggaagttctatcccgaactgaaactggcctatgccgtacgaggcaataagctggagaggggacagaagattagtgagcagatcgtgattggtacccctggcaccgtgcttgattggtgttcaaaacttaaatttattgaccccaagaaaattaaagtcttcgtactggacgaggccgacgtcatgatcgctactcagggacaccaggaccagtcaattcgcattcaacgtatgctgccccggaactgtcagatgctgcttttttccgcgaccttcgaggattctgtgtggaaattcgcccagaaggtcgtaccagaccccaacgttatcaaactcaagagagaggaggaaacactcgatacgataaaacaatactatgtgctctgctcatcacgcgacgagaaattccaggccctgtgtaatctgtacggagccatcaccatcgctcaggccatgatcttttgtcacacccgtaaaactgcctcatggcttgcagcagagctgagtaaagaaggacaccaggtggccctgttgtcaggtgagatgatggtcgagcagcgcgccgctgtgattgagcggtttagggaagggaaagaaaaagtcctggtcacaactaacgtgtgtgctcgggggatcgacgttgagcaggtgtcagtagtcatcaattttgatctccccgttgataaagacggcaacccggacaacgaaacttatctgcaccggatagggcggaccggacggtttggcaagcgaggtttggcggtaaacatggtggactccaagcattccatgaatattctgaatcggatacaggaacattttaataagaagattgaacgattggatactgacgatctagacgaaattgagaaaatcgccaattag

SEQ ID NO: 16902 - DNA, 1821 bp, synthetic construct
  source 1..1821: mol_type = other DNA; note = Synthetic coding sequence
ctccgtcagtgttacaattataactgcccttcctttctcgccgcagctttggctcgcgcaacatcagacgaagttcttcaaagcgacctgtccgctcactatattccgaaggagaccgacggaaccgagggtacagtcgagatcgagacagtaaaactggccaggtccgtattctcgaagctgcatgagatctgctgttcttgggtgaaggactttcccctacggaggcggccccaactgtactacgaaacctctatccacgcgattaagaacatgcgcaagctcttttacaagcacatttccaaaaagaagaaaaaaagaaagaaacgcgattgggatcaggaggagcaggcttacttcgccgtgttcgatgggcatggaggtgtggatgctgccatttatgcatcaatacacctacatgtcaatctggtgcgccaggagatgttcccacacgatccagctgaggctctgtgccgcgccttcagggtaaccgatgaacgattcgtccagaaagcagcacgggaatctctgagatgtggaaccaccggcgtcgttactttcatacggggtaatatgttgcacgtggcatgggttggggattcccaagtgatgctggtgaggaaaggtcaagctgtggaactgatgaaaccccataaacctgaccgagaggacgagaagcaacggatcgaagccctaggcggctgcgtggtttggttcggcgcatggagggtcaacggatctctctcagtatctagggcaattggagatgccgaacacaagccctacatttgcggagacgcggattcagcgtccaccgtcctggacggaacggaagactacctcattttagcctgcgatgggttctacgatacagtgaatcctgatgaggcggtaaaagtcgtatctgaccatttaaaagagaacaatggtgactcatccatggtggctcacaaacttgtggctagcgctcgcgatgccggtagctctgataatattaccgtgatcgtcgtgtttttaagagacatgaacaaagccgtgaacgtgtcggaggagtccgactggacagagaatagctttcaggggggccaagaggacggtggagatgataaggaaaatcacggtgagtgcaagcgcccgtggccacaacaccaatgctcggctccggctgatctgggctatgacgggagagtcgatagctttacagacagaacatctctgagtccagggagccaaattaatgttctggaggatcccgggtaccttgacctcacccagatcgaggccagcaaaccccatagtgctcagttcctcctgcctgtagaaatgtttggccctggagctcccaagaaagccaatctgataaatgaacttatgatggagaagaaatccgtgcaatcatcgctccctgaatggtctggcgctggagagttcccgacggctttcaacctcggttctactggcgaacagatctataggatgcagtccctgtccccggtctgctccggcctcgaaaatgagcaatttaaatcgcccggaaaccgggtgagcaggcttagtcatctgcggcaccattactctaagaaatggcaccggtttaggttcaatccaaaattttactcattcctgagcgcccaagaaccgtctcacaagatcggaacctccctgtcttctctcacagggagtgggaaacgcaataggattcggtcctctttgccttggagacagaacagttggaagggctactcggagaatatgagaaagcttcgaaaaactcatgacatcccttgtcccgacctcccttggtcatataaaatagagtag

SEQ ID NO: 16903 - DNA, 678 bp, synthetic construct
  source 1..678: mol_type = other DNA; note = Synthetic coding sequence
atggagaatttgctgcaggctactaaaagccacgtagataaggtgatcatgaaattaggcaagacgaacgcaaaggccgttagcgaaatgcggcagaaaatatggaacaacatgcccaaagaccacccagaccatgagctgatcgacccttttccagttcctctggtcattattggctcaaagtacgatgtttttcaagatttcgagtctgagaagagaaaggtcatctgcaagacactccgcttcgttgcgcactactacggcgcttccctaatgttcacttcaaagtctgaggctttactcctgaagattcggggtgtgataaatcagttggcatttgggatcgacaagtcaaagagtatctgcgtcgatcagaataaaccgttattcatcaccgcaggtttggactcttttggtcagatcgggagcccaccagtaccggaaaatgacatcggaaagctgcacgcgcactccccaatggagctgtggaaaaaggtgtacgaaaaactgttcccccctaaaagcattaatacgttgaaagacatcaaggatcctgcccgtgacccccagtacgcggaaaacgaagtcgacgaaatgagaatccagaaggaccttgagttagagcagtacaaacgaagctcctcaaagtcatggaagcagatcgaattagacagttag

SEQ ID NO: 16904 - DNA, 621 bp, synthetic construct
  source 1..621: mol_type = other DNA; note = Synthetic coding sequence
atgggatttagcaacatggaggatgacggacccgaggaggaggagcgcgtggctgaacctcaggctaattttaacactccgcaggcgcttcgcttcgaagaactgttggcaaatttgttaaatgagcagcatcagattgcgaaggagctctttgagcagcttaagatgaagaagccttcagctaagcagcagaaggaagttgagaaggtaaaaccgcagtgcaaggaggtgcaccagactctcattctggatcctgctcagcggaagagacttcagcagcagatgcaacagcacgtgcagctcctgactcagatccatttactggctacctgcaacccaaacctgaacccagaggctagtagcactcggatatgccttaaggaactggggacatttgcccaatcgagtatcgctttgcaccatcagtacaatccaaaatttcagactctgttccagccttgtaatctgatgggagccatgcagctgatagaagattttagcacccatgtcagcatcgattgcagcccacacaaaacagtgaagaaaactgcgaacgagttcccctgtttgcctaagcaggtggcgtggattctagcgacctccaaagtgtttatgtattag

SEQ ID NO: 16905 - DNA, 468 bp, synthetic construct
  source 1..468: mol_type = other DNA; note = Synthetic coding sequence
atgggcaaagattactacaaaattctcggcatccctagcggagcaaatgaggacgagatcaaaaaagcttatagaaagatggccctgaaataccaccccgacaagaataaggagccgaatgcggaagaaaaattcaaagagattgccgaggcttatgacgtgctgagtgaccctaagaagagagggctttacgaccagtatggggaggagggtctcaagacgggtggcggcaccagcgggggcagttccggcagttttcattataccttccatggcgatccccacgcaacctttgctagtttctttggtggctccaacccttttgacatcttcttcgctagttcccggtccaccagaccgttcagtggctttgacccggacgatatggatgtggacgaggatgaagaccccttcggtgcctttggacgctttggctttaatgggttgagtcgcgggccacgccggtag

SEQ ID NO: 16906 - DNA, 246 bp, synthetic construct
  source 1..246: mol_type = other DNA; note = Synthetic coding sequence
atgtctatttcctccgacgaggtgaacttccttgtctatagatacctgcaggagtccgggttcagtcattccgctttcacctttgggatagagagtcatatcagtcagtccaacatcaacggagccctggtgccccccgccgcactgatctctatcatccagaagggccttcaatatgtagaggcagaagtatccattaatgaggatggcactctgtttgatggccgacctatagagtccctgtag

SEQ ID NO: 16907 - DNA, 1248 bp, synthetic construct
  source 1..1248: mol_type = other DNA; note = Synthetic coding sequence
atggccccggttggggttgagaagaagcttcttctcggtcctaatggtccagccgttgcagctgccggtgatctcacaagtgaggaagaagaaggccaaagcttatggtcctctatcctgtccgaagtcagcactagagctagatcgaagcttccgagcgggaagaacattctggtgttcggtgaggatgggtccggaaagaccactctcatgacaaagctgcagggcgccgagcatggcaagaaaggccgaggcctcgagtacctgtatctgtcagtgcacgacgaggatagagacgtggtgaaagatttccaagactatatggagccagaggaaggatgccagggtagcccccaacgaaggggcccgctgactagcggcagcgacgaggagaacgtggcactacctttgggcgataatgtcctcacccataatctaggaatcccagtgctcgttgtctgtactaagtgtgacgccgtaagtgtgcttgaaaaggagcatgattacagagacgagcacctcgactttattcagagtcaccttaggcgcttctgcctccagtacggggcagccttaatctacacatcagtcaaagaagaaaagaacttagacctcctgtacaagtacattgtccataagacgtatggattccactttacaacccccgctctggtggttgagaaggacgctgtatttatccccgcaggatgggacaatgagaaaaagatcgcgatcctgcatgagaattttactaccgtgaagcctgaggatgcatatgaggatttcatcgtgaagcccccggtgaggaagttggtacatgacaaagaactcgcagctgaagatgagcaggtcttcctgatgaaacagcagtccctcctagcaaagcagcccgctacaccgacacgggccagtgagtcaccagcccggggtccttcagggtcaccgagaacccagggcaggggcgggcccgcctctgtcccctcttcatcacctgggaccagtgtgaaaaaacctgaccccaacattaaaaacaatgccgctagcgaaggtgtgctggcctcctttttcaactcccttctctcaaagaagactgggtcgcccggatcaccaggcgcagggggggttcagagcacagccaagaagtcaggacagaaaaccgtcctgagcaatgtgcaggaggagctggacaggatgacgaggaaacctgattccatggtaacgaatagctctaccgagaatgaggcctag

SEQ ID NO: 16908 - DNA, 1929 bp, synthetic construct
  source 1..1929: mol_type = other DNA; note = Synthetic coding sequence
atgaggagcataacacagggcgcctgccggttcatttgggaggataagggatacatttccggagatcatataaacctggtgagctcgtcgctgagctcattccccatactgcaaaggtctagcgaagagaagattctgtatagtgatcgtctgtcactggagagacagaagttaacagtttgccctattatcaacggcgaggatcacctacgccttctgaattttcagcataattttatcacacgcattcagaacatatcaaatttacagaagctcatcagcctcgatttgtacgataaccagattgaggaaatttcaggtctcagcacattacgttgtctgcgggtattgctcctcggaaagaacaggattaaaaagataagtaatctggagaacctgaagtcacttgatgtgttagacctgcacggtaaccagatcactaagatcgaaaatattaatcacctgtgtgagctccgggtcctgaatctcgccagaaatttcctctcccatgtggacaatttgaatgggttggattcactgactgagctcaaccttaggcacaatcagatcacttttgtgagggacgtggacaatctgccctgcctgcagcatctgtttctgtcatttaataacatctcaagtttcgacagcgtatcctgtctcgctgactctagctctctctcggacatcacgtttgatggaaaccctatcgcccaggaatcttggtacaagcatactgtactacagaacatgatgcagctgcgtcaactggatatgaagcggatcactgaagaggaaaggaggatggcatccgtcctagctaaaaaagaggaggagaagaaaagagaatctcataagcagagtctgcttaaggagaagaaaagactcaccataaacaacgtggccaggcagtgggatctgcagcagcagcgggtcgccaatattgctactaacgaggacaggaaggatagcgacagcccccaggacccgtgtcagattgacggcagcacgttgagtgccttccccgaggagaccggccccctggatagcgggcttaacaacgcacttcagggactcagcgtgattgatacctatcttgttgaagtcgacggcgacacgctgtcgctgtatgggtctggcgcgttagaaagcctggatagaaactggagcgtgcagaccgctgggatgataaccaccgtaagctttacattcatagagttcgacgagatcgttcaagtgttgcctaagcttaagatcaaatttccaaattccctccacctgaaattcaaagaaacaaacctcgtgatgttacagcagttcaatgccctggcccaacttcgaaggatcgaccagctgacgatagatcctcagggcaacccggtggtaaactttaccctgtggaagtactatgtcctgttccggctctcccacttctcaatgcagaaaattaatgggaccgaagtgacgcagaacgacatgattatggcagaaaggctttttgggattctggcccacgtcgcgtctagtgaactgcctcagtatcgactaatcagtattctgggggatgccagaaagaagcagtttagatatttactggaatcaaaggggaaaaagcccggtataattaacgaagagaacaatgactcgaagagattagtgggcgagaatacaaacagggccacattaaactacacaacaagagatttttacaacgagaaactagaagagatcaaggaaaagaagaagttctgcaagacatatattgaggatctcgtgaaagaggccaccgaaattaacatgaaaaatgaagctctccagaagttatggcctcaaatgtttatcgagctggtcagagatgctgttatcgagatacgcaataagaacagctatatgaaactgtgtctgcagcagataactgatcagaagtag

SEQ ID NO: 16909 - DNA, 432 bp, synthetic construct
  source 1..432: mol_type = other DNA; note = Synthetic coding sequence
cggctagggcgatatgaggtcgaaaagagatgcgcagtcgagaaggaggactatgacctagccaaggagaagaaacagcaaatggagcagtatcgagcagaagtgtatgagcagctagaattgcacagcttactcgacgcggagcttcactccgcagttgatccgctgctcccagcaaccgacccacacccgaagattaacgccgaaagtctgccttatgatgaacggccactgcccgcaattcgcaaacattatggcgaagcggttgtggagcccgagatgtccaatgccgatatttccgacgcacgcaggggcggcatgttgggtgagcctgagcctctgactgaaaaggctctacgcgaagcctcgagtgctatcgatgtgttgggtgagacactggtggcagaggcctactgtaaaacatggtcttag

SEQ ID NO: 16910 - DNA, 1842 bp, synthetic construct
  source 1..1842: mol_type = other DNA; note = Synthetic coding sequence
atggccaccatcccggattggaagctccagttgttagctcggaggagacaggaagaggcttctgtccgcggaagggagaaagccgagagagagcgcctttcccagatgcccgcttggaaacggggtcttctggagagacgtagggcaaagttaggtctctcacctggagagccctctcctgtactaggtacggtggaggccgggccccctgaccccgacgagtctgccgtgcttcttgaggcaatcgggccagttcatcagaaccgctttattaggcaggagagacaacaacagcagcaacagcaacagcgatcagaagaactactcgccgagcggaaacccggaccactcgaggccagagagagaagaccgagccctggcgaaatgagggaccaatccccgaaaggacgggagagccgcgaagaaaggctctccccaagagaaactcgtgaacggagacttggaattggaggagcgcaggaattgtccttgcggcctctagaggcccgagattggcgacagtctccgggtgaagtgggcgacaggtccagcagactaagtgaggcctggaagtggaggctgtccccaggcgagacccccgaacgctcacttcgtctcgctgaatctagagagcagtccccgcggaggaaagaagtggagagccggctgtcccccggggagtcagcttaccagaagttaggccttaccgaggcccacaagtggagacctgactcacgggaatcacaagagcagagcctggtacaactggaggccaccgagtggcggcttcggagcggggaggaacgccaggattactcagaggaatgtggtcggaaggaggaatggcccgtgcccggggtggcaccgaaggaaaccgccgaattatctgaaactctaacaagggaggctcaagggaactcttccgccggtgtcgaagctgcagaacagaggcctgtcgaggatggagaacggggaatgaagcctacagaagggtggaagtggaccttgaatagtggaaaggctcgggaatggacccctagagatattgaagcgcagacccagaagcctgagcctccagagtccgctgagaagctactcgaatccccaggggtcgaggccggcgagggcgaggctgagaaggaagaggcaggcgcacagggacgtccactgcgggcccttcaaaattgctgcagcgtgcctagtccactgccccccgaagacgccggaactggcgggctgagacaacaggaggaggaagccgtagaactacagcccccaccgcccgcccctcttagtccacctccacccgcccccacagcccctcagccaccgggggacccccttatgtctagacttttctatggagtaaaggcggggcccggcgtcggggcaccacggagatccggacataccttcactgtcaaccctcgtcggagcgtgcccccggccacccccgcaacccctacttctccggccactgttgacgcagcggtgcccggggctggaaaaaagaggtacccaaccgccgaggagatcttggttcttggcggatacctgcggctgtccagatcgtgcctggcaaagggtagccccgagaggcatcacaaacaattaaaaataagcttcagtgaaaccgcactggagacgacataccaatatccttccgagagcagcgtcctcgaggaattggggcctgagcctgaggtcccatccgcgccaaaccctccagccgcccagcccgacgacgaagaggacgaggaagagcttctcctcctgcagccggaattacagggtgggcttaggactaaggcacttatcgtggatgagagctgtcgacggtag

SEQ ID NO: 16911 - DNA, 552 bp, synthetic construct
  source 1..552: mol_type = other DNA; note = Synthetic coding sequence
atgggccctctgcctagaacagtggaactgttctatgacgtgctgtccccatacagctggctgggctttgaaatattgtgtcggtaccagaacatctggaacataaatctccagctacgccctagtctcatcaccggcatcatgaaggattcagggagtctgtcagccatgagatttctgaccgctgtcaacctcgagcatccagagatgctggagaaggcaagccgtgagttatggatgagggtctggtctcgcaatgaggatattactgaaccccagtccattctcgccgccgctgaaaaagctgggatgtccgccgaacaggcccagggcctgttggaaaaaatagccacaccaaaggttaagaaccagttgaaagagacaacagaagccgcctgtcggtacggtgcttttggcctaccaatcacagtggctcacgtggacgggcagactcatatgctgtttgggagcgatcgaatggagctgctcgcacacttgctaggggaaaaatggatggggccaatccccccagcggtcaacgctaggctctag

SEQ ID NO: 16912 - DNA, 306 bp, synthetic construct
  source 1..306: mol_type = other DNA; note = Synthetic coding sequence
gaagggactagcggaaaaacagccctacatttggccgttgagacacaggaacgagggctagtgcagtttcttttgcaggcaggggcacaggtggacgctcggatgctgaatggctgcactcccctgcatttggccgccggacgtggattaatgggcatttccagtacgctatgtaaggcaggagccgactcattgcttagaaacgtggaagatgagaccccccaggacctcacagaagaatctctggtgctacttccatttgatgatctaaaaataagtggaaagctattactctgcacagactag

SEQ ID NO: 16913 - DNA, 14586 bp, synthetic construct
  source 1..14586: mol_type = other DNA; note = Synthetic coding sequence
atggctaccatgatccctcccgtcaaactgaagtggctggaacatttgaattcttcctggatcacagaagactcagagtcaatagccacaagggaaggagttgccgtcctctacagcaagctggtctccaacaaagaggtggtccccctcccacagcaggtgctgtgtctgaagggcccacagctacctgactttgagcgtgagagcctgagttcagatgagcaagaccattacctggatgcgctactgtcttcccagctcgccctggccaaaatggtgtgcagcgactcccccttcgcgggagcacttcgtaagaggctgctagtgctgcagagagttttctacgcactgagcaacaagtaccacgacaaaggaaaagttaaacagcagcagcacagtcccgagtcaagctcaggctccgccgacgttcattcggtgtcagaacgacctcggtcaagcaccgatgccctaatagaaatgggagttagaactgggttaagcctcctgttcgctctccttagacagtcctggatgatgcctgtcagcggacccggattgtctctgtgcaacgacgtcattcataccgctatagaggtcgtttcatcactaccccccctttctctggctaacgaaagcaagattccccccatgggcctagactgtctctctcaggtcaccacttttctgaaaggggtgacgattccaaattcaggggcagacaccctggggcggaggctagcatccgaattgttgcttggtcttgccgcgcaacggggctcccttcgttacttgcttgagtggatagaaatggcccttggggcatctgctgtggtccacactatggaaaaaggcaaactgctaagttcccaagaagggatgatctctttcgattgttttatgaccatccttatgcagatgcgccggtcgctcggatctagcgcagacagaagccagtggagagagccaactcgcacttccgacgggctatgtagtctctatgaagccgcgctttgtctgtttgaagaggtctgcagaatggcaagcgattacagccgcacttgtgcaagccccgacagtattcaaacgggagacgcacccattgtttcggaaacgtgcgaggtgtacgtctggggtagtaactcgagccaccaactggttgaggggacccaggagaaaattctccagcctaagttggctccttcatttagcgacgctcagacaatcgaggcaggtcagtattgtaccttcgtcatttctactgacggctctgtccgggcttgcggcaaaggatcatatggccgcttgggccttggcgatagcaacaaccaatctacactgaagaaattaacatttgagcctcatcggagcatcaaaaaagttagctcctccaagggatctgatgggcatacgctggcttttactacagagggggaggtctttagctggggcgatggagattatggcaagcttggacatggaaatagctccacacaaaagtatcctaaactgatccagggccctctgcaagggaaggttgtcgtgtgcgtatctgctggatataggcattccgccgctgtgactgaggacggtgaactgtacacttggggggaaggtgacttcggaagactaggacacggcgacagcaattccagaaacatcccgaccctcgtgaaggacatcagcaacgtaggcgaggtgtcgtgcggcagctcacacaccatagccctttctaaggacggtcgcacagtatggagtttcgggggcggggataacggcaaactcgggcacggagacactaaccgcgtgtataaacccaaggtcattgaggccctccaaggtatgtttatcaggaaggtatgtgccggatctcagagttccctggcattgacgagcactggtcaggtgtatgcatgggggtgcggagcctgtcttggatgcgggagctcggaagccaccgccctgcgccccaagctgatagaagagttggccgccactcgtatcgtcgacgtgtccatcggggactcacactgcctcgcattgtctcatgacaatgaagtttatgcctggggaaataactcgatgggccagtgtggacagggaaactccaccggacctattacaaagccaaagaaagtgtccggattggatggcattgctatccaacagatttctgctgggacctcacatagtcttgcctggaccgccctaccccgggatagacaagtagtggcttggcaccgcccatactgcgtggacctggaggagtctaccttcagccaccttagatcttttcttgaacgctactgcgacaagatcaacagcgaaatccctccacttcctttcccatcctcccgagagcatcactctttcctgaaactgtgcctgaagctacttagcaaccacctcgccctcgctctcgccggtggagttgctacttccatcctgggccgtcaggcgggaccactccgtaatctcttattccggttgatggatagtacggtcccagacgaaattcaggaggttgtgatcgagaccctgagcgttggcgccacaatgcttcttccacccctccgggagcggatggagctgctccattcgttgcttccccaaggtcccgaccggtgggagtcgctgagtaaaggacagcggatgcagctggacattatccttacaagcctgcaggaccacacacatgtggccagcttgctggggtattcaagccccagcgacgccgcagacctgagtagcgtttgtacgggttatggcaacttaagcgatcaaccctacggaacccagtcttgccaccctgacactcacctcgcggaaatccttatgaaaacactgctgcgaaacctcggattctacactgaccaagccttcggcgagctcgagaagaacagcgacaaatttctcttaggcaccagcagcagtgaaaatagccagccagcacatctgcacgagctgctgtgcagtctgcagaaacagttgctcgctttttgccacatcaacaatatcagcgagaatagctccagtgtggccctgctgcacaagcacttgcagctactcctgccccacgctaccgacatttattctagatccgccaacctgttgaaagagagcccatggaatggttccgtcggggaaaagctcagggacgtgatctacgtgtctgccgcggggtccatgctctgccagattgttaacagtctccttctgctgccagtgtctgtagctcgcccactactctcatacctgctcgatctattgccaccactcgactgtctcaaccggttgctgccagccgctgatctgctggaagaccaggagttgcaatggcccctgcacggtgggcccgagctcattgaccctgcggggctcccattgccacagcccgcgcagagctgggtatggctcgtggacctggagaggaccattgccttgctcattggtcgctgcctgggaggaatgctgcaaggctcacctgtgagccctgaagagcaggacacagcgtactggatgaagactcccctgttctcagacggggtggagatggacactccgcagctcgataaatgcatgtcttgtctgctggaggtggctctgagcgggaatgaggaacagaagccattcgattacaaattgcgcccagaaattgctgtgtatgtggacctcgccctcgggtgctccaaggaacctgccagatctctctggatttccatgcaggactacgcagtgtctaaagattgggattctgctaccttatctaacgagtccctgctggacaccgtaagccgcttcgtgctggctgccctcttaaagcacacaaatctgcttagccaagcctgtggggagagccggtaccaaccaggaaagcacctgtctgaggtgtacagatgcgtgtacaaggtacggtctcggttattagcctgcaaaaatctcgaacttattcagactcgctctagctcaagagacagatggatttcagagaatcaagattccgcagatgtcgatcctcaggaacatagcttcactcggacgatcgacgaggaggccgaaatggaggagcaggcagaacgcgatagggaggaaggacaccctgagcctgaggacgaagaggaggagcgggagcatgaggtcatgacggctggcaaaatattccaatgttttctgagtgccagggaggtggccagatctagggatcgcgaccgaatgaactccggcgccggaagcggggctcgcgcagatgacccacctccccagtcacagcaggaacgccgagtatcgactgatttgcccgaggggcaagatgtctacactgccgcttgcaacagcgtcatacatagatgtgctttactcatccttggggtatctcctgtcattgacgaattgcagaaacgacgcgaagaagggcagctacagcagccatccaccagcgcgtccgaaggaggaggactgatgacaaggtccgagtctctaactgccgagagtcggctggtgcacacatcccctaattaccggctgattaaatcgcggtcagagtcggacctatctcaaccagagtccgatgaggagggttatgctttgtcagggcgtaggaatgtggacctcgaccttgccgcatcccataggaagcgcggaccaatgcacagccaactcgaaagtctcagcgattcttgggctcgactgaaacactcccgggattggctgtgtaattccagctactccttcgaatctgatttcgatttgacaaagtctctgggcgtccatacacttattgaaaatgtggtgagcttcgtcagcggggacgtgggaaatgctccaggctttaaagagcccgaagaaagtatgagcacttctccccaggcttctatcattgctatggagcaacagcagcttcgagcggagttaagattggaggccttgcatcagattttagtcctcctgagcggcatggaagaaaaggggtctatctctctggccgggtctagattgtcctctggcttccagtctagcacactgctcaccagcgttaggttacagtttctcgcgggatgctttgggctcggcacagttgggcacaccggtggcaagggtgagagtggccgcttacatcactatcaggacggcatccgggccgccaagaggaacatacagatagagattcaggtggctgttcacaaaatttaccagcaattgagcgctaccttggaacgggccctccaagccaacaaacaccacattgaggcccagcagaggctgcttctcgttactgtgttcgccctgagtgtgcactaccagccggtcgacgtctcccttgccatatcaacaggcctgctcaatgtcctgtctcagttgtgcggaaccgacactatgctgggtcagccgctgcaactcttgcctaaaacgggcgtaagtcaattatcaactgctctgaaagtggcctctaccaggctactgcagatcttagccatcaccaccgggacttacgccgataaactgtcccctaaggtggtgcagagtctgttggacctcctgtgcagccagttgaagaacctcctctcccaaacaggagtgctgcacatggcatctttcggcgaaggcgagcaagaagacggtgaagaggaagaaaaaaaagtggacagcagcggggaaacggaaaagaaggatttcagggcggcattacgcaaacagcatgctgctgagttacatctaggtgattttctggttttcctccggcgagtggtgagctcaaaagcaattcagtccaaaatggcatcccctaagtggacagaagttttactcaatattgctagccaaaagtgtagctcagggatcccactggtcgggaatctgaggactcgccttctcgctctccacgttctagaggccgttctgcccgcctgcgaaagtggggttgaggacgatcagatggcacagatcgtggagaggctattcagtctcctgagtgattgcatgtgggagactccgattgctcaggctaagcacgcaatccaaataaaggaaaaggaacaggagattaaattgcagaagcaaggcgaattggaggaagaagacgaaaaccttccaattcaggaagtttcgttcgacccagaaaaggcccagtgctgcttggtggaaaacgggcagattcttacacatggtagtggcgggaagggttacgggcttgcctcgacaggcgtcacatctggctgctatcagtggaagttctacattgtgaaggagaatcggggaaacgagggcacgtgcgtaggggtcagtagatggccagtacacgacttcaatcatcgtactacttccgatatgtggctctatcgagcctactctggtaatctctatcacaacggcgaacagacgcttaccctgagctcctttacacagggcgactttatcacttgcgtgctagacatggaggcgaggacaatcagcttcggaaagaatggagaggaaccaaaattggcttttgaggatgtggatgctgcagagctgtatccgtgtgtgatgttttactcgtccaaccctggcgagaaagtgaagatctgcgacatgcagatgaggggcaccccaagagacctgcttcctggggatccgatttgctctccggtagccgccgtattagccgaggccactatccaactcattagaattctccatcgcaccgaccggtggacatattgcatcaacaaaaagatgatggagcgccttcataagataaagatttgtatcaaggagagcggacagaagctcaagaaatcgagaagcgtccagtctagggaagagaatgaaatgcgagaagagaaggagtccaaagaagaggagaagggaaaacacactcgccatggtttggccgacctgtccgagcttcaactgaggactttgtgcatcgaagtttggcccgtgctcgccgttatcgggggtgtggacgcaggtctccgcgtgggcggacgatgcgtacacaagcagactggcagacacgcgaccctactgggggtagtcaaagagggatctaccagcgctaaggtccagtgggatgaagccgagattaccatcagtttccccaccttttggtcaccttccgacacacccttgtacaatctagagccctgcgaacctctgcccttcgacgtggctaggtttaggggccttaccgcttctgttctgctcgacctgacatatctgaccggggtgcacgaagatatgggtaagcaatctacaaaacgtcacgagaagaagcaccgccacgagtctgaggaaaagggggatgtggaacaaaagcccgagagcgaatcggcattggacatgagaaccggtctcacttcggacgatgtgaagtcccagtctactacatcttctaaaagtgagaacgaaatcgcctcattctcccttgacccaactctcccctcagtcgagtcgcaacaccagattacggaaggaaagcgaaagaatcatgaacatatgtctaagaatcacgatgtcgcccagtctgagattcgggcagtgcagctatcatacctctatctgggcgctatgaagagtttatccgcacttctcgggtgttcaaagtacgccgaactgctgcttattccaaaagtactcgccgagaacggacataactctgattgtgctagtagccccgtcgtgcatgaagatgtagagatgcgcgctgcattgcaatttctgatgcgccacatggtcaagcgagccgtaatgcgatcgcctatcaaaagggctctgggcttggctgatctggagagagctcaggccatgatctacaaattagtggtacatgggctgcttgaggatcaattcggtggaaaaataaagcaggagattgatcagcaggccgaagagtcagaccccgctcaacaggctcaaacccctgtgaccacctccccatcagcttcctcaacgacaagctttatgagtagctccctggaagataccaccacagctactacaccggttacggacaccgaaaccgtgccagcctccgagtcccctggcgtcatgcccctgtcactacttagacagatgttttcttcctacccaactacaactgttctaccaaccaggcgggcccagacccctcctatctccagccttcccaccagtccaagtgatgaggtcggccgacgacaaagtctgacatcccccgattctcagagcgccaggccggctaacagaactgccctgagcgacccatcctctcgtctttctacaagcccccccccccccgccatcgccgttccgctgcttgagatgggcttcagcttgcggcagattgccaaagctatggaagctacaggggcaagaggcgaagcagacgctcagaacatcaccgtcctggcaatgtggatgatagagcatcccggtcatgaggacgaagaggagccccagtcagggtctacggccgacagtaggcccggagccgctgtgcttgggtctggagggaaatctaacgatccatgttacttgcagagcccaggcgatatcccgtcggctgacgctgctgagatggaggagggatttagtgaatctcctgacaacttggaccacactgaaaacgccgctagtgggagcgggcccagcgcgcggggcaggtctgcggtcacacgtcgccacaaatttgacctggccgccaggactctgctagcacgcgcggcagggttataccgcagcgtccaggctcaccggaaccagtcaaggcgggaggggatctcgttacaacaagaccccggcgcactatatgatttcaatctggacgaggagcttgagatagatcttgacgatgaggccatggaagcaatgttcggccaggatctcacatctgataatgatattctgggaatgtggattcctgaggtgttggactggcctacatggcacgtttgtgaaagtgaggaccgagaagaagtcgtggtgtgcgaactgtgcgagtgtagcgtggtgtcttttaatcagcacatgaagcgcaaccaccccggatgcggtagaagcgccaataggcagggatatcgatctaatggctcctacgtggacggttggttcggcggcgagtgtggcagcggaaatccatattacctgctctgcggcacctgcagagaaaaatacttagccatgaagactaagagcaagagcactagtagcgaaagatacaaaggtcaagccccagacttaatcgggaagcaggattcggtatatgaagaagactgggatatgttagacgtcgacgaggatgagaagctgacaggggaagaggagtttgagttgctggctggcccgttgggccttaatgaccgacgaattgtgcctgagcccgtacagtttcctgattcagatccacttggtgcctccgtggccatggtgacggctacaaattccatggaggaaacactgatgcagattgggtgtcatggctcggttgaaaagtcatcctcaggcagaattactttgggcgaacaggccgccgctttggccaatccccacgaccgagtggtggctttgcgcagggtgacggcggcagcacaagtgctcctggcgcgcactatggtgatgagggctctatccctactgagcgtgtctggatcttcttgctctttggcagctggcctggaaagcttgggtcttacagacatacgaacgctcgtgaggctgatgtgtctagctgcagctggccgagccgggctgagcacatccccttccgccatggcatctacttcagagaggtcacgagggggccattctaaggcgaacaaaccgattagctgtctggcgtacctgtctacagccgtaggatgtctggcctcgaatgcaccctcagcagccaaactgttggtccaactttgcacgcaaaacctgatctctgcagcaaccggggtgaacctcactactgtggatgactcaatccagaggaaatttttgccatcctttctgaggggcatcgccgaagaaaacaagctggttacctcgcccaatttcgtggtaacccaggctttggtcgcgctgctggcagataagggggccaagttgagacccaactacgacaagagtgaggtcgagaaaaagggccctctcgaattggcaaacgctcttgctgcctgctgcctttctagccgcctgagtagccagcatagacagtgggccgcccaacaattagtcagaacattagccgctcacgaccgggataatcagacaacattgcagactttagccgacatgggtggcgatttaaggaagtgtagcttcatcaagctggaggcccaccagaaccgggtgatgacttgtgtttggtgtaacaaaaagggcctcctggccactagtggtaacgatggaactatccgcgtgtggaacgtaactaaaaagcagtattccctgcagcagacttgcgtattcaatcgcctcgagggggacgctgaagagtctttggggtccccctccgatccaagtttctcaccggtgagctggtctatcagcggaaaatatttggctggtgctctggaaaaaatggtcaacatttggcaggtaaatggcggaaaagggcttgtagatattcagccccattgggtttccgctctcgcatggcccgaggaggggccagcaacagcctggtcaggcgaatccccggaactcctgctggttgggcgaatggacggatccctaggcctcatagaagtggtggatgtgtcgactatgcacagacgcgaactggaacattgctatcgcaaggacgtaagtgtaacatgcatagcctggttctcagaggaccggccctttgctgtggggtactttgatgggaaactcttactgggaaccaaagagcctctcgagaagggaggaattgtcttaattgatgctcacaaggacaccctgataagcatgaagtgggaccctactggccacattctcatgacgtgtgccaaggaggactcagtgaagttgtggggcagcatatctggttgctggtgttgtttgcacagcctgtgccacccctcgattgtgaacgggatagcgtggtgccgcctgcccgggaaagggtccaaactacaactcctcatggcaacagggtgccagagcgggttggtgtgcgtatggcgcattccacaagacacaacccagacaaatgtgaccagcgctgaaggctggtgggagcaggaatctaattgtcaagacggatataggaagtcgtctggtgccaaatgcgtgtatcaactcagaggtcatatcactcctgttaggactgtggccttcagctccgacggtctggctctggtgtcagggggtctgggcgggctcatgaacatttggagcttgcgcgatggcagtgtcctgcagacagttgtcatcggctcaggggctatacagaccactgtctggattccagaagttggcgtggctgcttgctctaaccgcagcaaagatgttcttgtcgtgaactgcactgctgaatgggccgcagctaaccacgtgttggccacttgccggactgcgctgaaacagcaaggagtgctgggactgaacatggctccatgtatgagggccttccttgaacggctgcccatgatgctgcaagaacagtacgcatacgagaagccacatgtggtgtgcggggaccagctcgtccatagcccctacatgcagtgcctcgcctccttggctgttggcctccaccttgaccagctgttgtgcaatccacctgtaccaccgcatcaccagaactgcctgcccgatcctgcaagttggaatcctaatgagtgggcatggctggagtgcttttcaaccaccattaaggcagctgaagccctgacaaatggtgctcagttcccggagtcatttactgtccccgacctagaaccggttccggaagacgaactggtttttttaatggataactctaagtggataaacggcatggacgagcaaattatgagttgggcgacgtctagacccgaggactggcatctcggaggcaagtgcgatgtgtacttgtggggagccgggcggcacggacaactagccgaagccggtcggaacgttatggtgcctgcggctgctccttcttttagccaggcccagcaggtcatctgtggccagaactgcaccttcgtgattcaggccaatgggactgttctggcttgcggagaaggttcctacggacgcctgggccagggaaactctgatgacttgcacgtcttgactgtgatttcagctctccagggcttcgtggtcacccagctggttacaagttgtggtagcgatggccactctatggccctgacggaatccggcgaggtctttagttggggagacggcgactatgggaagctcggccacggcaactccgatcgccagagaaggccacgtcaaatcgaggcactgcagggagaggaagtcgtgcagatgtcatgcggcttcaagcatagcgctgtggtgacgtcagatggcaagctgttcacttttggcaacggggattacggcaggcttgggctgggcaatactagcaataaaaagctgccagagagggtgaccgcactggaagggtatcagatagggcaggttgcctgcggcttgaaccacacactggccgtgtccgcagatggatccatggtgtgggctttcggggacggcgactacgggaaattgggcttagggaatagcaccgctaaaagcagcccccagaaaatcgatgtactgtgcggtattggcatcaagaaagtggcatgcgggactcaattttcagttgcattaacaaaagatggtcacgtctacaccttcggccaggacagactgattggcctcccggagggaagggccaggaatcataaccgaccacaacaaatccctgtgctggctggtgtgattatcgaggatgtcgcagtgggcgccgagcataccttagccctggcttcaaacggtgacgtctatgcatggggctccaactccgaagggcaactcggactggggcacacaaatcacgttcgtgagcccaccctagtaacgggacttcaaggcaaaaatgtccggcaaatcagcgcgggcagatgccattctgccgcctggaccgctccgcccgttccccccagggctcctggggtgtctgtgccactgcagctgggcctgccggacacagtgcccccgcagtacggcgcgctccgggaagtgtctatccatacggtgcgcgcgagactgcggctcctctatcacttcagcgatctgatgtattccagctggcgcttactgaatttatctccaaacaatcaaaattcaacgtcccattacaacgctggcacctgggggattgtccagggccagttacgccctctcctggctcctagagtgtataccctgccgatggttcgatcaattgggaagacaatggtgcagggcaagaattatgggccgcagatcaccgtgaaaagaatcagcacacggggtcggaagtgcaaaccaatctttgttcaaattgcacgccaagtggtgaagttaaatgcttcagatctaaggctccccagccgcgcttggaaagtgaagctggtaggggagggagcagatgacgctgggggcgttttcgatgatactatcactgaaatgtgccaggagctagagacaggcattgtagatctgctgatcccgagcccgaatgctacagccgaagtcggctataatcgggatcgcttcttattcaatccaagtgcttgtctggatgaacatttgatgcagtttaagtttctcggcatccttatgggggttgccattcggaccaagaagcctctggacttgcatctggcccccctcgtgtggaagcagctttgctgcgttcctttgaccttggaggacctggaagaggtcgatctgctttacgttcagactctgaattccatcctgcacatcgaggattccgggattactgaagagtcttttcacgaaatgatcccattggatagttttgtgggtcaatccgccgacggcaagatggtgcccatcatcccagggggaaattccattcccctcacattcagcaacagaaaggagtacgtggaaagggcaattgaatataggcttcatgagatggacaggcaggtggccgcagttcgcgaggggatgtcgtggatcgtcccggtgccacttctttcccttctgacggcaaaacagctggaacaaatggtgtgtggcatgcccgagatctcggtggaggttcttaagaaagtggtgagataccgcgaagttgatgagcagcaccaactcgttcagtggttttggcacacactcgaagagttcagcaatgaagagcgagtgctctttatgagatttgtgtccggtagatccagacttcctgcaaacaccgcagatatttcccaacggtttcagattatgaaggttgaccgcccctacgactctttgcctacatcccagacctgctttttccagcttcgattacctccttactcaagccagcttgtgatggcagaacgtctccgttatgcgatcaacaactgccgcagtattgatatggataactatatgctctcaaggaatgtggacaatgctgaagggtctgataccgactactag

SEQ ID NO: 16914 - DNA, 3633 bp, synthetic construct
  source 1..3633: mol_type = other DNA; note = Synthetic coding sequence
atggccagccaactgcaagtgttttctccacccagcgtttcgagctcagccttctgttcagctaagaagctgaaaattgagccgtccggctgggatgtgtccgggcagtctagcaacgataagtattacacccactcaaaaaccttgcctgctacccagggacaggcaaactcgagtcaccaggtggccaacttcaatatccctgcatatgatcaaggattattactaccagcccccgccgttgagcatatcgtcgtaacagcagcagattcatctggttctgctgcaacctcaacctttcagtctagtcaaacactgacccacagatctaacgtgtcactcctggagccataccagaaatgtggtctaaagaggaagtccgaagaggtggactcaaatggctccgtgcaaatcatcgaggagcatccaccattgatgttgcagaaccggaccgttgtcggcgctgccgctaccacaactacagtaaccaccaagtctagttctagcagcggagagggcgactaccagctggtgcagcacgagatcctgtgtagcatgacaaacagttatgaagtgctggagtttttgggcagaggcacattcggccaagtagccaaatgttggaagaggagcacaaaggagattgtcgctattaaaatcctgaaaaatcatccaagctatgctcgacaaggacagattgaggtgtccattctgagccgcctctcctccgaaaatgccgacgaatataattttgtgcggtcctacgagtgcttccagcacaaaaatcacacatgccttgtcttcgaaatgttagagcagaatctctacgacttcctcaagcagaataagtttagccctcttcccctgaagtatatacgacctattctgcagcaggtagccaccgctctgatgaagctgaagtcgttgggactgatacacgcagatttaaagccggagaacataatgctggttgatccggtgcgccagccatatagggtgaaagtgattgacttcggatccgccagtcatgtttctaaagccgtgtgtagtacctacctccagtcacgatactatcgcgcaccagagattattctggggctccctttttgtgaagctatcgatatgtggagccttggctgcgttatcgccgagctgtttctgggctggccactataccctggagcgagtgaatatgatcaaatacgttatatcagtcagacccaggggctgccagctgaatatctgctgagtgctgggaccaagacaactcggttttttaatcgggaccctaatctcgggtaccctttatggagactgaaaacgcccgaggagcatgagttggaaaccggaatcaagagtaaagaagccaggaagtacatttttaattgtttggacgatatggctcaggtcaacatgagcactgacttggaggggactgacatgcttgccgagaaggccgatcgcagggaatatatagacctgctgaagaaaatgctcacgatcgacgccgacaaaaggatcacccccttaaagactttgaatcaccaattcgtcaccatgactcacctgctagatttcccgcattctaatcacgttaagagctgtttccagaatatggaaatttgcaaacgccgtgttcacatgtatgacacagtctcacaaatcaaatcaccattcaccacccatgttgcccctaatacatcaacgaatctgacaatgtcttttagtaaccagctcaataccgtgcataaccaggcctccgtgctggcgagtagcagtaccgctgcagctgctacactgtccctcgcgaactctgacgtgtcccttcttaactatcaatccgctctgtacccatctagcgctgcccctgtgccaggagttgcccagcaaggggtgtcactgcaacccggaactacccaaatctgcacacagacagaccccttccagcagacgttcatcgtgtgtccgccagcgttccagaccggcctgcaagcaactactaaacactctggcttcccagtgaggatggacaacgcggtgccgattgtaccccaggctcccgctgcccagccacttcagattcagtcaggcgtcctcacacaggggagctgtacacctttaatggtcgcgacgctgcacccccaggtggcaacaatcacgcctcagtatgccgtgccctttaccctaagctgcgccgccggccggccagccctcgtcgaacagactgccgcagtcctccaggcttggccaggcggaactcagcagatccttttacctagcacatggcagcagctcccaggagtggctctgcataacagtgtgcaacctactgctatgattcctgaggccatgggatccggccagcagctagcagactggaggaacgctcattcccacgggaatcagtattcaacaatcatgcagcagccctccctcctcaccaaccatgtcactctggcaaccgctcagccgctgaacgttggcgttgctcatgtggtgcgccagcagcagtcctcgagcctcccatccaagaagaataagcaaagcgcccccgtgagctccaagtcttctctggacgtgctgccttctcaagtgtactcactcgtgggcagcagcccgttgagaactaccagcagttataatagcctggtgcctgtgcaggatcagcatcagccaatcatcatcccggacacgccatccccaccagtgtccgtgatcacaatcaggagcgacacagatgaagaggaggataataagtataaaccctctagctcagggttaaagccacgtagcaacgtgatttcttatgttaccgtcaacgactcccctgacagcgattcatccttgagctctccctatagcaccgataccctgtcagcccttcggggaaatagcggctctgtcctggagggcccaggccgggtggtggcagacggtacgggaacccggactattattgtccccccattaaaaacacagttgggcgactgtaccgtggctacacaggcctcaggtctgttgagcaacaaaaccaagccagtggcttcagtgtccggccagagctctgggtgctgcatcacacccaccgggtaccgcgcgcaacggggcggtaccagcgccgcacagccgctcaatttgtcccagaatcagcaaagcagcgccgccccaacatcacaggaaagatccagtaaccccgccccccggcgccagcaagctttcgtggcccctctgtcgcaggccccttacacctttcagcacgggtctccactgcactctacaggccacccccatctggctccggcccccgctcacctgccttctcaggcccacctgtatacctacgcagcacctacttccgcagcagcactggggagcacttcatccatcgcccacctgttctccccacaaggttcctcccgacatgccgctgcctatactacccatccttctacattggtacaccaggtacccgtctcagtggggcccagtctattgaccagcgcgagcgttgccccagcacagtatcagcatcaattcgctacacagtcctacatcggcagctcccggggcagcactatctacaccggctatcccctctcccccacaaagatctctcagtattcctatctttag

SEQ ID NO: 16915 - DNA, 579 bp, synthetic construct
  source 1..579: mol_type = other DNA; note = Synthetic coding sequence
atgggaaaagggtgtaaagttgtcgtttgcggattgcttagtgtcgggaaaacagccatactagagcagctcctgtacggaaatcataccatcggcatggaagattgtgaaacaatggaggatgtttacatggcctccgtagaaaccgaccgcggagtgaaggagcagctccacttatatgacacgcgcggcctacaggaaggtgtcgaactgcccaagcactatttttcctttgctgacgggttcgtgttagtgtactccgtcaacaatctcgaatctttccagagagttgagcttctaaagaaggagatcgataaattcaaggacaagaaagaagtggcaatagtggtactggggaataagattgatctcagcgagcagcgccaagttgacgctgaggtggcacagcagtgggccaagtctgagaaggttcgcctatgggaggtcaccgtgaccgaccgaaaaactttgatagagccattcaccctgttggcttcaaagttgagccagccacaaagcaagtcatcattcccattacccggcaggaagaataaaggaaattctaactccgaaaattag

SEQ ID NO: 16916 - DNA, 1803 bp, synthetic construct
  source 1..1803: mol_type = other DNA; note = Synthetic coding sequence
atggcaagcaatcacaaaagcagcgccgcgagaccagtgagcagagggggcgtgggccttaccggaagacccccttcaggaattcggcctctttccggaaatattcgtgtcgcaacagctatgcctccaggcactgccaggcccggaagccgcggatgtccaatcggcactggcggagtcttaagcagtcaaattaaggttgcccataggcccgttacccaacaaggacttactggcatgaaaaccggcactaagggccctcaaagacaaatacttgataagagctactaccttggtctgttacggtccaagatttcagagctaaccactgaagtgaataagctgcagaagggtatcgaaatgtacaaccaagagaacagcgtgtacctgtcatacgagaaacgcgcggagaccctggcagttgaaattaaagagctgcaggggcagttggcagactacaacatgctagttgacaaattgaacacaaatacagagatggaggaggtgatgaacgattacaacatgctgaaggcccaaaacgatagggaaacccaatccttagacgtgatctttactgaaaggcaggccaaagaaaagcagatcaggtccgtagaggaggaaatcgagcaggagaagcaggcaacagatgacatcatcaagaacatgagcttcgagaaccaagtgaagtacctagagatgaaaaccactaacgagaaactgctccaggagctggataccttacaacagcagttggacagccagaacatgaaaaaggaaagcctggaagctgagatcgcccactcccaggtgaaacaagaggctgtattactgcacgagaaactgtatgaattagagagtcatcgggaccagatgattgcagaagacaagtccataggaagtcccatggaagaaagggaaaaactactgaagcagattaaggacgataaccaggaaatcgctagtatggagagacagctgaccgataccaaagagaaaattaaccagtttatagaggagattaggcagctggacatggatttggaggagcatcagggggagatgaatcagaagtacaaagagctcaagaagagagaagaacacatggacacttttatagagaccttcgaggagacaaagaatcaagaactgaagaggaaagcccagatcgaggccaatatcgtggccctccttgaacactgctccaggaatattaaccgtatagagcaaatctcgtccattactaatcaggagttaaagatgatgcaggacgacttgaactttaagagcacagaagtccagaagtcccagagcacagctcaaaatctcacaagtgacattcagcgtctgcagctcgacttgcaaaaaatggaactgctcgagtctaaaatgacggaagagcagcactctttgaaatctaagattaagcagatgaccaccgaccttgaaatttacaatgatctgccggcccttaaaagctcaggcgaggaaaagattaagaaactccatcaggagagaatgatcctgtccactcacaggaatgccttcaagaaaatcatggaaaaacagaacattgagtatgaggccctaaaaacacagctgcaagagaatgaaacacattcacagctgaccaatctggaacgaaagtggcagcacctcgaacaaaataacttcgccatgaaagagttcatcgcaactaaatcccaagagagtgattatcaaccgattaagaaaaacgtgaccaagcagatcgcggagtataataaaacaatcgtcgatgcgcttcactcaacaagtggaaattag

SEQ ID NO: 16917 - DNA, 1197 bp, synthetic construct
  source 1..1197: mol_type = other DNA; note = Synthetic coding sequence
atgttaagaaggaaaccaagcaacgcctccgagaaggaattcaatctggacgacaatattccagaggatgactctggcgtccctactcccgaagacgccggtaagtccggcaagaagttagggaagaagtggagagccgtgatctcccgaacaatgaataggaagatgggaaagatgatggtcaaagcactcagtgaagaaatggccgacacactagaagagggctctgcatctccaacgagcccagattactccctcgactcacccggcccagaaaagatggccctcgcatttagcgaacaggaggaacacgaactgcccgtgctttctagacaggccagcactggaagcgaattgtgttctccttctccagggagtggcagctttggagaggagcccccagctccgcagtataccgggcctttttgtgggagggccagagtccatacagacttcacaccttctccttacgatcatgattccttaaagctccaggtgcgcagtgctagtggactgttgtggagcctcgcaggctgcgctcagaagggttcttggacagagcctggctacgattccgtgagcggcggtcaggggccaccatatcctctcagcctcgcaccattcagctcccccctcccacagcagaagggtgatgttattcagatcattgagaagcctcccgtgggcacctggctcggattgctgaatggaaaggtgggctcatttaaatttatttacgttgatgtccttccagaggaggccgtaggtcacgcgcgccctagccgacgccaatctaaaggaaagaggccaaaacctaagactttgcacgagctcctcgagcgaattggtctggaggagcacactagcaccctcttactcaacgggtaccaaacattggaagatttcaaggagttgagagagacgcatctgaatgaactcaacattatggatcctcagcatcgcgccaagctgctgaccgctgctgagctcctgttggattacgatacagggagtgaggaggcagaagagggggctgaatctagtcaggagcctgtagcccacaccgtatccgagcccaaagtggacatccccagggattccggatgctttgagggttcagaatccggccgtgacgacgctgagctggctggtaccgaagagcagctgcaaggcctgtccctagccggtgccccttag

SEQ ID NO: 16918 - DNA, 1002 bp, synthetic construct
  source 1..1002: mol_type = other DNA; note = Synthetic coding sequence
atgggcacacggaaaaaggtgcacgcctttgtgcgcgttaaacctaccgatgatttcgcacacgaaatgattcgctacggcgacgacaaaaggtccattgatattcatttgaagaaagatatccgccgcggggtagtcaacaatcagcagactgactggtccttcaaactggacggagttctgcatgacgctagtcaggacttagtttacgaaactgtagccaaggacgtggtcagccaggctcttgacggctacaatggcactattatgtgctacggccagaccggcgccggcaaaacatataccatgatgggggccacagagaactacaagcaccgcggaatattgcctcgggccttgcagcaggtttttcgaatgatcgaagaacgacccacccacgcgattactgtccgagtttcctatttggagatatataatgaatccctgtttgatctgttaagtaccttgccatacgtgggaccctcggttacccccatgacaattgttgaaaacccacagggcgtatttataaaggggttatctgtgcacctgacaagtcaggaagaggatgccttctctctgttatttgaaggcgaaaccaaccgcatcatcgcgagccacaccatgaataaaaattcctcaaggagccattgcatctttaccatttacctggaagcccacagcagaaccttgtcagaagagaagtatataaccagtaaaatcaatctggtggatctcgcaggttccgaacggctgggcaagtcgggatccgaggggcaggttctcaaggaggccacttatattaataagtccctgagttttctggagcaggccatcattgccctgggggatcagaagagagatcatataccatttcgtcagtgtaaattgacacacgctttgaaagactcactggggggcaattgtaacatggtccttgttaccaatatctatggggaagccgctcagttagaggagaccggtagcagactgtggctgtag

SEQ ID NO: 16919 - DNA, 1248 bp, synthetic construct
  source 1..1248: mol_type = other DNA; note = Synthetic coding sequence
atgatgctgggacctgaaggtggcgaaggtttcgtggtgaagctccgtgggctgccgtggagctgcagcgtagaagatgtacagaacttcctgtctgattgcaccattcacgatggagcagcaggtgtccactttatttacacgcgtgagggccgccagagtggggaggcattcgtcgagctgggcagcgaggatgacgtgaaaatggcactcaaaaaagatcgggagagcatgggccacagatacatagaggtctttaaatctcatcggaccgagatggattgggtgctgaagcactccggaccgaattcagctgattccgcaaacgacggctttgtacgcctgagggggctgcccttcggctgtaccaaagaggaaatcgtgcaattcttctcaggtctggaaatcgtgccgaacggcattactctgccggtggatcccgaaggcaagattacaggcgaggcgtttgtccagttcgcctcacaagagttagctgaaaaggcactgggcaagcacaaggaacgtatcggacacagatatattgaagtcttcaagtcttcccaggaagaggtccggagctatagcgacccccccttgaagtttatgtccgtgcagagacccgggccctacgataggccgggcacagcgcgacgatacatcggcatagtgaagcaggccggtttggaacggatgaggcctggcgcctacagtacaggctatggggggtacgaggaatactcaggcttatcagacggctacggttttacgactgatctgttcggcagagatctgtcatactgcttgtcaggcatgtacgaccatcggtacggagactcagaattcacggttcagtccacgacagggcactgtgtgcatatgcggggactcccatataaggccaccgagaatgacatctacaactttttcagtcccctgaaccctgtgagagtacacattgagatcgggcccgacggcagggtgactggagaggccgatgtggagtttgcaactcacgaagaggctgttgccgcgatgtcgaaggaccgggccaacatgcaacacaggtacattgagcttttcctgaattctacaactggcgcctcgaacggtgcatacagtagccaggtgatgcagggaatgggcgtgtctgccgcgcaggccacttacagcggtctggaaagtcagtcagtgtctggctgttacggcgccggctactctggccaaaacagcatggggggatacgactag

SEQ ID NO: 16920 - DNA, 3108 bp, synthetic construct
  source 1..3108: mol_type = other DNA; note = Synthetic coding sequence
atgagcgaacaggaaaggatacaggaatgtctccgcaaagaaattagaagtttgctgatctccaccaaggacggattgtctccacaggagctcgagaaggagtatctgctgatggtgggcaaccatttgcccctgcggatcctcggatatagaagcactatggaactagtcctggacatgcccgacgtcgtcagggtatgtcccggcgctggtggaactgtgatcctgaaggctattccggatgagtcaaccaagggaatagccagtctggtggctaagcaacgtagtagccacaaactaaggaactcaatgcacaagggcaggccttccatctatagtggccccaggagtcatcgccgggtgccttatagaggccgagttgcccccatattgcctgcggtggtgaagagcgagctcaaggacctgctggccctgtctcccgtactgctcagcgactttgaaaaagctttcgccaagagatttgggcgaagtttccagtatatgcagtacggcttcttaagcatgttcgaagtgcttaatgccgcatcagatgtgattagcgtggaacaaacaagagccggttccttgctgatgttaaagaaaagcgtgaccgaagaaaagccgcgtggatgtcccgctgggaaaatattcactcaaccgttccgaatgaagcaaggcagctactcaacaggcttcccagtggctaaaccatgctttagccagcccacttccaacatggaaccaccaaagcaaattatgtcgatggaaaaaacctccaagctgaatgtggtggagacttcacggcttaatcatacggagaagctcaaccagctggaaaacactttcaagtcagtgatcgcacagataggaccgggtggtacgatttcctccgaactcaagcataaaatcaagtttgtcgtgtctaagttcccagaagggctcttcatctccaagctgctgggcgagtatgaagtaatctttaaggagcagctttcaccgaagaagcttggcttcctgaacgtcaccgagctcgttggtgcactgtccgacatccttcatgtggaatttaggaaagggcaccaggacctgttggttttcgacgccgacaaaaaaccattgccaccggtgcagagcgacaagaagatcgaggccaaagcctgtgtgagttccccccctagaaacagtctgtccacagccgccgtgaaagagacagtctggaactgccccagcaagaaacagaaagagccacagcagaagatttgcaaaaagcccaatcttgtcgtcaagccccttcagcttcaagtggagactaataagagcgaactcaatctagccatggctaaccatgacattcccccagacgccgttccaaacaaaaagttgtgccgtcttccgcccctggatacgtcgtctctaatcggggtctttgtcgaatatataatctcccccagccaattttacatccgcatctattcgcgggactcaagcgaattgctggaagatatgatgattgagatgcggaggtgttatagcaaccagctggtgtccgatcgctacgtcatgcctgagtgctttatacaacccggccatctgtgctgcgtaagaatcagcgaggacaagtggtggtaccgtgtgatcattcaccgggtattagagaagcaggaagttgaggtgttttatccagacttcggtaacataggcatcgtgcagaaatcatccttacgcttcctgaagtgctgttataccaagctccctgcccaggctattccttgttcactcgcctgggtgcgcccagtggaagagcactggacctctaaggccattttgcagtttcagaaactgtgtgggcttaagcctctggtgggggtggtggatgaatacgttgacggaatcctcaatattttcctatgcgatacctctagcaatgaggatgtgtatttccaccatgtgctccgcacagaaggccacgccatagtctgcagggagaatatctcatccaagggcttctcggagctgaacccgctggccctttatacgacttcatctggcggacccgaggacatcgtgctcactgagcttggctaccccagccagcagcattacttcaatgaggatcggaagatttccccccaatccaaagagagtgagttacggatcctgcaggatattaacgacgaaaagagcttgagccatctgaagtctgaaagcaaggaaccattgaaggactctgaatttgagtcactaaagacttgcaataaaagctttgaggaggatcctaaatggtctaatcccgagcctaacgatctgaaggaggaaaacgaggatgaaatcccaactggcatgccatgtttagaatctgttactataggagacgacatatgggacgaaaactggcttccactgcaagcaaaaatgggaaagggcggcgacgccgcttcgcatttgtttacagccagcctcggggggaagaatcagtactcttcttgcaaagagatgccccaaaaagactggtgcttttccactcccaaggatacatgggacgactcttggcagccctcaggtctggttaacggaactaaagtcgaagtgcacaagccagaggtgttaggagctcaagagaaaaatactggcactaaccggactcagaaacagttggatatcaacggttcttccgattcttctacattgccgaagctggaagaattttgcacttctctgacacaaagcgagcagagcgccgacggatctcagtccgagcccaacaatagccagacgcagccgaaacagattcagctcagtactgccgccccatgctccactactgccgttgatgactctgccgagaagccgagcggttccgtcgagtcaagcccagagatcctgaaaaacgaggacttttcctcatcaagggctataactctgtataaagataagcggcaagagtcagtggaccagttgtcactgatcctgtcttacgaatgccaaatctctcagaagctatacatcccccggagcactgccacagccgctctcggggctgctgctcggctagccacctctcggagcctgctgcattggtatccgtcagtaaaaagaatggaagcttag

SEQ ID NO: 16921 - DNA, 660 bp, synthetic construct
  source 1..660: mol_type = other DNA; note = Synthetic coding sequence
atgggaggcgcccagctggagttgccttctggcgctcgcccaggagtttgcgtgaggcggtcttttcgggctcacgcgggggatcagcctcggaggccacccggtccaatccccgtgccggggactatgaaacaggagtcagccgctccaaatacccccccaacatcacaatctcccacaccctcggctcaattcccccgcaacgacggagacccgcaggctctgtggatttttggctacggctccctagtgtggagaccagatttcgcctattccgattccagagtcgggtttgtgagggggtatagccgccgtttctggcaaggcgatacctttcataggggctccgataagatgcctgggcgggtggttaccctcctggaagaccatgaagggtgcacttggggagtggcataccaagttcagggcgaacagaatccggggtacttggggcctgcacctgaggaagcgatagccacccagatcctcgcatgccgcggatttagtggccataacctagaataccttttgagactggccgactttatgcaactctgcgggccccaggcccaggacgaacacctggccgcaatcgtggacgcagtgggaacaatgctaccttgtttttgtcctacagaacaggctctggccttagtgtag

SEQ ID NO: 16922 - DNA, 2382 bp, synthetic construct
  source 1..2382: mol_type = other DNA; note = Synthetic coding sequence
atgagcgaacagggtgatctcaaccaggccatcgctgaggaagggggaacagagcaggaaactgccacgcctgaaaatgggatcgttaagagtgaatccctggacgaggaggagaagttagagctccagaggaggctcgaagctcagaaccaggaacggagaaaatctaagtccggggctggcaagggaaaactgacccgcagcttggctgtctgtgaggaaagttcagccaggcccggaggcgaaagccttcaggaccaggagtccatccatctgcagttatcatctttctcatcattgcaggaggaggacaagagccggaaggacgattcagaacgcgagaaagagaaggacaaaaacaaggataagaccagcgagaagccaaagatcagaatgctgagcaaggactgtagccaggagtataccgatagtactggtatagacctgcatgagttcctgatcaatactttgaagaataactctagagaccgcatgattctgctgaagatggagcaagagatcatcgactttatcgctgataataataatcattataagaaattccctcagatgtcgtcgtaccaaaggatgctcgtgcaccgcgtcgccgcttattttgggctggatcacaacgtggatcagactgggaagtcagtcatcattaacaaaacctcctctacccggatccctgaacagaggttttgcgaacatctgaaggatgagaaaggcgaggaatcacagaagcgcttcatcctgaaaagggataacagttcaattgataaggaagacaatcaaagcgtatgcagtcaagagagtttgtttgtagagaatcgtggcaatcgagacgggagcggacgaactagtggatctcgccaatcttcaagcgagaacgagttgaagtggtcagatcaccagagagcctggagctctaccgatagcgacagttcaaacagaaatcttaagcccgccatgacgaaaaccgcttctttcggggggataactgtgttgacccggggggatagtacgtccagcactcgctccactgggaaactctcaaaggccggctctgagagtagctcatctgccggttcgagcggctccctgtctaggactcatcccccacttcaatccacacccctcgtgagtggtgtcgctgctggctcccccggctgcgtgccgtatccggaaaatgggatcggcggacaggtcgcaccctccagcaccagctacattctgctgcccctcgaagctgctacggggattccgccgggctccatcctactgaacccccacactgggcagcccttcgtgaaccccgacggaacacctgctatctacaacccccctacctctcagcaacccctgcggtccgccatggttggacagtcccagcagcagcctccccagcagcagccctccccgcagcctcagcagcaggtgcaaccgccccagccccagatggcgggtccccttgttactcagagtgttcagggcctgcaggcctcttcccagagtgtgcaatatcctgcagtgagctttccgccacaacatctgttgcccgtctcaccaactcagcattttccaatgcgggatgacgtcgcaacacaattcggacagatgacgttgtcacgccagtcatccggggagactcctgagcctcctagtgggccagtatatccgagtagtctcatgccacaacctgctcaacagcccagttatgtgatcgctagtacaggccagcagctgccaacggggggattttctggaagcggcccacccatatctcaacaggtactgcagccccctccatcgccccagggcttcgttcagcaaccccccccagctcagatgcccgtttattactatcccagtggtcagtaccccacctctactacccagcagtataggcctatggctcctgtgcaatacaatgcccagaggtcacagcagatgccgcaggcagctcagcaagccggctatcagccggttcttagcggccagcaaggcttccagggtctgatcggtgtacagcaaccccctcaatcccagaacgtcattaataaccagcagggaactcctgttcagtccgtgatggtgtcttatcctacaatgagttcttaccaggtgccgatgacccagggttcccagggcctgccccaacaaagctaccagcagcccattatgctcccgaatcaggccggtcaggggagcttaccagcaactggcatgccagtttactgcaatgttacaccccccacacctcagaataacctgcggctaatcgggcctcactgtccttctagcactgttccagtgatgtccgcctcttgccgcactaattgcgcttctatgtcgaatgctgggtggcaggtcaaattctag

SEQ ID NO: 16923 - DNA, 1842 bp, synthetic construct
  source 1..1842: mol_type = other DNA; note = Synthetic coding sequence
atggccacaatccccgactggaaattgcagctgttggcccggagacggcaggaggaggctagcgtccgtggcagagagaaggcagaaagggagaggctgtctcaaatgcctgcgtggaagcgcggcctgctggaacggcgaagggcgaagttggggttatcacccggagagcccagccctgttcttggcacggtggaagcaggaccaccagatcccgacgagagtgccgtactcctagaggcaataggtcccgtgcatcagaatagatttataaggcaggaacgccagcaacagcagcagcagcagcaacgttctgaagagctgctggccgagcgcaagcctggacctctcgaggcccgtgagcgtagaccatccccaggagaaatgcgcgaccaatcaccgaagggcagggaatcacgcgaggagcggcttagcccgcgcgaaacacgcgagagacggctgggcattggaggtgcccaggagctttctctccgcccactcgaggcaagggattggaggcagtcacccggggaggtgggtgaccggtcgagtcgcctctctgaggcttggaagtggcgcctttcccctggcgaaacaccagagcggtcactccggttggcagagtcacgtgagcaatccccacgccggaaggaggtggaatcacggctgagtccaggggagtctgcatatcagaagctcggactgaccgaggcccataaatggcgacccgattcccgcgagagtcaggaacagtctctagttcagcttgaggcgacggaatggcgtttgagatctggggaggaacggcaagactattccgaggagtgcggacgaaaggaggagtggccggtgccgggcgtggcaccaaaagagaccgcagagctgtctgagacactcaccagagaggcccaggggaacagcagcgccggcgtggaggccgcagaacagaggcctgtggaggacggagaaagaggcatgaaaccaacggagggatggaagtggaccctcaattccggaaaggcacgcgagtggaccccccgggatattgaggcacagactcagaagcctgagccacctgagtctgccgaaaagctgttggagtcccccggcgtcgaggccggggagggcgaagccgaaaaagaggaagccggggcacaggggcgtcctctaagggcgctgcaaaactgctgctccgtgccaagccccctgccgccagaagacgcagggaccgggggcctgcgacagcaggaagaggaagctgtggagctgcagccacctcccccagccccgctgagccccccccctcctgctcccaccgctccgcagcctcctggcgaccctctcatgtcgagacttttttatggggtgaaagccggcccaggagtaggcgctccacgccggagcgggcacaccttcaccgttaatcctcggcggagcgtacctcccgccaccccagcaacacccacaagtcctgcgaccgtcgacgccgctgtgcccggtgcgggaaaaaaaaggtaccctaccgccgaagagatcctggttcttggggggtatctgcgtctgtcacggtcctgtctggccaaaggctcccctgagagacaccataagcagctgaaaatcagcttctccgagaccgccttagaaaccacttatcagtatccatcggagagctctgtactagaggagctgggtccagagccagaggtgcccagcgctcccaacccgcccgcagctcagcctgatgacgaggaggacgaggaggagctgctcctgctccagcctgaactccagggcggattacggactaaagctctgatcgtggatgaatcatgtagaaggtag

SEQ ID NO: 16924 - DNA, 582 bp, synthetic construct
  source 1..582: mol_type = other DNA; note = Synthetic coding sequence
atggcccgcgcaggccctcggttggtgctcagcgaggaagcagtaagggctaagagtggactgggtccacatcgggacctggccgagttgcagagcttgagtatccctggcacttaccaggagaaaatcacccacttaggccactcactgatgagcctgaccggactaaagagtctcgatctgtccagaaatagcctggtgtctctggaaggcatccagtatttgactgctttagaatcattaaacttgtattacaactgcatcagctctcttgccgaggtgttccgcctccatgcactgactgaactcgtggatgttgacttccgtctcaaccccgtggtgaaggtggagcccgactatagactgttcgtcgtgcacctgctgccgaaactgcagcagttggatgatagacccgttcgagccagtgaacgcaaagcaagcagattgcatttcgcctctgaagacagtctggacagtaaggagtccgtgcctgctagcctgaaggaggggaggattcaaacgagcgtggaacccgcggtggggacagtgcccgtttggggcttgtgggaggctggaccatag

SEQ ID NO: 16925 - DNA, 177 bp, synthetic construct
  source 1..177: mol_type = other DNA; note = Synthetic coding sequence
atgtattttaactacaaatctgtgtgcggctcgtgcggctttggctcatgctacgggtgtggatatgggtgtattcactccacccactgtggttgcaatgggtattacggctgctacgaaaataaatattctgtgattgacgatctcattttcttcgcctcaaagaagtgccactag

SEQ ID NO: 16926 - DNA, 585 bp, synthetic construct
  source 1..585: mol_type = other DNA; note = Synthetic coding sequence
atgaatggacgcgccgactttcgggaacccaacgctgaggtgccccggccaatcccacacattggaccagattacatccctaccgaagaagaaagaagagtttttgccgagtgcaatgatgaatccttttggtttcggagcgtgccgctggcggctaccagcatgctgattacacagggcctcatatccaaaggcatcctgtcatcacacccaaaatacgggtccattcctaagctcatcctggcctgcatcatggggtattttgccggcaagctgtcctatgtaaagacctgtcaggagaagtttaaaaagctagagaactcaccgctgggggaggctctacgcagtggacaggcacgcagatcatcacctcccggccactactaccagaaatcaaagtacgattcaagtgtgtccggacaatcctcctttgtgacctcgcctgcggccgataacatcgaaatgctgcctcactatgagcccattccgttctcctcaagtatgaatgaatcagcccccaccggcatcaccgatcacatcgtgcaggtgaaagttaacaaatacggggatacctgggacgaatag

SEQ ID NO: 16927 - DNA, 2421 bp, synthetic construct
  source 1..2421: mol_type = other DNA; note = Synthetic coding sequence
atgtcgtcctctcccgttaatgtaaaaaaattaaaagtatcagaactaaaagaagaactgaagaaaagaaggttgtcagataagggtctaaaagcagagttgatggagaggctgcaggccgcgttggatgatgaagaagctgggggcaggcccgccatggagccagggaatggctccctggatttgggcggcgattcggccggtaggagcggcgctgggctggaacaggaggccgcagcaggcggcgacgaagaggaggaggaggaggaggaagaagaagagggtattagcgccttggatggagaccaaatggagttgggggaagaaaatggggctgcaggcgctgcagactctggacctatggaggaggaggaagccgcgtcagaggatgaaaatggcgatgaccaagggttccaagagggagaggatgagctcggcgacgaggaagaaggggcaggcgacgaaaatggccatggggagcagcagccccaaccccccgcaacccagcagcaacaacctcaacagcagagaggtgcggcaaaagaggccgcagggaaaagcagtggtcctaccagcctctttgccgtcactgtcgccccgcccggggcccgccagggccagcagcaagcaggtggcgacggcaaaacagagcaaaaaggcggcgacaagaaacgcggcgttaaacgaccccgggaggaccacggccgagggtatttcgagtacatcgaagaaaataaatatagccgggccaagagtccccagccaccggtggaagaagaggacgagcacttcgacgataccgtggtgtgtctggatacttataactgcgacttacactttaaaatctctagggaccggctgagcgcctcatccctgaccatggagtctttcgcattcttatgggctggcggtcgggcttcctatggtgtgtccaagggaaaggtttgttttgagatgaaagtgacggaaaaaattccagtgcggcatttgtatacaaaggacatcgacatccatgaggttcgtattggctggagtctaacaacttcaggcatgttgttaggagaagaggaattctcttacgggtattcattgaagggtataaagacctgtaattgcgaaaccgaagactacggcgagaaatttgacgagaacgatgtaatcacgtgtttcgctaatttcgagtcggacgaggttgagcttagctacgccaagaatggacaggatttaggagtcgcctttaaaatttcaaaagaagtgctagccgggcgtcccctgttcccccatgttctctgtcataactgtgctgtggaattcaactttggacagaaggagaagccatatttccccatccccgaggagtatactttcattcagaacgtccccctggaggatagggtccgtggcccgaagggtccagaggagaagaaggattgcgaagtggtgatgatgattggcctgccaggtgccggcaaaacaacatgggttacgaagcacgccgcagagaatcccggaaagtacaatatactggggacaaacacaatcatggacaagatgatggtcgctgggttcaagaagcagatggccgacaccgggaagttaaatactctgctgcaacgcgcaccacaatgtctcggaaagtttattgaaattgctgcaagaaaaaagcgtaatttcatactggatcaaaccaacgtatcagctgctgctcagcgccgaaaaatgtgcttgtttgctgggtttcaacgtaaagcagtggtagtgtgcccgaaggatgaggactacaaacaacgaacccagaaaaaagccgaagtcgagggcaaagacttgcccgagcatgccgtcctgaagatgaagggaaactttacactgcccgaagtagcagaatgctttgatgaaattacctatgttgaactccagaaagaggaagctcagaaactactggaacaatacaaagaggagtctaagaaagcgttgcccccagaaaagaagcaaaatacagggtctaaaaagtcaaacaagaataagagcgggaaaaaccagttcaaccgaggaggtgggcatcgtggccgaggcgggtttaatatgcggggaggtaatttcaggggaggcgctcccggaaatagggggggctacaacagacgagggaatatgcctcagcgggggggagggggtggcggctcaggaggaatcgggtacccatacccacgtgctcccgtattccccgggcgcggatcgtattccaatcgggggaactacaatagaggcggaatgccgaataggggtaactacaaccagaactttcgcggaaggggcaataaccggggttataaaaatcaaagccagggctataatcaatggcagcagggccagttttggggccaaaaaccgtggtcacagcattatcaccagggttactattag

SEQ ID NO: 16928 - DNA, 651 bp, synthetic construct
  source 1..651: mol_type = other DNA; note = Synthetic coding sequence
atgagcacagtggacttggcacgtgtcggagcctgcatactcaagcacgccgtgacaggggaagcggtggagctgagatcactctggcgcgaacatgcctgtgttgtagctgggttacgaaggtttgggtgcgtggtgtgtaggtggattgcccaagacctttcaagtctggcaggcctgttggatcagcacggggttcgccttgtgggcgtcgggccagaggcgctggggctgcaggagtttttagacggtgactatttcgcgggagagttgtacctggatgagtctaaacaactatacaaagaattggggtttaaaagactttggactcaggccagtcccgaatttggtcaggccacgtggtgcctaaggcgttacaacagcctctccattttacctgccgccctcggaaagccggtgcgggacgtggcggcaaaagcgaaagcagtgggtattcaggggaacctgtccggagacctcctgcagtccgggggcctgcttgtggtttccaagggaggagataaagtcctccttcattttgtacagaagtcacctggagactacgtgccgaaagagcacattctgcaagttctgggtataagtgcagaggtgtgtgcctctgacccgccccagtgtgatagagaagtgtag

SEQ ID NO: 16929 - DNA, 1191 bp, synthetic construct
  source 1..1191: mol_type = other DNA; note = Synthetic coding sequence
atgttctggaagttcgacctgcatacatcctctcacctagataccctcctagagcgcgaggacctgtctcttcccgagctgctggacgaagaggacgtgttgcaggagtgcaaggtggtaaaccgaaagctgctggattttctgctccagcctccgcatctgcaggccatggttgcctgggtaacccaggagccgcctgattcaggagaagagagattgcgctacaaatacccgtccgttgcttgtgagattttgacgtccgacgtcccacagatcaatgatgctttgggagcagacgagagcttgcttaacagactctacgggttcctgcagtccaccggctccttgaatccactgcttgcctccttcttctcaaaggtcatgggcatcctgatcaaccggaagacagaccagctggttagcttcctacgcaagaaggatgactttgtagacttgctattgcagcacattggcactagcgctataatggacctcctgctacggctcctgacatgtgtggaaagaccacagttgaggcaggatgtggtgaattggttaaatgaggagaagattgtacagcgcctgattgaacagatacatcctagtaaagatgaaaatcagcattccaacgccagccagtcgctatgtgacatcattcgtctgtctcgagagcagatgatacaagtgcaggattcgcccgtgcctacagacgccccgacgtcaccacgtgtctcgggagaggaggagctccatacaggacctcctgccccccagggacccttgagcgtgcctcagggacttcccactcaatctctggcatctccaccggcccgtgatgcactgcagttaagaagtcaggatccgacaccgcccagtgcaccccaggaggccactgaggggtctaaggtgaccgagccctctgccccctgccaggcccttgtgtccattggtgatcttcaggccaccttccatggcatcagatcagcgccttcgtcaagtgacagcgcgactcgcgatccgagtacttcagtgccggcttccggcgcccatcaaccaccacagacgactgaaggggaaaagagtccagaacccctggggcttccacagagccaaagcgcgcaagcacttacccctcctccaattcccaacggctcagcccccgaaggccctgcttcacctggtagtcaatag

SEQ ID NO: 16930 - DNA, 2178 bp, synthetic construct
  source 1..2178: mol_type = other DNA; note = Synthetic coding sequence
atgggcactcggaaaaaggtgcacgcattcgtgagagtcaaacctaccgacgattttgctcatgagatgattaggtacggtgacgacaagagatcaatcgatatacatctgaagaaagacataaggcggggagtcgtaaataatcaacagaccgattggagctttaagcttgacggggtgcttcatgacgcgtcccaagacttggtttacgaaaccgtcgccaaggacgtcgtgtcacaggcactggatggttacaacggaaccatcatgtgttatggacagacaggggccggaaagacctatacaatgatgggagcaactgaaaattacaaacatcgaggaattctgcctcgcgcgctacagcaggtcttcagaatgatagaagagcgtcctacccacgcgatcaccgtcagagtgtcctacttggaaatctataacgagtctctctttgacctgctgtccacgttgccatacgtggggcccagcgtgacccccatgacaatcgttgagaatccccagggtgtgttcatcaaagggctgagcgtgcacctcacttcccaggaagaagatgcgtttagtcttcttttcgaaggagagaccaaccggataatcgctagccataccatgaataaaaacagctcccgctcccattgtatttttacaatctacttggaggcacactccaggactctaagtgaggagaagtatattacctcaaagatcaacctcgtagacctggccgggagtgaacggttgggcaaaagcggatcagaggggcaagtgctgaaggaagcaacttatatcaataaatctctgtcttttctagaacaagctattatcgccctgggggatcagaagagggatcatattccttttcgtcagtgtaaactgacccacgccctgaaagactcgcttggggggaattgtaatatggtgctcgtgacgaatatttatggagaggcagcccagctggaggagacgttgtcgagcctgcggttcgcaagcagaatgaaactggtgacgacagaacccgcaattaacgagaagtacgatgcagagaggatggtcaaaaatctggagaaagagctggcactgttaaagcaagaattggctattcatgatagtctgacaaaccgaacctttgtgacttatgatcctatggatgagattcaaatcgctgagatcaattcacaggtgagaagatacttggagggcactctcgatgagattgatatcatttcattgcggcagatcaaagaggtcttcaaccaattccgagtcgtcctgtcccagcaggaacaggaagtggagtccactttaaggcggaaatatacacttatagaccgtaacgatttcgcagccatcagcgcgatccaaaaggccgggctggtggatgtggacgggcacttagtgggcgagccagaaggccagaactttggactgggcgtggcgccattttccaccaagccaggcaagaaggcgaaaagcaaaaagacgtttaaggagccactgaggccagacacccctcctagcaagcccgtggcctttgaggaattcaaaaacgagcaggggtctgaaattaatagaatctttaaagagaataagagcatactgaacgaaagaaggaaacgggcctccgaaaccactcaacacattaacgctattaaaagagaaattgacgtgacaaaggaggccctcaacttccagaagtctctgcgggagaaacaaggtaagtacgagaataagggcctcatgattatcgacgaagaagagtttttactaattctgaagctcaaagacctgaaaaagcagtacaggagcgaatatcaggatctccgggacttgcgggcagagattcaatactgtcaacatctcgtagaccaatgtcgacatagactactcatggagttcgacatctggtacaacgagtcttttgttattcccgaagatatgcagatggccctgaaaccaggcggatccatccgaccaggcatggtcccagtcaacagaatcgtgtcacttggtgaggacgaccaagataagtttagccaactccagcagcgggtgcttcctgaggggcctgacagtatcagcttctacaatgcgaaagttaaaatcgagcaaaagcataattatttgaagaccatgatgggactccagcaagcccaccgaaagtag

SEQ ID NO: 16931 - DNA, 282 bp, synthetic construct
  source 1..282: mol_type = other DNA; note = Synthetic coding sequence
atggctgccgccaccggtgaccccggactgagcaagctccaattcgcgccattcagtagtgcactcgacgtgggattctggcacgaactgacgcagaagaagctgaacgagtacagactggatgaagcccccaaggacatcaaaggctattattataatggggattccgccggattaccagctcgcctcactctggagttctctgcattcgatatgagtgcacctactcctgcgcgctgctgccctgccattggaaccctatacaatacgaacactctgtag

SEQ ID NO: 16932 - DNA, 333 bp, synthetic construct
  source 1..333: mol_type = other DNA; note = Synthetic coding sequence
atgggtaaaaaacagaacaaaaagaaggtcgaagaagtgctcgaagaggaagaagaggagtacgtggtcgaaaaggtgttagatcgccgcgtggtcaagggcaaggtggagtatctgctcaagtggaaaggtttcagcgacgaggacaatacttgggaaccagaagagaatttggactgtcctgacctgatcgctgaattcttgcaatctcagaagactgcccacgagaccgataagagcgaaggtgggaaacggaaagccgatagcgactccgaagataagggcgaggagagcaagcccaagaaaaaaaaggaggagtccgagaagccatag

SEQ ID NO: 16933 - DNA, 270 bp, synthetic construct
  source 1..270: mol_type = other DNA; note = Synthetic coding sequence
atgtcctactatcaacggcctttttctcccagtgcgtactcattgccagccagccttaactcctctattgttatgcagcacggaacctctctggactcaacagacacctacccccaacacgctcagtcactggacgggactactagctcttcaattccactgtacaggtcttctgaggaggaaaagagagtgacagtcatcaaggccccgcattacccggggattggccctgtcgacgaaagcggtattcctactgctattagaacctag

SEQ ID NO: 16934 - DNA, 1269 bp, synthetic construct
  source 1..1269: mol_type = other DNA; note = Synthetic coding sequence
atggagagaaaggactttgagacctggcttgataacatctccgttacttttctcagtttgaccgacttgcaaaagaacgagactcttgaccacctgatctccttgtcgggtgccgtgcagttaaggcacctatcaaataacctggagacactcttgaagagggatttcctcaaacttctaccattggagttgtctttttatttgctgaagtggttagacccacagacccttctgacttgctgccttgtgagtaagcaatggaataaagtgatcagcgcttgcactgaagtgtggcagactgcctgtaagaacctgggttggcagatagacgacagtgtacaggacgcattgcactggaagaaggtatacctcaaggccattttgaggatgaagcagttggaggaccatgaggccttcgaaacatccagtttgattgggcacagcgcaagagtgtacgctctgtactacaaagacggactgctttgtacaggatctgatgacctgagtgcaaagctgtgggatgtttcgacaggacagtgtgtttatggcatccagactcatacatgcgctgccgtgaagtttgatgagcagaagctagtgactggcagctttgataacactgtcgcatgttgggagtggtcatctggggccaggacacagcactttcgggggcacacaggagccgttttctcggtggattataatgatgagctagatattctggtaagcggcagcgcagacttcactgtcaaggtgtgggcgctgagtgcagggacgtgcttaaatacgctcaccggacatactgagtgggtgacaaaagtggtgttacagaagtgcaaagtcaagtccttgcttcattcgcctggcgactacattctgctctctgccgataaatatgagattaagatctggcccataggacgggagataaactgcaaatgtcttaagacactaagtgtgtctgaagataggtctatctgtctgcaacctaggcttcatttcgacgggaaatacattgtgtgctcttcagctttgggtctgtaccagtgggacttcgcatcttacgacatcctgcgtgtgataaaaacccctgaaatagctaatctggccctccttggattcggggatatctttgccttgttattcgacaaccggtacctgtatatcatggacttacgcaccgagagtttaatctccagatggccacttcccgagtaccggaaaagcaagcgagggagtagcttcctggccggggaacaccccgggtag

SEQ ID NO: 16935 - DNA, 1179 bp, synthetic construct
  source 1..1179: mol_type = other DNA; note = Synthetic coding sequence
atgtctgccctggcgggcgaggacgtgtggaggtgcccgggctgtggggaccatatcgcacctagccagatctggtaccggacggtgaacgagacatggcacggatcctgtttcaggaggagcaactcaattagtaagagccccggcccttcctcgccaaaggagcctcttctgttttctagagacattagtcgatccgaatccctaaggtgttccagtagctactcccagcaaatctttagaccatgcgacctcatccatggagaggtgttgggtaaggggttcttcgggcaggctatcaaggtaacacacaaagcaaccggaaaagtgatggtgatgaaagaacttatccgatgtgacgaagagacgcagaagactttcctgacggaggtgaaagtcatgagaagcctcgaccaccccaacgtgctcaagttcatcggtgtcctgtacaaggacaagaagctcaacctacttacagaatatattgagggaggtacgttgaaagactttctaagatccatggatccctttccatggcagcagaaagtgcggtttgccaagggcatcgcctctggaatggcttacctgcattccatgtgtatcattcaccgggacttaaattcccacaactgtctaataaagctggacaagaccgtggtggtagcagattttggtctttctagactcattgtggaggagcgcaagcgtgcccccatggaaaaggctacgaccaagaaacggactctgcggaagaatgatcgcaaaaagcgctacacagtcgttggaaacccgtattggatggcacccgagatgctcaatggcaagtcctatgacgaaaccgtcgatatattttcctttgggattgttctgtgtgagatcattggccaagtgtatgccgaccccgattgtttgcctaggacactggactttgggctcaacgttaagttgttttgggaaaaatttgtcccgacggattgcccccccgccttctttccccttgccgctatatgctgccgcctggagccagaatctcggcccgccttttccaagctcgaggattcatttgaggcgttgagcctctacctcggagaacttggcatcccgctgccagccgagctggaagaactggatcatactgtcagtatgcagtatggccttacacgggacagccccccctag

SEQ ID NO: 16936 - DNA, 480 bp, synthetic construct
  source 1..480: mol_type = other DNA; note = Synthetic coding sequence
atggctacgagtgcccctctgcggagcttggaagaagaggtcacatgctcaatctgtctcgactatctgcgagaccctgtgaccattgactgtggccacgttttctgcaggagctgtacaactgacgtgaggcctatttcagggtccaggcccgtgtgtcccctgtgtaaaaaaccatttaagaaggaaaatataagacccgtgtggcagctggaaaaaatcctgaaccatctctctacactgagaagggaccgggacaagattcagggctttcaggctaaaggtgaggccgatattctcgcggctcttaaaaagttgcaggatcagaggcagtacatagtggctgaatttgaacaagggcatcagttcctgcgagagagggaagagcacctgctcgagcagctggcaaaattagaacaggagcttactgaggggcgcgaaaaatttaaatctcgcggcgtcggggagttagctcgctag

SEQ ID NO: 16937 - DNA, 3585 bp, synthetic construct
  source 1..3585: mol_type = other DNA; note = Synthetic coding sequence
atgttcagcctggatagctttagaaaagatagggcacagcatcgccaacgccagtgcaaattgcctccccctcgcctaccacctatgtgcgttaaccccactcccggtggaaccatcagtcgcgcatccagagacctcttaaaggaattcccacagccgaagaatctcctgaattccgtaataggaagggctctaggcatcagtcacgcaaaagacaaactggtgtacgttcatactaacggacccaagaaaaaaaaggtaacactgcatattaagtggcccaaatctgtggaggttgaaggatacggctcaaagaaaatcgatgcagagcgccaggcagccgctgctgcttgtcagctttttaaggggtggggcttgctgggtccccgaaacgagctttttgatgccgctaagtatagggtgctcgcagataggtttgggagtccggcggacagttggtggagaccagaacccactatgccacccacaagttggcggcaattaaacccagagtcaattcggcccggcggacccggtggactgagtcgtagcttggggagagaagaagaggaggacgaggaagaggaattagaggagggcaccatagatgtgaccgattttttaagcatgacacagcaggacagtcacgcacccctgcgggactcccgggggagctcattcgaaatgacagacgatgattcagccatccgcgcactcacacagtttcccctgcccaaaaatctcctggccaaggtgatacaaatcgccacatctagcagcacagctaagaacctaatgcagtttcacaccgtgggaactaaaaccaaattgtctaccttgacacttctctggccatgtcccatgaccttcgtggcaaaaggtcgcaggaaggcagaggccgagaataaagctgctgccctggcttgtaagaagttaaagagtctagggcttgtcgacaggaacaatgaacctctcacacatgcgatgtacaatttagcctccctaagagagctgggtgagacccaacggagaccttgtacaattcaagttcctgaacctatcctgaggaagattgaaaccttccttaaccattacccagtcgaatccagttggatcgcacctgagctgcggttacagagtgacgacatcctgcccctgggaaaggacagcggccccctgtctgatcccatcactggcaagccttacgtacctctgctcgaagccgaagaggtgagactatctcagtcgctgctggaactatggaggcgccgggggcccgtgtggcaagaagctccacagctgccagtagatcctcaccgcgataccatcctcaacgccattgaacagcaccctgtggtcgtgatttctggagataccgggtgtgggaagactacacgcatccctcaactgctgttggaacgctatgttacggaggggcggggggcccggtgtaatgtaattatcacacagcctcgccgcatctcagcggttagtgtggcccagagagtgagccacgaactaggtccatcactgcgcagaaatgtcggcttccaggtgcgcctcgaatctaaaccgccatccagaggaggcgctctgctgttctgcactgtgggaattctgctccgcaaattacaatctaacccttcactcgagggggtttctcatgtgatagttgacgaagtccatgaacgggatgtaaatacagacttcttgctcatcctcctgaaaggcctgcaacggcttaaccctgcacttcgtctggtgctgatgtcagccacaggtgataatgaacggttttcccgctacttcgggggctgtcccgtgatcaaagttcccggattcatgtacccagtgaaggaacactacctagaggacatattggccaaactcggcaagcaccaatacctgcatcgccatcgccaccacgagtctgaagacgaatgcgcgctcgatcttgacttagtaactgacctggttttgcatatcgatgcgcggggagagccaggcggtatcctgtgctttctgcccggttggcaggaaattaaaggcgtacaacagagactgcaggaggctctgggaatgcatgaatcaaaatatttgatcctccccgtacacagtaacatcccaatgatggatcagaaggctatatttcaacaaccacctgtcggggtccggaagattgtgttggcaaccaatattgcagaaacttccattacaatcaacgatatcgtgcacgtggtggatagcggcctccataaggaagagcgctatgacctaaaaaccaaggtgagctgcctggaaacagtctgggtatcaagggccaatgtcatacagcgccggggtagagcaggccgttgtcaaagcggttttgcataccaccttttccctcgcagcaggctggagaaaatggtgcccttccaggtcccggagatactccgcacgcccctggaaaacctcgtgctgcaggccaagatacacatgccagaaaagaccgccgtggagttcctatctaaggcagtggacagccctaacatcaaagctgtcgacgaggctgtgattctgctccaagagattggtgtgttggatcagcgtgagtacctgacaacgctcggacagaggttggcccatatctctaccgatccacgccttgctaaggctattgtcctggccgccatcttccggtgtctccaccccctgctggtagtagttagttgtctgaccagggatccattttctagcagcctgcagaacagagccgaggtggacaaggtgaaggccctcctctctcacgactcgggctcagaccatctcgccttcgtgcgggccgtagcagggtgggaagaagtcctaagatggcaggatagatcatctagagaaaactacttggaagaaaatctgctctatgcgccgagcctcagatttattcacggactgatcaagcagtttagcgagaacatctatgaagcttttctggttggcaaaccctccgattgtaccttggcctctgctcagtgtaacgagtacagtgaagaggaggaacttgtgaagggtgttctgatggcggggctgtacccgaacttgatacaggttaggcagggaaaagtaacccgtcagggtaagttcaagcctaactcagttacctataggactaaatctggcaacatcctcttacacaagtctacgataaatagggaggccacacgactgagaagtcgttggctgacctacttcatggccgtcaaatctaacggatcagttttcgtaagggatagctcgcaagttcacccactggcagttctcttgcttaccgacggcgacgtccacatccgggacgatggacggagggcgaccatatccctctcagattcagacctgctccgcctggaaggagactcccggactgttagactgctcaaagagttgcgacgtgctctcgggcgaatggtagaaaggtccctgcggtctgaattagcagcactgcccccctctgtccaagaggagcatggacagctgttagcactcctcgccgaactgctgcgtggcccttgcgggagtttcgacgtccggaaaacagctgatgactag

SEQ ID NO: 16938 - DNA, 207 bp, synthetic construct
  source 1..207: mol_type = other DNA; note = Synthetic coding sequence
atgagttactatcaaaggcccttcagcccaagcgcctactccctcccagcttcgctgaatagttccatcgttatgcagcatggcacatctctggacagcactgacacgtacccgcagcatgctcagtcactagatggcaccacctccagctcgatccctctgtaccgatctagcgaggaagagaagcgcgtaaccgtgattaaatag

SEQ ID NO: 16939 - DNA, 1419 bp, synthetic construct
  source 1..1419: mol_type = other DNA; note = Synthetic coding sequence
atgtcccgaagggtggtgagacagagcaaatttcgtcacgtgttcggccaagctgccaaagccgaccaggcttacgaggatatccgcgtctccaaagtgacttgggattcatctttctgcgctgtgaaccccaaattcctagctattattgtggaggcaggcgggggaggggcctttatagttttaccattggctaaaacaggtagggtcgataaaaactaccctctggtcaccggtcatactgcgccagttctggacatcgattggtgccctcataatgacaacgtcatcgcgtctgcaagcgacgacacgacaatcatggtttggcagatcccagattacacacccatgaggaatattactgaaccaattataacgttggagggacattcaaaaagagtgggcatattatcatggcatcccacagcacgcaatgtgttacttagcgccgggggggacaacgtaatcatcatctggaacgtcgggactggcgaggttctgctctccttggacgacatgcacccagacgtcattcattctgtgtgttggaactcgaatggatccttactggcaacaacctgtaaagacaaaactctgaggatcatcgacccaaggaagggacaggtggtggccgagcaggcacggccccatgagggggcgaggcctctccgcgctgtgtttacagcggatggtaagttactgtccaccggattttcccggatgagcgagcgccagcttgcactatgggaccctaacaatttcgaggagccagtcgccctgcaggaaatggacaccagtaatggcgtgctcttaccattttatgaccctgacagctcaatcgtgtatttatgcggtaaaggcgacagcagtatccggtatttcgagataacggacgaaccacccttcgtccactacctgaatacgttctccagtaaggaaccccagcggggaatggggttcatgcccaagaggggcctggacgtcagcaagtgtgagattgcgaggttttacaaactgcatgaacggaagtgtgagcctattattatgaccgtgcccagaaagagcgaccttttccaggatgatttataccctgacacacccgggcccgaacccgctttagaggcagacgagtggctctcaggccaggatgcggagcccgtgcttatatccctccgggacgggtatgtgcctcctaagcacagagagttgagggttactaagcgaaacattctggatgtgcgcccaccatcaggacctcgtcgaagccaatcagcttcagacgctcccctgtcacagcagcacactttagaaacgctcctagaggagattaaggccctgcgggagagggtacaggcccaggaacagagaatcaccgcactcgagaatatgctctgtgagctcgtagacggtaccgactag

SEQ ID NO: 16940 - DNA, 390 bp, synthetic construct
  source 1..390: mol_type = other DNA; note = Synthetic coding sequence
atactgcactctctcgtgcagaccgggatctgtgtgattacattagcggagtcccatcctgtcctgcaaagcggaaaaactatcaagagcatctcctaccaaatatccaccaactgttcccggttacagaacaaggtgtccggcaaattcaagaggggtgcccagtttttgactgaactcgccccactatgtaagatttattgttctgacggggaggagtatactgtgtccagctgtgtgagggggagactaatggaagtcaatgagaacatactgcataagccgtccatactccaggagaagcctagtacagagggttacatcgcagtcgtcctccccaagtttgaagagtctaagagcatcaccgaaggattacttacgcaaaagtag

SEQ ID NO: 16941 - DNA, 735 bp, synthetic construct
  source 1..735: mol_type = other DNA; note = Synthetic coding sequence
atggtgcaccaggataattgttcttatcaggcccaaaagaatgagcgggagtcaattcggcagaaactagccctgggctcattctttgatgatggacctggcatctatacctcgtgtagcaagtctggaaaaccttcgctctcgagccggctgcaatcaggtatgaacttgcagatctgcttcgtcaacgacagtggctccgacaaagattccgatgccgatgactccaagacagaaaccagcctggatacaccattgtctccaatgagcaaacaatccagctcttattctgacagggacacgacagaagaagagtctgagtctttggatgatatggattttttaactcggcagaagaagttgcaggccgaagcaaaaatggctcttgcaatggccaagcccatggccaagatgcaggtcgaggttgagaagcaaaatcgtaaaaaatcgccagtggccgatctcctgccccatatgccccacatatcagaatgcctcatgaagagatcattgaaaccaaccgacttacgagatatgaccattggtcagctgcaagtgatagtgaatgatctgcattctcaaattgagagcctcaatgaggagcttgttcagttgcttttaatcagagatgagcttcacacagagcaagacgctatgctagtcgacatagaggatctgacaagacacgccgagtctcaacagaaacatatggctgaaaaaatgcctgctaagtag

SEQ ID NO: 16942 - DNA, 1620 bp, synthetic construct
  source 1..1620: mol_type = other DNA; note = Synthetic coding sequence
atggctacatctgccccgctccgtagtcttgaggaggaggtcacatgctccatatgcctagactatctgagagatccagtgacaatagattgcggacacgtcttctgcaggtcatgcacaactgatgtccggcccatctcagggagccggcccgtctgtcctttgtgtaaaaagccctttaaaaaagaaaacatcagaccagtttggcagctggcatctctggttgagaatatcgagcggctgaaggtagacaaagggaggcagcccggagaagtgacccgtgaacagcaggacgcaaagctgtgcgagcgacatcgcgaaaaactgcactattattgtgaagatgatggaaagctcctctgcgtcatgtgcagagaatcgagggagcacaggccccataccgctgttctgatggagaaagctgcccagccacacagggaaaagatactgaaccacctgtcaactctccggagggatcgagataagatacagggctttcaggcaaagggggaagccgacatcctggcagctctgaaaaagcttcaagaccaacgacagtacatagtggcagagttcgagcagggacatcaattcctccgggagagggaagaacatctgctggagcagctcgccaagctggagcaggagctgactgagggcagggaaaagttcaagtctcgaggggttggagagctggctcgtctggctctggtgatctccgagttagaaggcaaggctcagcagcctgccgctgagctcatgcaggatacaagggatttcttgaacaggtacccgcgaaagaagttctgggtgggaaagcctattgcaagagtggtgaagaaaaaaactggagaattcagtgataagctgctgtcactgcagcgcggattgcgggagtttcagggcaaactgctgagagatttggagtacaagaccgttagtgtaacccttgacccccagtcagcctctggttatttgcagctgtcagaagactggaaatgtgtgacttatacctctctatacaaaagcgcttatttgcacccacaacagttcgattgcgagcccggtgttctgggttccaaaggctttacctggggaaaagtttactgggaagtggaagtcgaacgtgaaggatggagcgaggatgaagaggaaggagacgaggaggaagagggtgaggaggaagaagaggaagaggaagccggttacggcgatggatacgatgactgggagactgatgaagatgaggagagccttggcgatgaggaagaggaagaggaggaagaagaagaggaagtgctggagagctgcatggtaggagtggcacgcgattctgtaaagcgcaagggggacctaagtcttcgcccagaggacggcgtctgggccttgcgactgtcatcttcaggtatttgggcaaacacctctccggaagctgagctatttcccgctttgaggcctcggagagtcgggattgcactggactatgaaggggggacagtgaccttcaccaacgccgagtctcaggaattgatctacacttttacagcaacttttacaagacgcctggtgccatttctatggctgaaatggcccggcacaagacttctgctcagaccttag

SEQ ID NO: 16943 - DNA, 441 bp, synthetic construct
  source 1..441: mol_type = other DNA; note = Synthetic coding sequence
atgtttgaaatcctgaccagcgagtttagttaccagcatagcctctctattttggtagaggaattcttgcagtccaaggaactaagagcgaccgtgacacagatggaacaccaccatctgtttagtaacatcctcgatgttttgggtgcttcacagcggttctttgaggacctcgagcagcgacataaggcccaggtgcttgttgaagatataagcgatatcctagaagagcacgccgaaaagcatttccacccgtacatcgcatactgttcgaacgaggtgtatcagcagcggacgctacagaaactcatctccagtaatgctgccttccgtgaggccctcagagaaattgaacgcagaccagcctgcggcggcctgcctatgctgtcgtttctgatcttgcctatgcagcgggtcacccgattacctctgctgatgtag

SEQ ID NO: 16944 - DNA, 483 bp, synthetic construct
  source 1..483: mol_type = other DNA; note = Synthetic coding sequence
atggaagccgaaagaccccaggaggaagaggacggcgagcaggggcccccacaggacgaagaaggttggccaccacctaactccaccacccgcccctggagatcggcacccccctcaccccctcccccaggtactcgtcataccgctctaggtcccaggtcggcctcactgctgagtctccagacggagctcctgctggacctggtagcagaagctcagagccggcgactcgaggaacagcgggcgactttctacacaccgcagaatccttccagtttggcccccgcccccctgagaccactggaggatcgggaacaattgtatagcacaatcctctcacaccaatgccaacggatggaagctcagagatccgaacctccactcccgccaggagggcaggagctcctggagctgctgttgcgcgtgcaggggggcggccgaatggaggagcaaaggtcgcgccccccgacccacacttgttag

SEQ ID NO: 16945 - DNA, 303 bp, synthetic construct
  source 1..303: mol_type = other DNA; note = Synthetic coding sequence
atgtcctactaccagcgtccttttagtccttccgcctatagcctccccgcctcactgaatagctcgatcgtcatgcagcatggtactagtctggactccaccgatacctacccgcagcacgcccagtctctcgacggcactacatcttcttccattccactgtatcgaagcagtgaggaggagaagagagtaaccgtgattaaggcaccccattaccctggaatcggacccgtagatgagagtgggataccaactgccatccgtacaactgtggaccgccctaaggactggtacaaaacctag

SEQ ID NO: 16946 - DNA, 369 bp, synthetic construct
  source 1..369: mol_type = other DNA; note = Synthetic coding sequence
atggcaacgtccgcacccctacggtcactagaggaagaggttacatgctcgatctgtcttgattatctgagggaccctgtcacgatcgactgtggccacgtgttttgtcggagttgcactaccgatgtccggccaatctccggaagtaggccagtatgtccgctgtgcaagaagccattcaaaaaagagaacattcgccctgtttggcagcttgcttcactggtggaaaatatagagcgattgaaagttgacaagggccgacagccgggcgaagttaccagagaacagcaggacgcgaaattatgtgagaggcatcgggagaaactgcactactactgcgaagatgatggcaagttactgtgtgtgtag

SEQ ID NO: 16947 - DNA, 633 bp, synthetic construct
  source 1..633: mol_type = other DNA; note = Synthetic coding sequence
atggtatcaatgtctgtcccagattgcctgtcaattatgacatatgtcagccagtattataaccacttttgttccccagggcaagctggcgtcagtccacccaggaagggacttgctccttgctcacctccgagtgttgcccccacgcccgtggagcctgaggacgtggcgcagggcgaggagctaagcagtggcagcctgagcgagcagggcactggacaaaccccttctagtacatgtgctgcttgccagcagcacgtgcaccttgtgcaaaggtatctggcagacggcaggctataccaccggcattgcttccgatgccgccggtgcagctcaaccctgttgccaggcgcgtacgagaatggacccgaagagggaacgttcgtgtgtgcggagcactgcgccagacttggacctggtacgaggagtggtaccagacctggtcccttcagtcagcctaaacaacaacaccagcaacagttagccgaggatgctaaagatgtccccggtggagggccatcatcaagtgcccccgcaggagccgaggcagatggcccaaaagcatctcccgaggcccgcccacaaatacccaccaagccccgtgttcctggcaagcttcaggagctggcttag

SEQ ID NO: 16948 - DNA, 390 bp, synthetic construct
  source 1..390: mol_type = other DNA; note = Synthetic coding sequence
atggccgagctcatacaaaagaaattacagggcgaggtggagaaataccaacagctgcaaaaagatcttagcaagtcaatgagtggaaggcagaagcttgaggcacagctgaccgagaacaatatcgtcaaggaggagttggcccttttggatggcagcaacgtcgtgttcaagctgctgggccctgtgttggtgaaacaggaactaggggaagcccgagccaccgtagggaagcgattagattacattaccgcagagataaaaaggtatgaaagccagctgcgagacctcgagcgccagtcagagcagcagagagaaactctggcacagttacagcaagagttccagagagctcaggctgcgaaagccggtgccccaggaaaagcatag

SEQ ID NO: 16949 - DNA, 621 bp, synthetic construct
  source 1..621: mol_type = other DNA; note = Synthetic coding sequence
atggccttaaatgtggcccccgtccgcgatactaaatggctaaccttagaagtttgtagacagttccagcggggtacatgctcaagatcagatgaagagtgtaagttcgctcaccctcccaagtcctgtcaggttgaaaatgggagggtgatcgcgtgttttgattcgctgaaggggaggtgctcccgggagaattgtaagtacctgcatcctccaactcacctgaagacccagctagagataaacggacgaaacaatttgatccagcagaaaacagctgccgctatgctcgctcagcagatgcaattcatgtttccaggaacccctctacatccggtggctttccctcccggcgctctccaccccttacctaagcggcaagcactggagaagtccaacgggacttcagctgtgttcaaccctagcgttcttcactaccagcaggccctcacctctgcacagttgcagcagcacgccgctttcattccaactgataacagcgagatcatctctcgcaatggcatggagtgccaggaaagtgctttgcgaattaccaagcattgctactgcacttattacccagtctcaagttctattgaactgcctcagaccgcctgttag

SEQ ID NO: 16950 - DNA, 978 bp, synthetic construct
  source 1..978: mol_type = other DNA; note = Synthetic coding sequence
atgcagcagcccgtacgcgccggcgacattggagtgtccagagtacagacgcaccacaatgcttctccttttagtgtgcccaaaaaacaggacgaatctccaatgatcggagacggtgaagactactttctgtctctatttggcgatagtaagaagctcaccgcccactctaactacacgcagaaaaccctgaagtatttctccatgatactggaggaggtgggacagtttacatcatctagcctgggcgatgtggagattgcagaggtcaatgttaaagggctattcgtgaagctgattaattcatccctggataaggaaatggccattggagaccacatcttgcagcaaaatgtgaacggacaaaccatatctctttaccgctttcttcctaatattgtaatgcaggctaatagcaccgtgactgtctgggcggctgcaagcgaggctaagcaccaacccccctccgatttcttgtggaaggagcaagataagttcagggccagtcccgactgtattactatcctctgtaagcccaacgggcaggccatcgcctggtatactcccatccattggaagcaagcgtgggaaaagctggatgccgatgtggagtttaaccgatgttctgtggtatcgcctaccttccgaaaacgcgtatttcagtggacagcctctaccgctacaattaccaaggaaaaacaggaccagcccaaaaaagatatctcaaactaccaggtggagcaggcccaggtcctactgaaaagggaaaaagagattccacctacagtcttccccaatcgatctccatggtgccagaacccatacgtgtcagcccatccatactgtcccctcatcgaaccacataataccagtaccgcaggcggacggctggatcgtcagcccaggacccgcagcactcggccgaacagagcgtccggcagcaagaagaagaagaccagcgagagtcagaaacagtag

SEQ ID NO: 16951 - DNA, 1257 bp, synthetic construct
  source 1..1257: mol_type = other DNA; note = Synthetic coding sequence
atgcgtgagatcgtgcatatccaagccggtcagtgtgggaaccagattggcaccaagttttgggaggtgattagcgacgaacatggtatcgatccagccggagggtacgtgggtgacagcgcattgcaattggagcggatcaacgtatattacaatgagtctagctcccagaaatatgtcccccgcgccgccctggtggacctggagcccggaacgatggattcagtgagatctgggccattcggacagctgttccgtcccgataacttcatcttcggtcagaccggggcagggaataactgtctacaaggcttccagctgactcattcactagggggcggtactggctctggtatgggtacacttctgatttccaaaattagagaggaattcccagatagaatcatgaacacttttagtgttatgcccagccctaaggtgtctgacacggtggtagaaccttataatgccaccctgtcagtgcaccagctggtggagaacactgatgagacctactgcatcgacaacgaagctctctatgacatttgctttcgcaccctgaagctcacaacacctacctatggcgatctcaaccatctggtgtccgcgactatgtctggagtgacgacctcgctgcgatttcccggtcagctcaatgctgacttgaggaaattggccgtgaacatggtcccattcccccggttacacttcttcatgccaggatttgcccccctgactagccgcggatcacagcagtaccgagctctcacggtgcctgaactcacccagcaaatgtttgacgccaggaatatgatggccgcctgcgacccccgacacggccggtacctgaccgtcgccactgtgttccgggggcctatgtccatgaaagaagtggatgaacagatgctcgctatccagtcaaagaactccagctatttcgtggaatggattccaaacaatgttaaagtcgccgtctgcgacattccaccgaggggactcaagatggcttcaacattcatcggcaatagcacagccatacaggagctcttcaagcgaattagcgagcaattctccgccatgttccggcggaaggcttttctgcattggttcaccggggagggcatggatgaaatggaatttacagaagccgaatccaacatgaatgacttagtgtccgaataccagcagtatcaggatgcaacggccaacgatggggaggaagcattcgaggacgaagaagaagagattgatggctag

SEQ ID NO: 16952 - DNA, 270 bp, synthetic construct
  source 1..270: mol_type = other DNA; note = Synthetic coding sequence
atggacgtgctatctccactctcatttatcaaggtgtctcacgtccggatgcagggtatcttactactggtgtttgcgaagtatcagcatctgccttacatccagatcttgagtacaaaaagcactcccaccgggctattcggctactggggtaacaaggggggggtgaacatctgtctcaagctatatggttattacgtgagcatcatcaactgccacctgccccctcatatttcgaacaattatcaacgcctcgaacatttcgactag

SEQ ID NO: 16953 - DNA, 180 bp, synthetic construct
  source 1..180: mol_type = other DNA; note = Synthetic coding sequence
atgactagagggaatcagagagagcttgcaaggcagaagaacatgaagaaacagtccgactccgtcaagggcaaacggcgcgacgatggactctctgctgcggctagaaagcaacgtgattccgagattatgcaacagaagcaaaagaaagcgaacgagaagaaagaggagcctaaatag

SEQ ID NO: 16954 - DNA, 864 bp, synthetic construct
  source 1..864: mol_type = other DNA; note = Synthetic coding sequence
atggatgaaactgaaatagggtcctgcttcggccggtatgggtcagttaaggaggttaagattatcactaaccggacgggcgtgagcaagggctacggctttgtgagcttcgtgaacgacgtggatgtgcagaagattgttggcagccagattcactttcatggcaagaagctgaagctgggacccgcaattaggaaacagaagctgtgtgctagacacgtgcaacccagacccctggttgtcaacccacctccccctccccagttccagaatgtatggcgcaatcctaacactgaaacgtatctacagccacagattacacccaaccctgtgacgcagcatgtccaggcctactcggcctatcctcatagtcctggacaggtaattacgggctgccagctcctggtttacaactaccaggagtaccccacttatccagactccgcctttcaagtgacgactgggtatcagctgcctgtgtataactatcagccctttccagcatatccccgtagcccctttcaagtgacggcggggtaccagctgcccgtttacaattaccaagcttttcccgcttatcctaactcccctttccaagtagctactggataccagttcccagtctacaactaccagccatttcccgcctatccttcttcaccatttcaggttacagccggctatcaactcccggtgtataattatcaggcgttccccgcctaccctaattctccattccaggtcgcaacagggtaccagttccctgtctacaactaccaggcctttccagcttatcccaatagccctgtccaggttactacaggctatcaactacccgtctacaactatcagaaattcccttag

SEQ ID NO: 16955 - DNA, 1344 bp, synthetic construct
  source 1..1344: mol_type = other DNA; note = Synthetic coding sequence
atggatatggggaatcagcatccttcgatctcaaggctgcaggagatccaaaaggaagtcaagtccgtagaacagcaggtaattggcttctccgggttgtcggacgacaagaactacaaaaaactggagagaatattaacaaagcagctctttgaaatagattcagtcgatactgaggggaaaggggacatccaacaggcaaggaagagagcggcgcaggagaccgagcgtcttctgaaggagcttgagcaaaatgccaatcatccccaccggattgaaatccagaacattttcgaagaggcccagtccctggtcagagagaagattgttccgttttacaatggaggcaattgtgtcaccgacgagtttgaagaagggatccaggacattatcctgcggttgactcatgtaaagacaggcgggaagattagtctgcgtaaagcacgttaccatacactcactaaaatctgcgctgtgcaggaaatcattgaagattgtatgaaaaagcagccaagcctgcccctgtcagaagatgctcatccctccgtcgccaagataaattttgtgatgtgtgaggtgaacaaggctaggggcgtactgatcgccctgctgatgggggtcaacaacaatgaaacttgcagacacctgagctgcgtcctgtctggcctcatagccgacttagacgccctggatgtctgcggtaggacagagattagaaactatcggcgggaggtggtggaagacatcaacaagctgctgaagtatctcgacttggaggaggaggcagacacgaccaaggcctttgacttgcgccagaatcactctatcctgaaaattgaaaaggtgcttaaaagaatgagggaaatcaagaacgaacttctgcaggctcagaatcctagcgaactatacctctcctccaagactgaactccagggcctgataggacagctggacgaggtgtcactggagaagaacccatgtattagagaagctcgtagaagggccgtgattgaagtacagaccctcattacctacatcgatctaaaagaggcgttggaaaagcgtaagctctttgcatgcgaggagcatccgtcccataaggcagtttggaacgtacttgggaatctgagtgaaatccagggagaagtgttatcgtttgacgggaatcggaccgataaaaactacattaggctggaggaactgctaaccaagcagctgctggctctcgatgcagtcgacccacaaggcgaagaaaagtgcaaggccgcaagaaaacaagccgtgcgactagctcagaatatcttgtcgtacctagatctcaaatccgacgagtgggagtactag

SEQ ID NO: 16956 - DNA, 474 bp, synthetic construct
  source 1..474: mol_type = other DNA; note = Synthetic coding sequence
atggccaacatcgcagtgcagaggattaaaagagaatttaaggaagtcctgaaaagtgaggagacttcaaagaaccagataaaggtcgacttggtggatgaaaatttcacagagctccggggggagatcgcgggtcctcctgatacgccatacgaaggcgggcggtatcagctcgaaattaaaatccccgagacctaccctttcaatcccccgaaagtcaggtttatcacgaagatctggcatccaaatatctcaagtgtaactggtgccatttgtctcgacatcctcaaagatcagtgggccgccgcaatgactctacgaacggtgctgctgagcctccaggccctccttgccgcggctgagcccgacgatccccaggatgctgtggtagctaatcagaatgccgtgatagtggcgctgtcctcaaaaagctgggacgtggaaacagccacagagttgttgctgagcaattag

SEQ ID NO: 16957 - DNA, 582 bp, synthetic construct
  source 1..582: mol_type = other DNA; note = Synthetic coding sequence
atgcctaccacttccaggcctgctttggacgtaaaaggcggcacatcccctgcaaaagaggatgccaatcaggagatgtctagtgtagcctatagcaatctggcagtgaaggacaggaaggccgtcgccattttgcattatcctggcgtggcctcaaacggcacgaaggcttctggagcgcccacctcctcatctgggtcacccataggcagtcctactaccacacctcccacaaaaccacctagttttaacctgcaccccgctccacacctgctcgcttctatgcacctccagaaacttaactcccagtaccaaggcatggctgctgcaaccccaggtcagccgggggaggcaggacctctgcagaattgggatttcggcgcccaagctgggggagccgaaagcctgtctccgagcgctggcgcccaatcaccagctatcatcgatagcgatccagtggacgaggaagtacttatgagtctggttgtggaactcggcctggacagggccaacgaattgcctgagctgtggctggggcagaacgaatttgactttactgcggacttcccaagtagttgttag

SEQ ID NO: 16958 - DNA, 1188 bp, synthetic construct
  source 1..1188: mol_type = other DNA; note = Synthetic coding sequence
atggcttccgctgcttctgtcacttcactcgcagacgaggtaaactgccctatctgccagggcacgctccgagaacccgtcaccatcgattgcggtcacaacttctgccgggcatgcctgacaaggtattgcgagataccgggaccggatctggaagaatctccaacctgccccctctgcaaagagccttttcgacccggttcctttcgacctaattggcagctggcgaacgtcgttgaaaatattgaaagattgcagttagtttccacattgggcttgggcgaggaggatgtgtgccaggaacatggagagaaaatctattttttctgtgaggacgatgagatgcagctctgtgtggtttgtagggaggccggcgagcatgcaactcacacgatgaggttcctggaggacgccgcagccccataccgcgaacagattcacaagtgcctaaagtgccttcgcaaggaaagagaggagatacaggaaatccaatcaagagagaacaagcggatgcaggtgctgctcacccaggtgtccactaagcgtcagcaggtgatctcagagttcgcccacctgaggaagttcttagaggaacagcagagtatcttattggcccagctggagtctcaggatggtgatattctgagacagcgggatgaatttgacttgctggtggctggagaaatctgtagatttagcgccctgatagaggaactggaggaaaaaaacgagagacccgcacgtgagctgctcacggatattaggtccacattgattcggtgcgagaccagaaaatgccgcaaacctgtggccgtttcaccggaactgggccagagaatcagggactttccccagcaagcacttcctctccagcgcgaaatgaagatgttccttgaaaaattgtgcttcgagctcgattacgaaccggcacacatctcactggacccccaaacgagtcatcccaaactccttctctctgaagatcatcagagagctcagttttcttacaagtggcaaaatagccccgataaccctcagagatttgacagagcaacttgcgttctagcgcacactgggattacagggggccgccacacttgggtgtggatggctcgcgtgcctggcgactccgggtgctgccagttctgttccccgccttccgtacttggaaccgaggttgccgcttag

SEQ ID NO: 16959 - DNA, 624 bp, synthetic construct
  source 1..624: mol_type = other DNA; note = Synthetic coding sequence
atgaccgaggactcgcagcgaaatttccgcagcgtctactacgaaaaggttggctttcggggcgtcgaagagaaaaagtccctggagatcctgctgaaggacgatcggctgggtatactacctccacatcacgagtcacatgccaaagtgatgatgtacaggaaggagcagtatctcgacgtgcttcacgcgctgaaggtggttaggttcgtgtctgacgcaacaccacaggcggaggtttacctgagaatgtatcagctggagtctggaaaacttccccggagcccatcttttccattggagcccgatgatgaggttttcttggcaatcgcaaaggccatggaagagatggttgaagattccgtagattgctattggattacacggcgcttcgttaaccagctgaataccaagtatcgcgattccctgcctcagcttcccaaagccttcgaacaatacttaaatctggaggatggccggctgctcacacacctgagaatgtgtagtgccgcgcccaaactcccttacgacctttggttcaaacgctgtttcgctggttgtctgccagagtcgtctttgcaacgcgtgtgggataaggtggtctcgggaagctgtaagatttag

SEQ ID NO: 16960 - DNA, 1404 bp, synthetic construct
  source 1..1404: mol_type = other DNA; note = Synthetic coding sequence
atggcttccctcttacagtcagacagggtgctgtacctggtacagggagagaaaaaggttcgagccccgttatcccagttgtacttctgccggtactgcagtgagctacggtctttagagtgtgtttcccacgaagtggatagccactattgcccaagttgtcttgagaacatgccatctgccgaggccaagctgaagaagaacagatgtgctaactgtttcgattgccctgggtgcatgcataccctttccacccgcgctacatcaattagcactcagttaccagatgatcccgccaagacgacaatgaagaaagcttactacctagcatgcgggttctgcagatggacgagtcgagacgtcggaatggccgataagtccgtcgcctcaggaggctggcaggagccggagaacccccacactcagaggatgaacaaactgattgaatattaccagcagctggcacagaaagaaaaagttgagagagatagaaaaaagcttgcacgacggcggaactatatgccacttgctttttctcagcacacgatccacgtggtcgataagtacggactagggacacgactacagcggccccgagctggggccagcattagcaccctggccggactaagcttaaaagagggcgaggaccagaaagaaattaaaattgagccggcacaggccgtagatgaggtggaaccactgccagaagactactacactcgaccagtcaacctcaccgaggtgaccacactccagcagagactgctgcagcccgatttccaaccagtatgtgcatcccagctctatcctcgacataagcatctattaatcaagaggtcgctgcgctgtcgcaagtgtgaacataacctgtccaagcccgagtttaaccctaccagcatcaagttcaagatccaactggtggctgtgaactacattcctgaagtgcgcattatgtcaatcccgaaccttagatatatgaaagagagtcaagtgcttctcacacttacaaatcctgtggagaatcttactcacgtcacgcttttcgaatgtgaagagggggatcctgacgacattaactctacagccaaggttgtggtgcctccaaaggagttggtgctcgctggaaaagatgcagccgcagaatatgacgaacttgctgagccgcaggatttccaggatgatcccgacattatagccttcaggaaagccaataaggtgggcatttttatcaaagtgactcctcagcgagaagaaggagaagtcactgtgtgttttaaaatgaaacacgattttaaaaacttagccgctccaattcggcccatcgaggaatctgatcagggcacggaggtcatctggttgacccaacacgtggaactgtctctgggcccacttctcccatag

SEQ ID NO: 16961 - DNA, 435 bp, synthetic construct
  source 1..435: mol_type = other DNA; note = Synthetic coding sequence
gttagagaacttgaagccgagttagacgctgagcagaagaagcacgcggaggccctgaaaggcgtcagaaaacatgagcggagggtcaaggaattagcctaccaggccgaagaggatagaaagaatctggcccggatgcaggaccttgttgataaactccaaagcaaggtcaaaagctacaagcgtcagttcgaagaggcagtttccgcattgggccctgggcacctggaccgggctccccagctgtgccccagagtgtgcggtcaggaacagcaagccaatactaacctggccaaatacaggaaggctcagcatgagctggatgacgctgaagaacgcgcagatatggctgaaacccaggcgaataaacttagagcgcgtacaagggatgccttgggaccaaagctttcactgtccccacagcataaggagtag

SEQ ID NO: 16962 - DNA, 747 bp, synthetic construct
  source 1..747: mol_type = other DNA; note = Synthetic coding sequence
atggctacgagcgcccccctgagaagcctggaggaggaagtgacttgcagtatatgtcttgattacctgcgtgatcctgtcactatcgactgtgggcacgtgttctgtcggtcatgcactacagacgtgcggcctatcagtggttcgcggccagtctgccctctgtgcaagaagccattcaagaaggagaatattcgacccgtctggcagctggcatccctagtcgaaaatattgagcgactgaaggtagataagggcaggcagcccggagaagtgacccgcgagcagcaagatgcaaaactatgtgagcggcacagagagaaactgcactattactgcgaagacgacggaaagcttctttgtgttatgtgtcgggagtcaagggagcatcggccccacaccgccgtgcttatggagaaagctgcacagccgcatagggagaagattctgaatcatctttctaccctacgccgggacagagataaaattcaggggttccaggccaaaggcgaagccgatatcttagcagccctgaaaaaactacaggatcagagacagtacatcgtggccgagtttgagcaagggcaccagtttttgagagagagagaagagcacctgctagaacaactggctaaactcgagcaggagctgactgaagggcgggaaaagtttaaaagtcggggggttggagaattggcgcggcttgccctcgtcatcagcgagctggaaggtaaagctcagcaatag

SEQ ID NO: 16963 - DNA, 3468 bp, synthetic construct
  source 1..3468: mol_type = other DNA; note = Synthetic coding sequence
atggccgccagtagagatctgcttaaagagttcccgcagcctaaaaacctgctcaactctgtgattggacgagctctcggcattagtcatgccaaagataaacttgtatatgttcatactaatggacccaagaagaagaaggtcacgcttcacataaagtggccgaaatctgtcgaagttgagggctatgggtccaaaaaaattgacgccgagagacaggccgccgcggccgcatgtcagctatttaagggctggggcctcctgggtcctaggaacgaactgtttgatgccgcaaaatacagagtcctggctgacagattcggatcccctgccgactcctggtggagaccagagcctactatgcctccaaccagctggcgtcagctgaacccggaaagtatacggcctggggggcccggcggactgtccaggtctctagggcgcgaagaagaggaagacgaagaggaagagctggaagaaggcacaatcgacgtgacagattttttgagcatgacccagcaggattctcacgcacctcttcgcgacagccgggggtcctctttcgagatgacggatgatgacagtgccatcagagccctgacgcagttccctctcccgaaaaacttgctagcaaaggtgatccaaattgctacaagcagcagcacagccaagaacttgatgcaattccatacagtggggaccaagaccaaactgagtacgctgacgttactctggccttgccccatgacatttgtcgccaagggtcggagaaaagcagaggccgagaacaaagccgcggccctggcatgtaagaagcttaaatcactcggcctcgtagataggaataacgaaccactgacacacgccatgtacaacctcgccagtctgcgggagctgggagaaacccaaagacgcccatgcacaatccaggtgccggagccgatactcaggaaaattgagacctttctcaaccactacccggtggagagctcttggatcgccccagagctgcggcttcagagcgatgatattcttccactcggaaaagacagtgggccactgagtgatccaattacaggtaagccttatgtcccactgctcgaagcagaggaagtgcgactctctcagtctcttcttgaactctggcggagaaggggtccggtgtggcaggaagctcctcagctccctgtcgatcctcaccgcgataccatcttgaacgctattgagcaacaccctgtggttgtgatctcaggggataccggttgcgggaaaaccaccaggatcccacaattgctcctggagagatatgttaccgaaggcagaggcgccagatgcaacgtgattattactcagccccgccggatttccgcagtgtctgtggcacagcgggtgagtcatgagctggggccttcactgagacgcaatgtagggtttcaggtccggcttgagtcaaaaccaccctcccggggtggtgccttactgttttgcacagtgggaattcttttacgtaaactgcagagcaacccgagtctcgaaggtgtgtctcacgtcatcgttgatgaagtccacgagcgagacgtgaacaccgacttcctcttgatactcttaaagggattgcagagactaaaccccgctctccgactggttctgatgtccgccacaggcgataacgagcggttcagtaggtacttcggtggttgtcctgtgatcaaggtgcctggttttatgtatccagtgaaggaacactatctcgaagatatcctcgccaaactagggaaacatcagtacctccaccgtcatcgccatcatgaaagtgaagatgaatgcgccctggacctggatttggtgaccgatctggtcctgcacatcgacgcgcgaggcgaaccaggcggaattctttgttttttgcctggatggcaggaaatcaaaggggtgcagcagcggttgcaagaagctctggggatgcatgagtccaagtacctcattctgcccgtgcactcgaacattccaatgatggaccaaaaagccatctttcaacagccccccgtaggcgtccggaaaattgtcctggctacaaacatagccgaaacttccataacaattaatgatatcgtgcatgtcgtagatagcggccttcataaagaagaaagatacgacctgaagacaaaggttagttgtttagaaactgtgtgggtcagtagagccaacgtcatccaaaggagagggcgggcaggcaggtgtcagtcagggtttgcctaccatctctttccacggtcacggttagagaagatggtccccttccaggttcctgaaattctacgtacacccctggaaaacctcgtactgcaggcgaagatccatatgcccgagaaaactgctgtggaatttttatcaaaggccgtcgattccccaaatattaaggctgtggacgaagcagtcattctgctgcaggaaataggcgtccttgaccaacgcgagtacctgacgactctaggacagagacttgcccacatatccacagatcccagactggctaaggcgattgtgctggctgctatatttcgttgtcttcacccactattagttgtggtctcatgtctaacccgggaccccttctcttctagccttcagaaccgtgccgaagttgacaaggtcaaggccctcctctcacatgactctggatccgatcacctggcatttgtgcgggccgtggccgggtgggaggaggtcctcagatggcaggaccgaagttcaagagagaactacctcgaagaaaacttactctacgcaccttccttaaggttcattcacgggctcatcaaacagttttccgaaaacatttacgaggcatttctcgtgggaaagccaagtgactgcactctcgcaagcgctcagtgcaacgagtattcagaagaagaggagctcgttaagggagttctcatggcgggactttatccaaaccttattcaagttagacagggaaaagtaacacgacaggggaagttcaaaccaaactccgtgacgtaccggacaaagagtgggaatatacttttgcacaaatctaccataaaccgggaggccactcgtttgcgaagcaggtggctgacctatttcatggccgttaaaagcaatggctctgtgttcgttcgtgacagcagtcaagtgcatccactggccgtcctgctgctgacggacggagacgttcatatcagggacgacgggcgaagagcaactatttcactaagcgactccgacctgctgcggttagaaggggatagtcggacagtccggcttcttaaggaactgaggagggcactcgggcgcatggtcgaacgttctttgcggtcggaactagcagcactgcccccctcggtccaggaagaacatggccagctgcttgcattgctggcagaacttctccgaggaccttgcgggtcgtttgacgttcgaaaaactgctgacgactag

SEQ ID NO: 16964 - DNA, 762 bp, synthetic construct
  source 1..762: mol_type = other DNA; note = Synthetic coding sequence
tgagtgggggtggaggccgcacgcgtcatcgccaaagctttggagaaaaagtcagagctgaagaggtgccattggtcggacatgttcacggggcgcctcagaacagagatcccaccggccctgatcagcctcggggagggtctgatcactgcaggcgcccagctggttgaactagatttgtcagacaatgcttttggcccggatggggttcagggtttcgaggccttgctgaaaagctctgcctgctttacactgcaggagctgaagctcaacaactgcgggatggggatcggtgggggcaaagtgatcggtactctggaggaggtccacatgcctcaaaacggcatcaaccaccccggtattacggcactcgcccaggcctttgcggtcaacccactcctccgcgtaattaatctgaatgataatacttttactgagaagggggccgttgccatggccgaaactctgaagacgctgcgacaagttgaagtaataaatttcggagattgtctggtgcggagcaagggagcggtggcgatcgcagatgccattcgggggggcttgccaaagctgaaggaactcaatctctccttctgtgagatcaaaagggacgccgccttagctgtggcagaggctatggcagataaggccgagttagaaaaactcgatcttaatggcaacacgctaggggaggagggatgcgaacaacttcaggaagttttagaaggttttaatatggccaaggtacttgcctcgctctag

SEQ ID NO: 16965 - DNA, 3735 bp, synthetic construct
  source 1..3735: mol_type = other DNA; note = Synthetic coding sequence
gatgttggaggcgaccggccctgggactctggaaacacccagctgcccccaagaaaccccgtgaaggcaaacgcaatgtttggagcgggagacgaggatgataccgatttcctatctccttctgggggtgcacggctggcttctctcttcggtctggaccaggccgctgccggacatggaaatgaattttttcagtacacagcaccgaaacagcctaagaaagggcagggcaccgctgccacgggtaaccaggccaccccaaagaccgctcctgccacaatgagcaccccaaccatcctggtggctacagcggtccatgcgtaccgctataccaatggccagtatgtgaagcagggaaagtttggggccgccgtgctggggaatcacactgctcgcgagtaccgtatcctgctctacatctcccaacagcagcccgtgacagtcgcacggattcacgttaactttgagctgatggttcgcccaaataactacagtactttctatgatgaccagcgtcagaattggagcatcatgttcgagtccgagaaggcggcagtggaatttaataagcaggtgtgcattgctaaatgtaattctacatcatctttagacgcagttctgagccaggatctcatagtggcagacggaccagccgtggaagttggcgactccctggaagtcgcctatacagggtggctcttccagaatcacgttctgggccaggtctttgatagcacagctaataaggacaagctcctgaggttgaagctgggctcaggcaaagtgatcaagggttgggaagacggaatgctcgggatgaagaagggaggaaaaaggctcctcattgttcctccagcctgcgctgtggggagtgaaggcgttatagggtggacccaagcaaccgactcaatactcgtattcgaagtggaagtgaggagagtgaagttcgcccgcgattcaggaagcgatggtcactccgtaagtagccgagactctgccgctccttcacctatccccggagctgacaatctgagcgccgaccctgtcgtatcaccccctacttcaatacccttcaaaagcggagaacctgcccttcgaacaaagtccaattccctctcagagcagctggctattaacacctctcctgacgccgttaaggctaagctcatatcccgaatggcaaaaatggggcagcccatgctccctatcctgccaccgcagcttgatagcaatgactccgagattgaagacgtgaacacacttcagggcggagggcagcctgtggtcaccccttcagtgcaaccttccctgcaccccgcgcaccccgcgctgcctcagatgacctcacaggcccctcagccgtctgtaactggcctgcaggccccatcagctgctctgatgcaggtgagttcccttgatagccactcagccgtcagcggcaacgctcagtcattccaaccatacgccggtatgcaagcatatgcgtacccccaggcctcagccgttactagtcagctccagccagtgaggcccctataccctgcccctctgagtcagcccccccacttccaaggaagcggtgacatggcctcgttcctaatgacagaagcgagacagcacaacactgaaatccggatggccgtgtctaaggtagccgataaaatggaccacctgatgactaaggtggaagagctgcagaagcactccgctggcaactctatgctgatcccttctatgtccgtaacgatggagacatccatgatcatgtctaatatacagaggataattcaggagaacgaacggctcaagcaggagatcttggaaaaaagcaacagaatcgaagaacagaacgataaaatctcagagttaatcgagcgaaaccagagatatgtagagcagagcaacctcatgatggagaaaagaaataactctcttcaaaccgctaccgaaaatacccaggcacgggttttacacgcagagcaagagaaagccaaggtgactgaggagcttgcagcagctacggcacaggtttcgcacctgcagctgaagatgaccgcccaccagaagaaagaaacagaactgcagatgcagctaaccgaaagtctcaaggagaccgatctgctccgtgggcagctgactaaggtccaggctaaactttccgaactccaggagacatcggaacaggcgcaaagcaaattcaaatctgaaaaacaaaatagaaaacaacttgaactcaaagtgaccagcttggaggaggaactgactgacctacgcgtagagaaagagtccctggaaaagaatctgtccgagaggaagaaaaaatccgctcaggaaaggtctcaggcagaagaggagatcgatgagatccgtaaatcctatcaggaagaactggataagcttagacagctgctgaagaagactagagtgagcacagaccaggcagcggcagaacagctctcactcgtgcaggcagagctccagacacagtgggaagccaagtgcgagcacctgctcgcttcagccaaagacgagcaccttcagcagtatcaagaagtttgcgcccagcgggacgcttaccagcagaagctagtgcaactgcaggaaaagtgccttgctcttcaggcgcaaatcacggcattgactaaacagaacgaacaacatattaaggagctggagaagaataagtctcagatgagcggcgtcgaggccgccgcttccgaccccagcgaaaaagtaaagaagatcatgaaccaagttttccaaagcctgagaagagaatttgagctggaggagagttacaacgggcgtactatactgggaacaattatgaatacaatcaagatggttactctccagctcttgaaccagcaggaacaggagaaagaagagtcttcttctgaagaagaggaggagaaagctgaggaacggccccgacgccccagccaggaacagtctgcttctgccagcagcggtcagccgcaagcgccactgaacagagaacgccctgaatcgccgatggtccccagtgagcaagtggtggaagaggccgtgcctctcccccctcaggccctgacgacttctcaagatgggcaccggcgcaagggggattcagaggctgaggcattgagcgagatcaaagatggtagtctacctcctgaactaagctgtattccatctcaccgcgtgctggggccaccaactagtattccccccgaacctctgggtccagtttctatggactctgagtgtgaagaaagtctcgcagctagccctatggctgcaaagcctgataacccctctgggaaagtgtgcgtcagggaagtggcgcctgatggtcctctgcaggagtcttctacaagactgtcactaacaagtgaccccgaagagggtgatccgctagcattgggcccagagtctccaggcgagccccagccccctcagctgaagaaagatgatgtgacgagcagtaccggaccccacaaagaactgtcttccacagaagccggctctacagtcgccggcgcggcacttagaccaagtcaccacagccagagaagcagtctctctggggatgaggaggacgaattgttcaaaggagctacgctcaaagcacttcgccctaaggcgcagccagaggaggaagacgaggacgaggtttccatgaagggtagaccaccccctaccccactgtttggggatgacgacgacgatgatgatatagactggctgggttag

SEQ ID NO: 16966 - DNA, 1653 bp, synthetic construct
  source 1..1653: mol_type = other DNA; note = Synthetic coding sequence
atgaaatgggaagagtatgaggagctcctgcactatgcaatcgtgaccccaaacatagaaccttgcgctagtcagagtagccatccgaagggggaactcgtacccgacgttagaatctcgactattcacgacattctccactctcaaggcaacaacagcgaggtgcgggagaccgccattgaggtaggcaaggggtgcgattttcatataagttcacatagcaagacagacgaaagcagtccggtgctctcccctcgcaagccctcacatcctgtcatggacttctttagctctcacctactggctgattcgtcctcacccgccaccaactcttctcataccgatgcgcacgaaattcttgtgtctgatttcctggtgtctgacgagaatctacagaagatggagaacgttctggacctttggtcctctggccttaaaacaaatatcatatccgaactgtctaaatggaggcttaatttcatagattggcaccgcatggagatgcgaaaagagaaggaaaagcatgctgcacacctgaagcaactgtgtaaccaaataaacgaattgaaagagttgcagaagacattcgaaatctcaatcggtaggaaagacgaagtgatctcaagcctaagccatgccatcggtaaacagaaggagaagattgaactgatgagaacctttttccactggaggatcggacatgtaagagccagacaggacgtttacgaaggaaagttggctgaccaatactaccagagaaccctgctgaaaaaggtgtggaaggtatggcgttcggtcgttcagaagcagtggaaggatgtggtggagcgggcctgccaggccagagccgaagaagtatgcatccagatatcgaatgactacgaagctaaagtggccatgctctcgggtgctttggaaaatgctaaagcagaaatccagcgcatgcaacacgagaaggagcactttgaagatagcatgaagaaggcgttcatgaggggcgtgtgcgcactgaatttggaggctatgaccatctttcaaaatcgcaacgacgccggaatcgacagcaccaataataaaaaggaggagtatggtcctggggtgcagggtaaagaacactctgcccatcttgacccatctgctcccccgatgccacttcccgtgacgtctcccttactcccttccccgcccgcagccgtagggggagcgagtgcgaccgcagtgccctccgcggcaagcatgacgagtacccgcgcagcatccgctagttcagtgcacgttcccgtgtctgcactaggagccgggtcggccgcaaccgcagcttccgaggagatgtacgttccccgggtcgtgaccagcgcacagcagaaggctggaagaactataactgcaaggattaccggccgttgcgacttcgccagcaaaaatcggattagtagctcgctagcaattatgggggtctctcctcctatgtctagcgttgtggtggagaagcaccatcccgtgacagtgcaaacaattccccaagctacggcagcaaagtatccccgcactatccacccagagagcagcacgagcgctagccgcagtttgggcactaggtccgcgcatacacagtccctcacgtcggtccactccatcaaggtggtagactag

SEQ ID NO: 16967 - DNA, 402 bp, synthetic construct
  source 1..402: mol_type = other DNA; note = Synthetic coding sequence
atgagcccttcacagatgattatgccaaacgtcatggaaatgatcgctgcgctcggtcctggaccctctccctaccctttgccgcctccacccggggggactaatagcaacgactacagcagtcagggtaataattatcaaggccatggaaactttgatttcccccacggtaaccctggtggcaccagcatgaatgatttcatgcatggcccaccgcagcttagccacccacccgatatgcccaacaatatggcagcactagaaaagccactgagccatcccatgcaagagaccttgcttcctgaactgactaatccagacgagctgctctcctacctggacccccccgaccttcccagtaacagcaatgatgacctcctgagcctctttgaaaataactag

SEQ ID NO: 16968 - DNA, 1473 bp, synthetic construct
  source 1..1473: mol_type = other DNA; note = Synthetic coding sequence
atgtcatcatgcgtgagttctcagcctagctcaaatcgggcagcccctcaggacgagctgggtggacgaggctcatcttcgagcgaatcgcagaaaccgtgtgaggctctccggggtttatcttctctgtcaatacacttaggaatggagtcatttatcgttgtgaccgaatgcgagccaggatgcgctgtagatctgggtctggcccgtgaccgcccactggaggcagatggtcaagaagtgccactggataccagcggctcacaggcccggccacatttgtcagggaggaagctgtccctgcaggaaaggtcccaaggaggcttagccgccggcggtagcctggatatgaacggcagatgcatctgcccttctctgccttatagtcctgtgagtagcccccagtcaagtcccagactgccccggaggccaaccgttgaatctcaccacgtgagtatcacaggtatgcaagattgcgtgcagttgaatcagtataccctgaaagacgagatcgggaagggttcctatggtgttgttaagttagcatataacgaaaatgacaacacgtactacgcaatgaaagtgctctccaagaagaagttgatcagacaagccggatttccaaggcgtccccccccccgcgggaccagacccgctcctggtggctgcatccagccacggggacctatcgaacaggtgtaccaggaaatcgctatcctcaagaaacttgaccatccgaacgtggtgaaactggtcgaagtcttggacgaccctaatgaagaccacttgtacatggtgttcgaattggtgaatcagggacccgttatggaggttcctactcttaaacccctgtccgaggatcaggctagattttatttccaggatctcattaagggtattgagtacttgcactaccaaaagattatccaccgagatattaaaccaagcaacctccttgtgggggaagatgggcacatcaagatcgctgatttcggcgtctcaaatgagtttaagggcagcgacgctctgctttctaacacagtcggcacccctgcgtttatggcaccagaaagcctgtctgaaacacgcaaaattttctccggtaaagctctggatgtgtgggccatgggagttacactctactgctttgtgttcgggcagtgccccttcatggacgaaagaatcatgtgtctccacagcaaaatcaagtcgcaggctcttgagtttcccgaccaacctgatatcgctgaggatctcaaggacctcataaccaggatgttagataagaatcccgagtcccgcattgtagtgccagaaatcaaaattctggtcaagacaatgatcagaaagcggtcttttggtaacccattcgaaggaagtcggcgagaagagcgttccctgtctgccccaggcaatcttttgactaaaaagccgaccagagagtgcgagtctctctcggaactaaagacctag

SEQ ID NO: 16969 - DNA, 1872 bp, synthetic construct
  source 1..1872: mol_type = other DNA; note = Synthetic coding sequence
atggccgctgcaaccggcgatcctggactaagcaagcttcagttcgccccctttagctctgcactcgatgtaggattttggcatgagctgacccagaagaaactcaacgaatatcgtctggacgaggcacctaaagatattaaggggtattactacaacggagacagtgccggcctcccggcaagactaaccttagagttctcagctttcgatatgtctgcccccactccagcccgttgttgtcctgctattggcaccttgtataataccaacacacttgaaagcttcaagactgctgataaaaagttactgctggagcaggcggctaatgaaatttgggagagtattaagtccggtacagcactggaaaaccctgtgctgctgaacaagtttctcttacttactttcgccatcgaagcactggaatgtgcatacgacaatctctgtcagaccgaaggagtcactgcgctgccttacttcctgatcaagtatgatgagaatatggtcttggtatcgctcctgaaacactactcagattttttccagggccagaggaccaaaatcactatcggggtgtatgacccctgcaatctggctcagtatcctggatggcctttgcgtaattttctggttttagcagcgcatagatggagtagttcctttcagtcggtggaggttgtctgcttccgagaccgaacaatgcaaggagctagggacgtcgctcattctataatttttgaagtgaagttgccagagatggcattcagcccagactgcccaaaggccgtgggatgggaaaagaatcagaaaggaggaatgggccccagaatggtgaatctctccgagtgcatggatccaaaaaggctggcagaaagcagcgtcgatttaaatctcaagctgatgtgctggaggctcgtccccactctggatctggataaggtggtgagcgtgaagtgtctgctactcggcgccgggacactgggctgcaacgttgccaggactctgatgggttggggcgtaagacacattacctttgtggataacgctaaaatctcatacagcaaccccgtaaggcaaccattgtatgagttcgaggactgcctgggaggaggaaagcctaaagcgctggcagcagccgataggcttcagaagatctttcctggggtgaatgctcgcggtttcaatatgtccatccctatgcccggacatcccgtgaattttagctccgtcactctggaacaggctcgcagggacgttgagcagttggaacagctgattgagtcccacgacgtcgtcttcctcttgatggatactagggaatcacgttggctgccggccgtcatcgcagcctccaagcgaaaactagttattaacgctgctctcggtttcgacacctttgtcgtcatgagacacgggctaaaaaaacccaaacagcaaggagcgggcgatttgtgtcctaatcatcctgtggcgtctgctgacctcctggggtccagcttgttcgctaacatccccgggtacaagctcggatgttacttttgcaatgacgtcgtagccccgggggacagtacccgggaccgcaccctcgaccagcagtgtaccgtgagtaggcctggacttgccgtgattgctggtgctttggcagtcgagctgatggtatctgtgctgcagcaccctgagggagggtacgcgatcgcatcatcgtctgacgaccgcatgaatgagccaccaacctccctgggcctggttccccatcaaattaggggttttcttagccggttcgataacgtgctcccagtgtccttagcgttcgataagtgtactgcatgctcaagcaaaatctgggacatgagtgacgatgaaaccatatag

SEQ ID NO: 16970 - DNA, 966 bp, synthetic construct
  source 1..966: mol_type = other DNA; note = Synthetic coding sequence
agaaggaatgtggaactgattaatgaggaagcggctatgttcgatagtctcctgatggattcctacgtaagcagtacgaccggtgagtctgtaatcactagagaaatggtcgagatgctgttcagcgacgacagcgacctgcagctagctacaacccagaagtttaggaaactactgtccaaggagccaagccctcccatagatgaggtaattaacaccccacgcgtggtagaccggtttgtggaattcttgaagcgcaatgagaattgtaccctgcaggcagtttgggcacttgggaatatagcgggggatagctccgtatgcagggactatgtgctaaactgttccatcctgaaccctctcttgacgctgctcaccaagagcacccggctgacaatgactaggaacgccgtttgggcgctgtccaatctgtgccgcgggaagaaccctccgcccgagtttgccaaggtgtcgccttgtcttcccgtgctgagccgccttctgttcagctcagattcagacctgttggcggacgcttgctgggccctcagctacttatctgacgggcctaacgaaaagattcaagccgtgattgacagtggtgtctgcagacggctagtggaattgctgatgcataatgactataaagtggcatcccccgccctacgggccgttggaaatattgtgacaggcgacgacattcagacacaagtgatcctaaactgttccgccctgccgtgcctgttgcatttgctgtcctctcccaaagaatcgattcggaaggaggcatgttggactatcagtaatatcaccgccggaaatcgagcccaaatacaggccgtgattgacgcgaatatctttccggtgctgatagagatcctccaaaaggccgagtttcggaccagaaaagaggccgcctgggcaatcactaacgccactagtggcggcacacccgagcagatttag

SEQ ID NO: 16971 - DNA, 795 bp, synthetic construct
  source 1..795: mol_type = other DNA; note = Synthetic coding sequence
atggggggtgcccagctagagctgcctagcggcgcaaggcctggggtgtgcgtgaggaggagctttagagcacacgctggcgaccagcccaggagaccacccggacctattccagtgccaggaactatgaagcaggagagcgcggcacctaatacacctccaacttctcagtctccaactccctcagcccagtttcccaggaacgacggcgatccgcaggccctctggatttttggctacgggagcctggtgtggagacccgatttcgcttattctgactcgcgtgtcggattcgttaggggatacagcagacgtttctggcagggcgatactttccaccggggatcagacaagatgcccggaagggtggttacattactggaagatcatgaaggatgcacatggggcgtagcctaccaggtgcaaggcgaacaggtgtccaaggctcttaagtacttgaacgtgcgggaggctgttctgggtggctacgacacgaaggaggtgacgttttaccctcaggacgcacccgaccaacccctcaaggcccttgcctatgttgcgacaccacagaacccagggtacctgggtccagctcctgaggaggccattgctacgcagatcctggcttgcagaggattctctggccacaatctggagtacctgctgcgcttggcagacttcatgcagttgtgcggaccacaggcacaggatgaacacctggctgccattgtcgatgccgtagggactatgctgccctgtttctgtcctactgaacaggctcttgctctcgtgtag

SEQ ID NO: 16972 - DNA, 747 bp, synthetic construct
  source 1..747: mol_type = other DNA; note = Synthetic coding sequence
atggccactagcgctcccctgagaagtcttgaagaggaagtcacttgctctatctgtttggactatcttagggatcccgtgaccatcgattgcggccatgtcttctgccgaagctgcactactgacgtcagacctatttccggcagtcgacctgtatgtcctctgtgcaagaagccttttaaaaaggaaaatattcgaccggtgtggcagctggcatcactggtggagaacatcgaaaggctcaaggtagataagggccggcaacccggagaagtgactcgcgagcaacaggatgcaaagctttgcgagcggcaccgcgaaaagctgcactactactgtgaagacgacggcaaactgctgtgcgttatgtgtagagaatcaagggagcatcggcctcacaccgctgtgctgatggagaaagccgcccaaccccaccgggaaaagatcctgaaccacctgtcaaccctgcgccgggatcgagataaaatacagggattccaggccaagggagaggccgatattctggcggcccttaagaaactccaggaccagaggcaatacatcgtcgctgaattcgagcagggtcatcagtttctccgggagcgggaggagcatttacttgaacagcttgccaagctggagcaggagctgaccgaaggaagagagaagttcaagagcaggggtgtgggtgagctcgcgcgcctggctctcgtgatcagtgagctggagggcaaggcacagcagtag

SEQ ID NO: 16973 - DNA, 768 bp, synthetic construct
  source 1..768: mol_type = other DNA; note = Synthetic coding sequence
atgtcttcttcaatgtggtacatcatgcagagcattcagtctaaatactcgttgagtgaaaggctgatccggaccatcgccgctatccggtcgtttccacacgacaatgtcgaagacctgatccggggaggcgccgatgtgaattgtactcatgggaccctgaagccactccactgcgcttgcatggtttccgatgcagattgcgtggagttacttctggagaaaggggccgaagtcaacgctctggatggctataaccggacggcattgcactatgcggcggagaaggacgaggcctgcgtcgaggtgctcctcgaatatggcgctaatccaaacgccctcgactacaataacgatacccccctttcctgggccgctatgaaagggaacctggagtccgtatcaatcctcctagattatggggccgaggtgagagtgataaacctgattggtcagacaccaatctctaggttggtagcactgctggttagaggccttggtacagaaaaggaagactcctgtttcgagcttctccaccgcgcagtgggccacttcgagctgcgcaagaacgggactatgccaagagaagtggcaagagatccccagctgtgtgagaagctgacagtcctttgtagcgcacccggaaccctgaaaactttggccagatacgctgtccggcgctccctcgggttacagtatcttccagacgcggtgaagggtctaccgctgcctgcttcactgaaagagtatctgctactgctcgaatag

SEQ ID NO: 16974 - DNA, 585 bp, synthetic construct
  source 1..585: mol_type = other DNA; note = Synthetic coding sequence
gaacccgtgcagcctcattggttctattgcaaagaagtggagtataaacagctgtggatgcccttcagtgtgttcgatagccttaatctcgaggaaatatacaacagtgtgcagcccgatcctgaaagtgtcgtgctgggcactgacgggggccgttacgacgtgtatctgtacgaccgtattcggaaggctgcttattgggaggaggagcccgccgaagtaagaaggtgcacatggttctataaaggcgacaccgactcccgctttatcccatacaccgaagaattttcagagaagctggaagttattgtgcagttccagccaagctccgtacccgacgagtggggcacaacgcaagacggacaaacaagaccacgtgttgtgaagcgtggtatcgatgataacctcgatgagataccggatggagaaatgcctcaggttgatcacttggtctttgtcgtccatggtattgggcccgtgtgcgacctgcgcttccgatctatcatcgagtgcgttgatgatttcagggtcgtctctctcaagctattgaggacccatttcaaaaaaagccttgacgacggctag

SEQ ID NO: 16975 - DNA, 981 bp, synthetic construct
  source 1..981: mol_type = other DNA; note = Synthetic coding sequence
atgcctcacctccccttggccagcttcagaccaccgttttggggcctgcgccactcacgaggcctgcctcgcttccattccgtcagtacgcagtccgaaccgcacggatcccctatcagtcggagaaaccgagaagccaaacagaaaaggctgcgcgaaaagcaggctacactggaagcagagattgcaggagaatctaagagccccgcagagtccattaaagcatggcgcccaaaggaactagtcttgtacgaaattcctaccaagccaggcgagaagaaggacgtatcaggtcccttacctcctgcatatagcccccggtacgtggaggccgcctggtatccttggtgggtgagagaaggcttcttcaagcccgaatatcaggcacgcctcccccaggccaccggtgaaacctttagcatgtgtatcccccccccaaacgtaaccggatcccttcacatcggccatgcgctgactgtagctatacaagatgccctcgtgcgatggcacagaatgcgaggcgatcaggtcctgtgggtgcccggaagcgaccatgccgggatcgcgactcaggccgtggttgagaaacagctctggaaagaacgtggagtcaggaggcatgagctgagccgggaagccttcctgagagaggtgtggcagtggaaggaagccaaagggggggagatctgtgagcaactgcgcgccctcggcgcctctcttgattgggatcgagaatgcttcaccatggacgtagggtcttcagtcgctgttaccgaagcatttgtgaggttgtacaaggctggcttactgtatcgaaatcaccagctcgtgaattggtcttgcgctttacgctcagccattagcgacatagaggtggaaaatcggcccttacccggccacacccaattgagactgccaggctgtcccacccccgtgagttttggcctgctcttctccgtggcgttcccagtggacggttag

SEQ ID NO: 16976 - DNA, 990 bp, synthetic construct
  source 1..990: mol_type = other DNA; note = Synthetic coding sequence
atggccggagctttggaaggagacatcttcatcggacctaaggccgaagagcacagggggctcctcagcattcgctatcccatggaacacggcatagtgaaggactggaacgacatggagaggatctggcaatacgtctactccaaagatcagttgcagacttttagcgaggagcacccagttctcctaaccgaggcaccactgaacccaagaaagaatcgcgagcgggccgccgaggtattttttgaaacctttaacgtgccggctctatttatttctatgcaggccgtgttgagcttgtacgccacggggagaacgacaggcgttgtcctggattcgggcgatggagtgacccatgcagtccccatttatgaggggttcgcaatgccccacagtatcatgcgcatcgatatcgctggacgggacgtatctaggttcctacgattgtacctgcgcaaagaagggtacgattttcattcaagctcagaattcgagatcgtgaaggccattaaggagcgcgcctgctatctgtcaattaatccccagaaagacgaaacgctggagacagagaaggctcagtactatttgcccgatggctctactattgaaataggtccatcacgttttcgagccccagagttgttgttcaggccagacctcatcggggaggagtcagagggaatacacgaagttctggtgttcgccatccagaaaagcgacatggatctgaggcgcactctgttctccaacattgtgctgtctgggggctctaccctgtttaagggcttcggcgatcgtttattgagtgaggtcaagaagctggctcccaaggacgtaaaaatccgcatcagtgccccccaggaaaggctctactccacctggatcggtgggtctatactggcttccctggatactttcaagaaaatgtgggtttctaaaaaggaatacgaggaggatggtgccaggtctatccaccgaaaaactttctag

SEQ ID NO: 16977 - DNA, 450 bp, synthetic construct
  source 1..450: mol_type = other DNA; note = Synthetic coding sequence
atggaaaagacggagctgatccagaaagcaaagctggctgagcaggccgagcgatacgatgatatggccacatgtatgaaggccgtcacagagcaaggtgcagagcttagtaatgaggaaagaaacctactgtcggtcgcatacaagaatgtggtgggcgggcggcgttccgcgtggagggttattagttcgatcgagcagaaaaccgacacgtctgataaaaaactccaactcattaaggattatcgggagaaagttgagtctgagctgcgtagcatatgcaccactgtgctggaactcctggataaatacctaatcgcaaatgccacaaaccccgaatccaaggtgttttatttgaagatgaaaggagactatttccggtatctggccgaagtcgcctgtggcgacgaccgtaaacagactatcgacaattctcagggagcctattag

SEQ ID NO: 16978 - DNA, 735 bp, synthetic construct
  source 1..735: mol_type = other DNA; note = Synthetic coding sequence
atgctctctgataggaagagagagttggagcatcggttatcagcaacactggaggagaatgatttgcttcagggcaccgtcgaagaactgcaggaccgggtccttattctggagaggcaaggacacgataaagacctgcaattgcaccagagtcaattggagctgcaggaagtccgcttgagctgtcggcaattgcaggttaaagtggaggagttaacggaggagcgaagtttgcaatcgtcagccgcgactagcacaagtttgctctcagagattgagcagtcaatggaggctgaggaactcgagcaggagcgcgaacaagtgacattgctatctgttgaaatgaccgccctgaaggaagagcgggatcgcctccgtgtgacatctgaagataaagagcctaaggagcagctgcaaaaggccattcgcgatagagatgaggccatcgccaaaaagaatgccgtcgaactagagctggccaaatgccgcatggatatgatgtcgcttaattcacagcttttggatgctatacagcagaagctgaacctgagccagcagctggaagcatggcaggacgatatgcaccgggtgatcgaccgccagctcatggacactcacctcaaagagcgttcacagccagcagctgccctctgccggggccactctgctggcagaggcgacgagccttctatcgccgagggaaaacgcttgttttctttctttagaaagatctag

SEQ ID NO: 16979 - DNA, 603 bp, synthetic construct
  source 1..603: mol_type = other DNA; note = Synthetic coding sequence
tagcacatgctgtccaaggtcggtatgtgggatttcgatattttcttgttcgatcgcctgacaaatggcaatagcctggttacgctcttgtgtcatctgttcaatacccatggcctcattcatcactttaaattggacatggttactctgcatagatttctggtgatggtgcaggaggactaccactcccaaaatccttaccacaacgcggttcacgccgccgacgttactcaagccatgcactgctacctcaaggaaccaaagctcgcttctttcttgactcctctcgatattatgttggggctattggccgcagcagcacacgacgtagatcaccctggcgtgaatcagccgttcctgatcaagacaaaccaccacttggctaatctctatcaggtgcgggaacccaacctggagcctgccacagtgtggtctatagctttaggacccgtgctgaaacccgaaagctgcccttggagaaaaccctgcttcagggtgctggaagtgcagcgccgcatgaagcacaacctttgcccacaaaagtttgtccagacccagatgctaaagatgtccaaaatccaggctaatttgatccccgtttag

SEQ ID NO: 16980 - DNA, 1728 bp, synthetic construct
  source 1..1728: mol_type = other DNA; note = Synthetic coding sequence
atggcgatggcgccgtcaccttcgctggtgcaggtatatacgagccctgccgcggtcgcagtctgggagtggcaagatggtctgggtacctggcacccatactccgcaacagtgtgcagctttattgagcagcagttcgttcagcagaagggccagcgatttgggctagggtcgctcgctcattccatcccactcgggcaagccgatcccagccttgcaccttatattatcgacctgccctcatggacccaattcaggcaggatacaggtaccatgcgagcagtgaggaggcatttgtttccccaacacagcgccccgggcaggggggtagtgtgggagtggctcagcgacgacggatcatggactgcatatgaggcatctgtctgcgactacttggagcagcaggtggccaggggcaaccaattggtcgacctcgcaccccttgggtacaattacaccgtaaactataccacacacacgcagacaaataaaaccagctcattttgtcgcagcgtcaggaggcaggctgggccaccttacccagtaacgacaattatcgctcctcccggacatacaggagtggcttgttcctgccatcagtgcctctccgggtcgaggacggggccggtcagcggcagatatcgccattcgatgacaaatctccccgcataccctgtaccacagcaccccccccatagaaccgcctctgtatttggtactcatcaggcgtttgccccttataataagccgtccctctccggcgcccggagtgcaccccgtctaaatactacaaatgcctggggcgccgctcccccatcactcggttcgcagcctttgtacaggagttccttatcccacctgggcccccaacatcttcccccaggatcctctacaagcggagcagtgtcagcgtccctccctagtggcccctctagcagtcccggatctgttcccgccaccgttccaatgcagatgccaaaacctagccgtgtccagcaggcacttgccggcgccacacctaaacctgaacctgagcccgaacaggttatcaagaattacacggaggagttgaaggtgcctcctgacgaagattgtataatctgtatggagaagctgagcactgccagcggatacagcgatgttactgacagcaaagcgatcggaagtctggcggtgggccacctgacaaagtgtagccacgccttccatttgctgtgtcttctggccatgtattgtaatgggaataaagacggatcactccagtgccccagttgtaaaactatttacggggaaaaaaccgggacacagccgcaggggaaaatggaggtgctgcggttccagatgagtctcccagggcatgaggactgcggtacaatcctcatagtctacagtattcctcatggaatccagggcccggaacatcccaaccccggcaaaccctttactgctcggggctttccaaggcagtgttacttgccggataacgcacagggccgaaaagttctagagctgctaaaggttgcttggaagaggcgcctgatctttaccgtagggacctcttcaacaactggggagactgacacagtggtttggaatgagatccaccacaagacagaaatggataggaacatcaccggacatggctacccggacccaaattatttgcagaacgtgttggccgaactggcggcacagggagtgactgaggactgcctagaacaacagtag

SEQ ID NO: 16981 - DNA, 3036 bp, synthetic construct
  source 1..3036: mol_type = other DNA; note = Synthetic coding sequence
atggtctcctctgacaggccagtcagtctcgaagacgaagtgagtcattcaatgaaagaaatgatagggggatgctgcgtgtgtagcgatgagcgcgggtgggctgagaaccccctggtgtattgtgatggtcatggttgctccgtggccgtgcaccaggcatgttatggtatcgtgcaggtcccgacaggcccatggttctgcaggaagtgtgagagccaggaacgcgccgcaagggtgcggtgcgagttgtgccctcacaaagatggtgcgcttaagcggaccgataatggtgggtgggcccacgtagtttgtgccctgtatatccccgaggttcaatttgccaacgtgtcaacaatggaaccaatcgtgctgcagagcgtgccccacgatcgttataataagacttgctatatctgtgacgagcagggtagggagagcaaggctgctacaggggcgtgtatgacctgtaacaagcatggatgccgccaggcatttcatgtaacctgcgcccagtttgccggtctgttgtgcgaagaggaggggaacggggcagacaacgttcagtattgtggctactgtaagtatcacttctctaaactcaagaagtccaaaagggggtccaacagatcttacgaccagtcattaagtgatagctcctcccacagccaggataaacaccacgaaaaagaaaaaaaaaagtacaaggagaaggacaagcacaaacaaaaacacaaaaagcagccagagcccagccccgcattagtgccctcgctcacagtgaccaccgagaagacttatacctctacgtcgaataactccatttccggctcccttaaacgcctggaagataccacggcccgatttaccaatgcaaactttcaggaagtgtctgcccacacctcctccgggaaggatgtgagcgaaacaaggggttcggaaggaaaaggaaagaagagttccgcgcactctagcgggcagcgggggcggaagccaggaggtggccgcaaccccgggacaaccgtatccgctgccagtccttttcctcaggggagctttagcgggacccccggctcggtgaaatcgtcaagtggctcatcagtacagagccctcaggatttcctgtcatttacggacagcgatctgcgtaacgacagttactcccactcccaacagagctccgccaccaaggatgtgcacaagggtgaatctgggtcacaggagggtggcgttaacagctttagcaccttgatcgggcttccctcgacttcagccgttactagtcagccgaagagttttgagaatagtcctggcgacctgggtaacagtagtttgcccacagccggatataaacgcgcccagaccagtggcatcgaggaggagaccgtgaaggaaaagaaaagaaagggaaacaagcagtctaagcacggccccggacgtccgaagggcaacaaaaaccaggaaaacgtaagccatctgagtgtctccagtgccagcccaacctcctcagtggccagcgctgctggtagtattacctccagtagcttgcaaaagtccccaaccctcttaagaaacggctccctgcagagcttatcagtgggctcaagcccagtgggatctgagatttccatgcaataccggcatgatggcgcatgtcctactaccacattctctgagctcttaaacgccattcataatggcatatacaattcgaatgacgtcgcagtttccttccccaacgtggtttcaggcagcgggtcctccacacctgtcagttcaagccatctgcctcagcagtcgagcgggcatctgcagcaagtgggggcactgagccccagcgccgtgagcagtgcagctcccgccgtggccaccactcaggctaatacgctctccggatcatcactgtctcaggcaccttctcatatgtacggcaaccgctccaattcttccatggccgcccttatcgcgcagtctgaaaataaccaaacggatcaggatctaggcgacaacagtagaaatcttgtcggtcgtggctcatctcctcgcggcagcctgagccctaggtccccagtcagcagcctgcagattaggtatgatcaacctggaaacagcagcctggaaaacctgccccctgtcgctgcatctatcgaacagctcctcgagcgacaatggtcagaaggtcagcaattcctgctggagcaaggcactccatctgacattctggggatgctgaaatcactgcaccaacttcaggtggaaaatcgacggctagaagagcagattaaaaatctgacagcaaaaaaggagcgcctgcagctactgaatgcccagctcagcgttccgttcccaaccattactgcaaatccatccccgtcgcaccagatccatactttcagtgcgcagactgcaccgaccaccgattcgctcaactctagcaaatctccacacattggtaatagcttcctgcctgacaatagcctgcctgttctaaaccaggatctcacatccagtggccagagcacttcctcttccagcgccctatccacgccccctccagccggccagtcacctgcccaacaggggagtggcgttagtggcgtccagcaggtgaatggcgtcaccgtcggcgcactcgcttctggaatgcagcccgtgacatccactattcctgccgtctccgcagtcggcggcattatcggcgctctgccaggcaatcagctcgcaatcaacggcatcgtcggggccctcaacggagtgatgcaaacccctgttacaatgtcccaaaatcctactcccttaacacacacaacggtgcctccaaacgcaactcatccgatgcccgcgacactgaccaacagcgcgtccggtctggggttgctatctgatcagcagcggcagatcttgattcatcaacaacagttccagcagctgctcaattcccagcagctaacgcccgttcaccgccacccccactttacacaactccctcctacccatttctccccgagtatggagatcatgcaggtccgcaagtag

SEQ ID NO: 16982 - DNA, 3786 bp, synthetic construct
  source 1..3786: mol_type = other DNA; note = Synthetic coding sequence
atggccgccgccgccgcctctggcgcaggtggggctgctggagcaggtaccggcggcgctggaccagctgggaggctcctcccacccccagcgcccggaagcccagctgcacccgcagccgtgtcgccagcggccggtcaaccgcgacccccggcccccgctagcagaggaccaatgccagcacgcatcggatactatgagatagatcggaccattgggaagggcaatttcgcggtggtgaagcgggccacccacctagtcactaaggcaaaggtcgcgatcaaaattattgataaaacccaattagacgaggagaatttaaagaaaatcttccgggaggtacagatcatgaaaatgctttgtcaccctcatataatacgtctgtaccaggtgatggagaccgagcgcatgatctacctcgttacagaatatgcatcaggcggagaaattttcgatcacctggtggctcacggaaggatggccgagaaggaggcccgtcgtaaatttaaacagatcgtgaccgcagtatatttttgccactgccggaacattgtgcatagggatttaaaggcggagaatcttctgctggacgctaatctgaatataaagatcgcggatttcggtttctcaaacctgtttacgccaggacaactgctaaaaacctggtgcggctcaccgccatacgccgctcccgagttgtttgaaggcaaggagtacgatggtccaaaggtcgatatttggagtctgggtgtagtgctatacgtgctggtgtgtggggctctgccgtttgacggctccacattacaaaacttgagagcccgagtgttgagcggcaaattccgtattcctttcttcatgagtacagaatgcgaacacttgattcgacatatgctggtgctcgaccccaacaagagactgtcaatggagcagatatgcaagcataagtggatgaaactaggagatgccgaccctaactttgaccgattaattgctgagtgtcagcagttgaaggaagagcggcaggtggatccgttgaatgaggacgtgctcctggccatggaggacatggggctcgacaaagaacaaactctgcaggcagagcaggctggtaccgctatgaacatcagtgtgccacaggtccaacttatcaatcccgagaatcagattgtcgagccagatggaacattaaacctagacagtgacgagggggaggagccttcccctgaggctctcgtcaggtacctgtcaatgcggcgccacaccgttggcgttgcggaccctcgcaccgaggtgatggaggatcttcaaaagctgttgccaggctttccaggggtcaatccacaagccccctttctccaggtcgcccctaacgttaacttcatgcacaacctgctgcccatgcagaaccttcagcctacggggcagctcgagtataaagagcagtccctactgcagccgcccactctacagttgctgaacggtatgggacccttaggacgcagagcctcagatggtggcgctaacattcagctacatgcccaacagctgctgaaacgtccacgggggcccagcccactggtcactatgaccccggccgtaccagccgtaacacccgtggacgaggagagcagcgacggagaacccgatcaggaggcggtgcaacgctatcttgcaaaccgtagcaagaggcacactctcgccatgacaaatcccactgccgagatacctccggacctccagcggcagttgggccagcagccctttagatctagggtctggcccccccacctcgtgcccgatcagcataggtcgacctacaaagactccaatactctccacctgcccactgagaggttcagtcctgtacgtcgcttctcagatggcgccgcatccatccaggcattcaaagcacacttggaaaaaatggggaacaactcttccattaagcaacttcagcaggagtgcgagcagctgcagaagatgtatggcggccaaatcgacgaaagaactcttgagaagacacaacagcaacacatgctgtatcaacaggagcaacatcatcagattcttcaacagcaaatccaagattctatctgcccaccgcagccctccccccccctgcaggccgcgtgtgagaatcagcctgccctgctcacccaccagttgcaacggctccggatccagcccagctctccacctcctaaccaccccaacaatcaccttttcaggcagccatctaattctcctccgccgatgagctcagctatgatccagccccatggcgcagccagcagctcccagtttcagggtctgcccagtcggtcagcaatctttcagcaacagcccgaaaactgctctagtccacccaacgtcgctctgacatgcctgggaatgcagcaaccagcgcagtctcagcaggtcacaattcaggttcaggaaccagtggacatgctctctaacatgccaggaacagcggccggtagttcaggaagaggcatcagcatatcaccttccgccggacagatgcagatgcagcatagaacgaacctgatggcgacattaagctacggtcaccggcccctttctaaacagctctccgctgattctgcagaggcacacagtgcccaccaacaacccccacattatacgacctctgcgctccagcaggctctactgagccctacaccacctgactatacgaggcatcagcaagtccctcacattctgcagggtctgttgtccccaaggcactcattgacaggccactcggacatccggctgccgcccaccgaattcgcccaactcattaagcgacagcagcaacagcgtcagcagcagcagcagcagcagcagcagcaggaatatcaggagctctttcgccatatgaatcaaggcgacgcaggaagccttgctccctctctgggcggccagtccatgaccgagaggcaggctctgtcatatcagaatgctgactcataccaccaccacacaagcccccagcacctcctccagatcagagctcaggagtgtgtgtcccaagcctcttcaccaactcctccgcacggatacgcccaccaacccgctctgatgcattccgagtccatggaagaggattgttcttgcgagggggcaaaggatggttttcaggattcaaaatcatcgtcgactctgaccaaaggctgtcatgattcaccacttctgctgagcactggggggcccggggaccctgaatctctgttggggacggtaagccacgcgcaggaactggggattcacccatacggccaccagcctacggccgcattctccaagaataaagtgcctagccgcgagccggtgattgggaattgcatggatagatcatccccggggcaagcagtagaacttccagaccacaacggtctggggtaccctgccaggccatctgtacacgagcatcatcggcccagagctctgcagcgtcaccacacgatccagaattcagatgatgcctatgtgcagctggacaatctccctggtatgtccctggtggccggcaaggccttaagtagcgcccggatgtcagacgctgtgctctcacagagttcacttatgggctcacaacaattccaggatggcgagaatgaagagtgtggcgccagtttgggcggccacgaacaccccgacctgagtgacggatcacaacatcttaatagctcctgctaccctagtacgtgtatcaccgacattctgctgagctataagcaccctgaagtctcttttagcatggaacaggccggagtttag

SEQ ID NO: 16983 - DNA, 519 bp, synthetic construct
  source 1..519: mol_type = other DNA; note = Synthetic coding sequence
atgtcttctaacgagtgtttcaaatgcgggcggtctggacactgggcacgcgagtgtccaacaggagggggaaggggtaggggcatgagatctcgcgggcgcgggtttcaattcgtgagctccagcctgccagacatttgctatcggtgtggcgagtctggacacttagctaaagattgcgacctgcaagaggacgtcgaggcttgctacaactgtgggcgcggcggacacattgctaaggattgcaaggagccgaaaagggaacgggagcagtgctgctacaactgcgggaagccaggccacctcgctagagactgtgatcacgccgatgaacagaaatgttattcttgtggcgaatttggacatatccagaaggactgtacaaaagtgaagtgctatcggtgtggtgagacaggacatgtggccatcaactgtagcaagaccagcgaagtcaactgttacagatgtggcgaatcaggccatttggcccgcgaatgtaccattgaggcgacggcctag

SEQ ID NO: 16984 - DNA, 471 bp, synthetic construct
  source 1..471: mol_type = other DNA; note = Synthetic coding sequence
atgcttgctgagaagttacccaatctgactcacttgaacctgagcggaaataaactcaaagacattagtacactcgagcctctcaagaagctggagtgtcttaaaagcctcgatctgttcaactgtgaagttaccaatctgaatgactatcgggagtctgtgttcaaacttctgcctcaactcacatacctggatggctacgatcgggaagatcaagaggcacccgattctgacgcagaagtcgacggagttgatgaggaggaggaagatgaggagggcgaggatgaggaggacgaggacgatgaggatggcgaggaggaagaatttgacgaagaggacgacgaagatgaagatgttgaaggcgacgaagatgacgacgaagtctcagaagaagaagaggagtttggcctggatgaggaagacgaggatgaggatgaggatgaggaggaagaggaaggaggcaaggggtag

SEQ ID NO: 16985 - DNA, 516 bp, synthetic construct
  source 1..516: mol_type = other DNA; note = Synthetic coding sequence
atgtcctccggtaacgcgaaaattgggcatccagcgcccaactttaaagccacggctgtgatgccagacggccagtttaaagacatatccctctccgactataaaggaaaatatgtggtctttttcttctaccctctggattttaccttcgtgtgtcctacagaaatcatcgctttttcggaccgcgcagaagaattcaagaaactcaattgccaggtcattggggcctcggtggacagtcacttttgtcatctggcatgggtcaataccccgaagaagcagggtggtctggggccaatgaatatccccctggtttccgaccctaaacgcaccattgctcaagattacggcgtgctgaaagcagatgagggaatatcctttaggggactcttcattattgatgacaaggggattctccgccaaataaccgtgaacgacctccccgtgggccgatccgttgacgagaccctacggttggtgcaggcattccaatttaccgacaaacacggagagtag

SEQ ID NO: 16986 - DNA, 111 bp, synthetic construct
  source 1..111: mol_type = other DNA; note = Synthetic coding sequence
atgatcgaaaaaatgcaggggtcacgaatggacgagcagcgctgcagctttcccccccccctgaagactgaggaagactatatcccctatccaagcgtgcacgaagtctag

SEQ ID NO: 16987 - DNA, 639 bp, synthetic construct
  source 1..639: mol_type = other DNA; note = Synthetic coding sequence
atgtcttccaaaggctcatcaaccgatggcagaactgacctcgccaatggctccctcagctccagccccgaggagatgtcaggagctgaggaaggtagagagacatcctcaggaatcgaagtcgaagcatctgacctgagcctttcactgactggcgatgacggcggtcctaataggactagtacagaaagtagaggtacggacactgagtcctctggggaggacaaagattccgattcgatggaggatacgggccactattctatcaacgatgagaaccgcgtgcacgatcggagtgaggaggaagaggaggaagaggaggaggaagaagaggaacagccacggaggcgagtacagagaaaacgcgctaacagggatcaggactctagtgatgacgaacgggctcttgaggactgggtatcttccgaaaccagcgcccttccgcggccaaggtggcaagccctgcctgccctccgcgaacgtgaactcgggtcctctgctcgcttcgtatacgaggcttgtggggcccgtgtttttgtccagcgattcaggctgcagcacggccttgaggggcataccggctgtgtgaacacgcttcatttcaaccaacgaggtacctggcttgccagcggctcatag

SEQ ID NO: 16988 - DNA, 726 bp, synthetic construct
  source 1..726: mol_type = other DNA; note = Synthetic coding sequence
atgaccagtgtcacccggtccgaaataatcgatgagaaaggacctgttatgagcaaaacccacgatcatcaacttgaatcttccttgagccccgtggaagtgttcgcaaaaacttctgcgtctctggagatgaatcaaggagtgagtgaagaacgcattcatctcggcagcagcccaaaaaagggcggcaactgcgatctctcgcatcaggagagactgcagtccaagagcctgcacctaagccctcaggaacagtccgcatcttaccaggaccgacggcagtcatggaggcgagcatcaatgaaagaaacaaaccgtagaaaaagcctccatcccattcatcagggaatcacagaacttagtagatcaattagcgtggatctggctgagagtaagaggctcggctgtctgcttctctcgtctttccaattcagcatccagaagctggagccttttctgagagacactaagggcttttccttggagtcatttagggctaaggcaagctctctatccgaggagttgaagcacttcgccgatgggctggagacagatggtacgctccagaagtgtttcgaggactcaaatgggaaagctagcgacttcagtctggaggctagtgtggctgaaatgaaggagtacattacaaagttttctctggagaggcaaacttgggaccaactgctcctccactaccagcaggaggctaaagagatcctttcttag

SEQ ID NO: 16989 - DNA, 1188 bp, synthetic construct
  source 1..1188: mol_type = other DNA; note = Synthetic coding sequence
atggcttcggccgcttctgtcaccagcctcgccgatgaagtaaattgcccaatttgccaggggactttacgggagcctgtgacaatcgactgtggacacaatttctgtcgcgcttgcctgacgagatactgcgagattcccggaccggacctggaagagtccccaacatgtcccctttgcaaagagccttttcggcctggatcctttagacccaactggcagttggcaaacgtggttgaaaatattgagaggctgcagcttgtttccaccttgggcctcggagaagaggacgtttgccaagagcatggcgagaagatttacttcttttgcgaagatgacgaaatgcagctgtgtgtggtatgtcgcgaggcgggagagcacgcaactcacacaatgcgattcctagaagatgccgcggcaccataccgcgagcagattcataagtgcctgaaatgcttgaggaaggagagagaagaaatacaggagatccaatcacgcgagaataaacggatgcaagttttactcacgcaggtgagtactaaacgccagcaggttatcagtgagtttgcccatctcaggaaatttctggaggagcagcagagtattctgctggcccaactggaaagtcaggatggggacatcctcagacagagagatgagtttgatctgctggtggctggagaaatctgtcggttttcagcacttatcgaagaactggaagagaagaacgaaaggccggccagggagttactgaccgacatccgctccactctgattcggtgtgaaacccgtaagtgcaggaagcctgtggctgtgtcacctgagctgggacaacgcattcgggactttccacagcaagcgctccctctgcaacgggaaatgaagatgtttttggagaagctctgttttgaactggattacgaacccgcgcacatctctttagacccgcagaccagccaccccaagctgctcctcagcgaagatcaccagagagctcaatttagctacaagtggcagaatagtcccgataacccccagagatttgatcgcgccacttgcgtgctggcacacaccggcataacaggcggccgacacacatgggtttggatggctcgtgtgcctggtgactcaggatgttgccaattctgttctcccccaagcgtgctcgggactgaagtggccgcatag

SEQ ID NO: 16990 - DNA, 1887 bp, synthetic construct
  source 1..1887: mol_type = other DNA; note = Synthetic coding sequence
atgagcgacaaatctgatcttaaggcggagctggagagaaaaaaacagagactggctcagatccgtgaagagaagaagcgcaaagaggaggaacgcaagaagaaagaagctgacatgcagcaaaaaaaggagcccgtacaagacgacagtgacctggatcgcaagcgtagggaaaccgaagctctcctgcaatcgataggaatctcccccgaaccgcccttagttcccacccctatgtccccttcttctaaaagcgtctctacacccagtgaggcagggagtcaggattccggcgatctcggtcccctcacccggaccctgcagtgggacaccgatccctctgtgctgcaacttcagtccgacagtgaactgggccgacggctccacaaacttggagtcagtaaggtgacgcaggtggacttcctgccacgtgaagtcgtcagttattccaaggaaactcagacccctctggcaacgcatcagtcggaggaagacgaggaagatgaagaaatggtcgaaagtaaagttggccaagattcagagctggaaaaccaagataaaaaacaggaggtgaaggaagcgccccctagggaactcaccgaggaagagaaacaacagatccttcatagcgaggaatttctgatcttcttcgataggacaatcagagtgatcgagagagcactggcagaggattcagacatcttttttgattactcgggacgggaattagaggagaaggacggtgacgttcaggctggggcaaacctatctttcaatcgtcagttttatgacgagcactggtccaaacaccgagtcgttacatgtatggactggtctctgcaataccctgagctgatggtcgcctcctacaataataatgaggatgcaccacacgagcccgatggggtcgctctagtatggaacatgaagtttaagaagactacaccagaatatgtgttccattgccagagcagcgtaatgtctgtgtgcttcgcgcggtttcatccaaatctcgtcgttgggggtacatatagtggccagatcgttttatgggacaaccgcagtcaccggaggactcctgtccagaggacacctctgtcagccgcagcacacacacatccggtgtattgcgtcaatgttgtgggcacccagaatgctcacaacctgattacggtctcaaccgatggcaagatgtgtagctggtccctggacatgctgagtactccccaggaaagcatggaactggtgtataacaagtcgaagcctgttgcagttaccggcatggccttcccaacgggcgacgtcaataacttcgttgtagggagtgaggaaggaactgtctacaccgcctgtcgccacgggtcaaaagcagggataggagaagtcttcgagggacaccagggaccagtgacaggaatcaattgccacatggccgtgggccctatcgacttcagccatctgttcgtgacctccagttttgattggacagttaaactctggacaacgaaacacaacaaaccattgtactcattcgaggacaatgctgactatgtctatgacgtcatgtggtctcctgtgcatcctgccctatttgcttgcgttgacgggatgggccgacttgatttgtggaacctgaataatgacaccgaagtaccaacagctagtgtggctattgaaggtgctagtgcactcaatagggtacggtgggcacaagccggtaaggaggtggccgttggtgactccgagggacgaatttgggtctacgatgttggcgagcttgcagtccctcacaatgacgagtggacacggtttgctcgtacccttgttgaaattcgcgccaatagagctgacagcgaagaagagggcacagtagagctatccgcctag

SEQ ID NO: 16991 - DNA, 1644 bp, synthetic construct
  source 1..1644: mol_type = other DNA; note = Synthetic coding sequence
atggcggggaccaaaaataagacacgagctcaggccaagacggagaagaaagcagccattcaggcgaaggcgggggctgagcgcgaggccacaggtgttgttagacccgtcgccaaaactcgggctaaggccaaggccaagactggttctaagacagatgctgttgctgagatgaaagccgtttccaaaaacaaggtggtggcggaaaccaaggagggagcgctcagcgaacccaaaaccctcggcaaggcaatgggcgacttcacccctaaagctggaaacgaatctacaagcagcacctgtaaaaacgaggcaggaaccgatgcatggttttgggcaggggaggaggcgaccattaacagctggttttggaatggggaggaggcaggtaattctttctcaactaaaaacgacaagccagaaatcggtgcgcaggtttgcgctgaagaacttgaacccgccgccggggctgattgcaagcctaggtcaggcgccgaagaagaggaggaagaaaatgtcatagggaactggttctgggaaggagatgacacttctttcgaccccaatcctaaacccgtctctaggattgtgaaaccccagccagtttacgaaattaacgaaaagaaccggcccaaagactggagcgaggtgacaatatggccaaacgcacctgcagttactccagcagtgcttggctttagaagccaagctcccagcgaagcttcccccccatcgtacattgtattagcttctgctgaggaaaacgcctgctcactgcccgttgccacagcctgtcgaccgagtcggaatacgaggtcttgctcgcagcctattcctgagtgccgatttgactctgatccgtgtatccagaccatcgatgagatccgccggcagatcagaatacgcgaggtaaacggcattaagccttttgcctgcccatgtaaaatggagtgttatatggactcagaagagtttgagaagctcgtgagtctgttaaagagtacaaccgaccctttaatccataagatcgcgagaattgctatgggcgtccacaatgtgcacccttttgcccaagagttcatcaatgaggtaggagttgtgacactaattgagtcgttactgagttttccttctcctgagatgcgtaaaaagaccgtcattaccttaaatcctccgagtggcgatgaacgccagcggaagattgaactacacgtgaaacatatgtgcaaagaaactatgtctttcccactaaactctcccggacagcagagcgggttaaaaatccttggccagctgaccaccgacttcgttcatcactacattgtggccaactacttttctgagttattccatttgctatccagcggcaactgtaagacccgcaaccttgtgctcaagctcttgttaaacatgtctgagaacccaaccgccgcgcgtgacatgattaacatgaaggctcttgctgcccttaagcttatttttaatcaaaaggaggctaaggccaaccttgtgtcaggcgtcgccatctttataaacatcaaggagcacattagaaagggctcaatcgttgtcgtggatcacctcagttacaataccctcatggccatatttagagaggtgaaagaaatcatcgagactatgtag

SEQ ID NO: 16992 - DNA, 747 bp, synthetic construct
  source 1..747: mol_type = other DNA; note = Synthetic coding sequence
atggcctttagcggtcgggctaggccttgcatcatcccagagaacgaagagatcccccgcgccgcactcaacactgtccacgaggccaacggtaccgaggatgagagggccgtgagcaagcttcagcggcgacacagtgatgtgaaagtatataaagagttctgtgacttctatgcaaaatttaacatggctaatgcccttgcgtcggcaacctgcgagcgttgcaagggtggctttgcaccagcagaaactattgtaaactctaatggggaactttaccacgaacagtgctttgtgtgtgcacagtgcttccagcagttcccggagggtttgttctacgagtttgaggggcggaagtattgcgagcacgacttccagatgctgttcgctccgtgctgccaccaatgcggggagtttatcattgggagagttatcaaggccatgaataacagttggcatcccgagtgcttccgatgcgatctttgccaggaggtgttagccgatattggcttcgtgaagaatgcaggccgccacttgtgtaggccgtgtcataatagggagaaagcccgcgggttaggcaagtacatatgtcaaaaatgccacgccatcattgatgagcagccgctcatcttcaaaaacgacccttaccaccccgatcacttcaactgtgcaaactgcggacaggagggctcggattgtcggtgtaccggagccgagaggggcgccattctgcctgcaatgccttag

SEQ ID NO: 16993 - DNA, 621 bp, synthetic construct
  source 1..621: mol_type = other DNA; note = Synthetic coding sequence
atggaaagcaattttaaccaagaaggcgtgccaaggccaagctatgttttttctgcagatcccattgcccggccatctgagatcaacttcgatgggatcaagctcgatctgtcccatgagttttctctcgttgcgcccaataccgaggctaactcctttgagtcgaaggactatttacaggtgtgccttcgcatccggccctttacccagtcagaaaaggagctggagtccgagggctgcgtgcacattctcgactctcagacagtggtcctgaaggaacctcaatgcatcctgggacgcctgagtgaaaaaagcagcggccaaatggcccaaaaattctctttctcaaaagttttcggccccgccaccactcagaaggaatttttccaagggtgtattatgcagcccgtcaaggatctcctcaaggggcagtcccggctgatctttacctacggactgacgaactctggcaaaacctacaccttccagggtactgaagagaacattgggatccttcctcgcaccctgaacgttctgttcgattctttgcaggaacgtctttatactaagatgaatctcaaaccacaccgtagtcgggagtatctccgtctcagttcttag

SEQ ID NO: 16994 - DNA, 990 bp, synthetic construct
  source 1..990: mol_type = other DNA; note = Synthetic coding sequence
atggaagtcgcggaaccatcatcaccaacagaggaggaagaggaggaggaggaacactccgccgaaccacgacctaggaccaggtccaacccggagggtgccgaggaccgggcggttggcgctcaggcttccgtgggctctcgttctgagggtgaaggtgaggctgccagcgccgacgacggtagtctgaacacatccggggcggggcccaagtcatggcaggttccaccgccagcccccgaggtgcagatcagaacgcccagagtgaactgtcccgagaaggtcatcatatgcttggatctgagcgaggagatgtctctccccaagctggaaagttttaatggctcaaaaacgaatgcccttaacgtgagtcagaaaatgatcgaaatgttcgtacgaaccaaacacaagatcgataaatcccatgagttcgctttggttgtcgtgaacgatgacactgcatggctgtctgggctgacctccgatccaagggagctctgctcatgcctatacgatttagagaccgcctcttgttctacttttaacatcagcggcgccagccccgctaggcagcagaagactgaactgcccgtaacagaaaatgtgcagaccattccacctccttacgtggtcaggactattctggtctactcccggccaccctgccagcctcagttctccctgacagagcccatgaaaaaaatgttccagtgtccctactttttcttcgacgtggtgtatattcacaacggaactgaggagaaggaagaagaaatgagctggaaggacatgttcgccttcatgggatcccttgatacaaaggggacgagctacaagtatgaggtggccttagccggacccgcccttgaactccataattgcatggccaaactgttggctcaccctcttcagcgtccctgccagagtcacgcaagttactccctgctggaagaagaggacgaggccattgaggtggaagccacagtgtag

SEQ ID NO: 16995 - DNA, 1620 bp, synthetic construct
  source 1..1620: mol_type = other DNA; note = Synthetic coding sequence
atggctacatctgccccactgaggtctctcgaagaggaagtgacttgttctatctgtttggactacctcagagatcctgtgaccattgattgtggacacgttttctgccgcagctgcacaacagacgttcgcccaatttctggttcaagacctgtctgtccgctgtgcaagaagcccttcaagaaggagaatatcagacctgtgtggcagctcgcgtccttagtggaaaatattgagagactgaaagtagacaaggggagacaaccgggggaggtcaccagagagcagcaagacgctaagctctgtgagcgccacagggagaaactgcactactactgtgaagatgatggtaaattgctatgtgtaatgtgtcgtgagtctcgggagcatcgtcctcacacagcagtgctgatggaaaaggcagctcagccccatcgtgaaaagatcttaaaccacctctctaccctgaggagggacagagacaagatccagggctttcaggccaagggagaggctgacatcctcgctgcactaaagaaattgcaggaccagcggcagtacattgtagccgaattcgagcagggccatcaattccttagggagcgggaggaacatttgctggaacagctggcgaaattggagcaggagctcactgagggacgggaaaagtttaagtctcggggagtcggggagctggcgcgcttggcactggttataagcgaactggaagggaaggctcagcagcctgctgccgaactgatgcaggatactcgggacttcctgaatcggtatccccggaagaagttttgggtcgggaagccaattgccagagtggtgaagaagaagactggtgaattttctgataagttgctttccctgcaacgcggcctaagagagtttcagggtaaacttctccgcgatctcgaatataagaccgtcagtgtcacacttgacccccaatccgcatccggctatctgcagctgagcgaggactggaaatgtgtaacgtatacaagtctgtacaagagcgcgtacctgcacccacagcagttcgactgtgagccaggcgtgttgggctctaaggggtttacttggggtaaagtgtactgggaggtcgaagtggagcgtgaggggtggagcgaagatgaagaggagggcgacgaggaagaggagggtgaggaggaggaagaagaggaagaggccgggtatggcgatggttatgatgactgggagaccgacgaagacgaagagtccctaggcgatgaggaagaggaagaggaggaagaggaagaggaggtcctagagtcatgtatggtgggcgtcgcccgggacagcgtgaaaaggaaaggtgatctgagtctccgacccgaggacggggtatgggcgctgagattgtcttcctcaggcatctgggctaatacgtcacctgaggcggaactctttcctgcactgcgccctcgcagggtgggaatcgcgctagactacgaaggcggtacggtgacgtttacaaacgctgagagccaggaactgatatacacctttacagctactttcactcggaggctggtacccttcttgtggctgaaatggccagggacgagactattactaaggccttag

SEQ ID NO: 16996 - DNA, 3558 bp, synthetic construct
  source 1..3558: mol_type = other DNA; note = Synthetic coding sequence
atgtgtgaggtcatgcctactataaacgaaggcgacaggttaggtcccccccatggtgccgacgccgacgcgaacttcgagcagctgatggtgaatatgctcgacgaacgagaaaagttactggagagcctgagggagtcccaagaaaccctggcagcgactcagtcccgcttgcaagatgccattcatgagagagatcagctccaaagacatctcaactccgccctcccgcaggaattcgcgacattgaccagggagttgagcatgtgtcgggagcagctcttggagagggaggaggagataagcgaactcaaggctgaacggaacaacactcgtctgctcctagagcacctggaatgccttgtgagccggcacgaacgctctttgaggatgactgtggttaaacgtcaagcccagagtcccagcggcgtgtcctccgaggtggaggtgcttaaagcactgaagtctctgtttgagcatcataaagctctggatgagaaggtgcgtgaacggcttagagcagccttggagcgcgttacgactctggaagagcagctagctggggcccaccagcaggtcagcgcactgcagcagggtgcaggagtccgcgatggggctgctgaggaagagggaacggttgagctcggccctaagcggttgtggaaagaggacacagggcgggtcgaggaactgcaagagctcttggagaagcagaattttgagctctctcaggcaagagagaggttagtgaccctaaccaccactgttaccgaactggaggaggacctgggcaccgcccggagggatcttattaagagtgaggaactgtcttctaaacaccagagggacctcagggaggctctggcacagaaagaggacatggaggagcggattaccacattggagaaacgctatcttgcagcccagcgggaagctacctcaatccacgatctgaatgataagctggaaaacgaactagcaaacaaagaatccctgcataggcaatgtgaggagaaggcccgacacctgcaagaattgctagaagtagcggaacagaagctgcagcagactatgcgcaaagccgaaaccttgcctgaagtggaagccgaactggcacagaggatcgcagccttgacaaaagcagaagaacgacatggaaacattgaagagcacttgcgacagcttgagggtcaactggaggaaaaaaaccaggaactggcaaggactgcagtccaggttcggcaacgtgaaaaaatgaatgaggatcacaacaagcggctctcggacactgtcgataggctgctgtctgagtctaacgagaggcttcaactgcatctcaaggaacgtatggccgctttggaggaaaagaacaccttgattcaggagctggagtcctctcaacgtcagattgaagagcaacatcaccacaaaggacgcctgtccgaggagatcgagaagcttcgacaggaagttgatcagttgaaggggcgcggtggcccattcgtggacggagtccacagtagatcacatatgggatctgctgctgacgtgcgctttagtctcggcacaacaacccacgcccctccaggtgtgcaccggaggtactccgcactacgcgaggaatccgccaagctagctcttcctttgactgtgacccttcgctcaccgacgtggatgcgcatgtcccagggagtgtgttgcaaccttgaatatcacagtagcggcaccctgtgcgggtcctctgggccactgccagtgccagagatgatccaggaggaaaaggaatctaccgaacttcgagctgaagagattgaaacaagagtcacttcaggatcaatggaggccctgaacttaaagcaacttcgtaaacgggggtccatcccaacttctttgaccgccctctcactggcctcggcctcaccaccattgagtggcaggtcaacgcctaagctcacctcacgttccgctgcacaggatttagaccggatgggggtcatgacactgccaagcgatttacgaaaacacagacggaagctgctaagcccggtttcccgggaagaaaaccgtgaggacaaagcaaccattaagtgcgagactagtcctccgagctccccacgcacactacgccttgaaaaattgggccacccagccttaagccaggaggaagggaaatccgctctggaagaccagggcagtaacccgtcttcttccaattcctctcaggatagtcttcataagggggctaaaagaaagggcatcaagagttctatcggccgccttttcggtaagaaggagaaaggacgcctgatccaactctctagagacggtgccactggtcacgtgctcctcaccgatagtgaatttagcatgcaggagcccatggtacccgctaaactcggcacacaagccgagaaggatcggcgattgaaaaaaaaacaccaactgcttgaggacgcccgtcgcaagggcatgccctttgcccaatgggacggcccaactgtggtgtcatggctcgagctttgggtcgggatgcccgcctggtatgtggccgcatgcagagcaaatgtcaagagtggcgctattatgagcgcgttgtccgataccgaaatccagcgcgaaattggtattagcaatgcccttcaccgcctgaaactaagactcgctatccaagaaatggtgtccttgaccagtcctagtgcaccacccacctcacgaacaagctccggtaacgtgtgggtcacacacgaggaaatggaaaccctggaaacaagtactaaaacagactcagaggaggggtcctgggcccagactctggcctacggggacatgaaccatgagtggatcgggaatgaatggttaccctctctgggtcttccacaataccgaagctatttcatggagtgcctggtggacgctcgcatgcttgaccaccttacaaaaaaggatcttagagttcatttgaaaatggtggatagctttcatcggactagcttacagtacggaatcatgtgtctcaagcgcctgaactatgacaggaaagagctggaaaaaaggcgcgaagagagccagcacgagattaaggatgtgttggtgtggaccaacgaccaggttgtgcattgggttcagtctattggcttaagggactatgccggaaatcttcatgaatctggcgtgcacggcgcactcctggcattggacgaaaactttgatcataatactcttgctctgatcttacagattcccacccagaacacccaggctcgtcaggtgatggagcgggaattcaacaacctgttggctctcgggacagaccggaaactggacgacggggatgataaggtgttccgcagagcacccagctggagaaagaggtttagaccacgggagcaccacggtaggggcgggatgcttagtgccagtgcagagactctgcctgcgggctttagggtgagtacactgggcaccctacagccccctccggcgcccccaaagaagatcatgcccgaagcacactcccattatctttacggccacatgctctctgccttcagggattag

SEQ ID NO: 16997 - DNA, 1383 bp, synthetic construct
  source 1..1383: mol_type = other DNA; note = Synthetic coding sequence
atggaaatatgtgacattattaacgaaaccgaggagggtccgaaagatgcccttagagccgtgaagaagcggattgtgggcaataaaaattttcatgaagttatgctagcactcacagttctggagacctgtgtgaaaaactgtggtcaccgcttccacgtgctagtcgcttcgcaggactttgttgagtccgtgctggtgcgaaccattctaccgaaaaacaacccacctacaatcgtgcatgacaaggtgctgaacctgatacagtcatgggcagacgccttcaggtccagccctgacctgaccggagtggtgactatctatgaggacctgaggcgaaaaggcctggagttcccgatgaccgaccttgacatgctgagccctatccatactccgcaaaggaccgtgtttaactctgagacacagtctgggcaggactcggtgggaactgattcctcccaacaggaagacagcggtcagcatgcggccccacttccagctccaccaatactgtccggagataccccaattgcgccaacgccagaacaaatcggtaaactccgctcagaattggaaatggtgagtggtaacgtgcgtgtgatgagtgagatgctcacggagcttgtgccgactcaagccgagcccgccgatctggagctcctgcaggagctgaatcggacttgccgagccatgcagcagcgcgtgctagaactgatcccccagatcgccaatgagcaactcacagaggagctgctgatcgtgaacgacaacctaaacaacgtgttcttgagacacgaacgcttcgagcgattccgcaccgggcagacaactaaggcgccgagcgaagccgaacccgccgcggacctgatcgacatgggacccgaccctgctgccaccgggaacctcagcagccagctcgcggggatgaatttgggcagctcaagtgtccgggccggactccagtctctcgaagcaagcggcaggcttgaagatgagttcgacatgttcgccttaacacgtgggtccagtctggccgaccaaaggaaggaggttaaatacgaagcccctcaggctactgatgggctggctggagctcttgacgcaagacagcaatcgacaggcgccatccccgttacgcaggcttgccttatggaggatattgagcaatggcttagtacagacgtgggcaatgatgctgaagagcctaaaggcgtaacaagtgaggggaagttcgacaaatttctggaagagcgtgctaaagcggccgatcgtctgcccaatttgtcttctccttcggctgaaggacccccaggaccaccctccggaccagccccgaggaagaagactcaagaaaaagacgacgatatgttgttcgcgctgtag

SEQ ID NO: 16998 - DNA, 180 bp, synthetic construct
  source 1..180: mol_type = other DNA; note = Synthetic coding sequence
atgatgatgaagatgatgatgcggatgaaaatcagaaaaatccgctaccattgtcagaggaagcagaaccttattcacaataacggcaacggcctgggctccgtgcctgtggagaagctggtccttcacccttctccaatccaaaacccccagcaaagtgccgtcgtgtcatgcgaatag

SEQ ID NO: 16999 - DNA, 537 bp, synthetic construct
  source 1..537: mol_type = other DNA; note = Synthetic coding sequence
atgctgggcctggacgcatgtgagctgggcgcgcagcttctggaactgcttcggctcgccctttgtgcaagagtcctgttggctgataaggagggtgggcctcctgctgtagacgaggtcctggatgaggccgtccctgaatacagggcaccaggacggaagtcgctgttggagataaggcagctcgatccagatgacagatcgctcgccaaatacaaaagggtgctgctgggacccctaccacccgctgtcgaccccagtctacccaatgttcaggtgacaaggctgacacttctttccgagcaggcccccgggccggtggtgatggatttaaccggcgacctggcagtccttaaagatcaggtatttgtcctgaaggagggggtggactaccgggtgcacagagagatcgtgtcagggctgaagtgtctgcatcatacgtatcgtcggggtctgagggtggataagaccgtgtatatggttggatcatatgggccatccgctcaagaatatgagtttgtcacccccgttgaatag

SEQ ID NO: 17000 - DNA, 1119 bp, synthetic construct
  source 1..1119: mol_type = other DNA; note = Synthetic coding sequence
atggactcagttagaagtggccccttcggccaagtgtttcgcccggataatttcatcttcggccagtgcggcgcggggaataattgggcgaaggggcattataccgaaggggccgaacttatggaatccgtgatggatgtggttcgaaaagaagctgagagctgcgactgtctgcagggcttccaattgactcattccctgggtggcgggacaggcagcggcatggggacccttcttttgagcaagatccgcgaggaatacccagaccgaataattaacaccttttcaattctgccaagccccaaggtgtctgacaccgtggtggagccctataatgccaccttgtccgttcaccagctgatcgaaaatgcagacgaaaccttttgcatcgacaacgaagctctttacgatatctgctctaaaactctgaaactcccaaccccaacatatggagacctgaatcacctggtgagcgccaccatgtccggcgtgaccacttgtctgcggtttcccggccaacttaatgccgatctgcggaaactagcggtgaatatggtaccctttcctcgcttacacttcttcatgccaggctttgcgccattgacatctagggggtcccagcagtaccgcgcgttaaccgttgccgaactgacccagcaaatgttcgatgcgaaaaacatgatggctgcctgtgacccacgacacggccggtacctgacagcagccgcgatcttccgcggcagaatgcctatgagggaagtggatgaacagatgttcaacattcaggacaaaaactcctcatattttgctgattggctgcccaacaacgtgaagactgcggtctgcgatatcccgccacggggacttaagatgtccgccacttttatcgggaataacactgccattcaagagctgtttaaacgggtttctgaacaattcaccgctatgttccggcgcaaagctttcttgcattggtatacaggtgaggggatggatgagatggagttcacagaggccgagagcaacatgaatgatctggtgagcgagtatcagcagtaccaggatgcgactgctgaagaagaggaagatgaagagtacgccgaagaagaagtggcttag

SEQ ID NO: 17001 - DNA, 576 bp, synthetic construct
  source 1..576: mol_type = other DNA; note = Synthetic coding sequence
atggctgcagccaaggacacgcacgaagatcatgacacttccaccgaaaacactgatgagagtaaccatgacccccaatttgagccaattgtgtcccttcccgagcaggaaattaaaaccctggaggaggacgaagaggagctgtttaagatgcgggcaaagctgttccggtttgccagcgagaatgacctacctgaatggaaagaacgggggactggcgatgtgaagttattgaaacacaaaacgctgaagatctgtgccaatcattacatcacccctatgatggagctgaagcccaacgctggctctgatcgcgcctgggtgtggaacacccatgccgactttgctgatgagtgtccgaagcccgaactcctggcaatcaggttcctgaacgcagagagcgagccccgggcacttggcacatgtctgacttggggctctccagcctggcagagaggcggactctgtgccaccaacgctgttgctttctggggggagggagcggtaaccggaaagtgtgtggtttgggccgccctgccctgttgtctgggggctatgcctagactcaaaccatag

SEQ ID NO: 17002 - DNA, 369 bp, synthetic construct
  source 1..369: mol_type = other DNA; note = Synthetic coding sequence
atggccacctctgctccactgcgatccctcgaagaagaagtgacttgctcaatttgcctagattatctgcgggaccccgtcactatcgattgtggccacgtgttctgcagatcctgtaccaccgacgttcgccccatctccggctcccggccggtgtgtcctttatgtaaaaagccttttaagaaagagaatatccgccctgtttggcagctcgcatctttagtggagaatatcgaacgtctcaaggtcgacaaggggcgacagcccggagaggtgacacgtgagcaacaggatgctaagctgtgtgaacgccacagagagaagctacactactattgtgaagacgacggcaagttactgtgcgtgtag

SEQ ID NO: 17003 - DNA, 1383 bp, synthetic construct
  source 1..1383: mol_type = other DNA; note = Synthetic coding sequence
atggcttccctcctgcagtctgaccgcgtcttgtacctggtgcaaggtgagaagaaagtgcgggcccctttgtcacaattatacttctgtcgctactgttcagaactacggtctctagagtgcgtgagccacgaggtggacagtcattactgcccctcatgtctcgagaacatgcctagcgcagaagccaagctgaagaaaaatcgttgcgccaactgcttcgactgccctggatgtatgcacaccctaagcacgagagccacctcgatctctactcagctgcctgatgacccagccaagactaccatgaaaaaggcatactatttggcatgtggcttctgccgatggacatctagagacgtgggtatggccgataaaagcgtcgcttccggtggctggcaagaacccgagaacccacacacacagaggatgaataagctaattgagtactaccagcagctggcacagaaggagaaggttgagcgggacaggaagaagcttgcgcgtaggagaaactacatgccgctcgcgttttccgacaagtatgggttaggcacacggttgcagcggccacgcgccggcgcatcaatcagcacattggcaggactgagtctcaaagagggcgaagatcaaaaagagattaagatcgagcctgcacaggccgtggatgaggtcgagccactgcctgaggactattacaccaggccagtgaatctgacagaggtcactaccctccaacaaagactgttgcaacctgacttccaaccagtctgcgcctcacaactgtacccccgccacaaacatttgctcattaagcgcagcctcagatgtcgcaagtgcgaacataatctctctaagcctgaattcaatccaacctccattaagtttaagattcagttggtggctgtgaattatataccagaggtgaggattatgagtatccccaacctccgttacatgaaagagagtcaggtactgctgacccttaccaaccctgtggagaatcttacccacgtgactctgtttgagtgcgaggaaggagaccccgacgacattaacagcacagccaaagtggtcgttcctcctaaggagctggttctggccggcaaggacgccgccgccgaatacgacgagctggctgaacctcaggactttcaggacgacccagatataattgcatttcggaaggccaataaggtaggaatctttataaaggtgaccccacagagggaagaaggagaggtgaccgtctgctttaagatgaagcatgactttaaaaatctggccgccccaattaggccaattgaagagtcagatcagggcacagaggtcatctggctgacccagcacgttgagctatctctgggcccgctactgccatag

SEQ ID NO: 17004 - DNA, 3336 bp, synthetic construct
  source 1..3336: mol_type = other DNA; note = Synthetic coding sequence
atggaaatggacgcgcctaggcccccttccttggctgtacctggggccgcatcccgccctgggagactcttggatggaggccacggccggcagcaggtacaggctctaagctcccaattgctcgaggtgatccctgattccatgcggaaacaggaggttcgtaccggaagggaggctggtcaaggccacggcacaggctcaccagccgagcaggtgaaagctcttatggacttgctcgcaggcaaaggctcccagggcagccaggcaccccaagccctcgaccgcactcccgacgcccctctcgggccttgctcaaacgacagtcggattcaaagacacagaaaagcgctccttagtaaggtcggtgggggtccggagctcggcggaccatggcacagactcgcttcgttattgctggtggaaggcctgaccgatctccagctgcgggagcatgactttacgcaggtagaggcgacccgcggtggaggacatcccgccagaactgtagctctggatagattgtttctgccactgtcccgagtctccgtccctcctcgagtgagtattactattggtgtggccggcatgggaaaaacaacgctcgtgagacattttgtgcggctctgggctcacggtcaagtagggaaggacttttctctggtcctcccactcactttccgtgatctgaatacccacgagaagttgtgcgccgatagactcatctgcagtgtgttcccacacgtcggagagccttccctggctgtcgcagttccagccagggcactgctaattttggacggtctggacgaatgtcggacacctttggattttagcaacacagtcgcatgtacagatccgaaaaaagagatcccagtagatcacttgattaccaatattatccgcggtaatctcttccccgaagtgtctatctggatcaccagtaggccctccgcctccggacagattcctggcgggttggtcgatcgtatgaccgagattcgggggttcaacgaagaagagatcaaagtctgcctcgaacagatgtttccagaagatcaggccctcctcggatggatgctcagtcaggtgcaggccgatagggctctatatctcatgtgcacggtgcctgctttttgtcgactaacgggtatggcactgggacatctatggcgtagcaggacaggccctcaagatgcggagctctggccgccccgaactttatgtgagctgtattcctggtatttcaggatggcactctccggggagggccaggaaaaagggaaggcctctccgagaatagagcaagtggcacacggcggccgcaaaatggtcgggacattgggccggctggctttccacggtctgctgaagaagaaatacgtcttctacgagcaggatatgaaggcgtttggagtggatctggctctgctccagggcgctccatgcagttgcttcctgcagcgggaagaaactctggcctcttccgtggcatattgtttcactcacctgagtttgcaggaatttgtagctgctgcctattattacggagccagtcggcgagcaatctttgatttgttcacagagtccggtgtatcttggcctcgcctaggatttctgacacacttccgatccgccgcccaacgtgccatgcaggctgaggatggacgactcgatgtgtttcttcgcttcttatctggcctgctctcccccagagtcaacgcccttttggccggatctctgttggcacaaggagagcatcaagcttatagaacccaggtggcagagctcctccagggctgcctccgccctgacgctgctgtatgtgcccgagcaataaacgtgcttcactgtctccacgagctccagcacactgaattggccaggtccgtcgaggaggctatggaatcaggggctcttgctcgtctgaccggcccggctcaccgtgcagctctagcctatctacttcaggttagcgatgcatgtgctcaggaggccaacctgagtctgagtctgagccagggggtgctgcagtctctgctgccccaactgctatactgcaggaagctgcgcttggatactaatcagttccaggatccagtgatggagctgttgggctccgtgctctcaggtaaagattgcaggattcaaaagatctccctcgctgaaaaccagatctccaacaagggggccaaagctctagcgcggtcgctgctcgtgaatcgcagcctgactagtctggatctgcgcggaaattctatcggaccccagggcgctaaggccctggccgacgctctcaaaattaatagaacactcactagcctttctcttcagggaaacacagtccgcgacgatggcgcccgctcaatggccgaggcactggcctcaaataggaccctgtcaatgttgcatctgcagaagaacagcatcggacccatgggcgcccaaaggatggccgacctcaaacagaaccggtctttaaaggaactgatgttctcgtcaaattccatcggtgacggcggcgccaaggccttggctgaagcccttaaagttaaccaggggttagaaagtctcgatctccagtccaacagcatttctgacgccggtgtcgcggccctgatgggggcattgtgtacgaaccaaactttacttagcctgtcacttagagaaaacagcattagcccggaaggtgcccaggctattgctcacgccttgtgcgcgaactccactctcaagaatctggacttgaccgcaaatctgctgcatgaccagggcgcacgcgctattgcagtcgcagtgcgagaaaacaggaccctgactagcctacatcttcaatggaacttcatccaggctggagccgcccaggcactggggcaagcattgcagctaaataggtccctcacctcacttgacctgcaggagaatgctataggggatgatggagcctgcgcagtggctcgtgctctgaaggtcaacacagccctcacagctctataccttcaggtggcatctatcggagcttcaggcgcccaagttcttggggaagctttggcagtaaaccgtacgctcgagattctggatctcagagggaatgctatcggagtggccggcgccaaggccttggctaacgccctcaaagtgaattcttcactgcggcggctgaatctgcaggaaaacagtctgggaatggacggcgccatctgtatagccactgccctatcgggcaaccaccggctgcagcacatcaacctgcagggaaaccacataggcgactccggagcccgcatgatatccgaggctattaaaaccaacgctccaacctgtactgtcgagatgtag

SEQ ID NO: 17005 - DNA, 2424 bp, synthetic construct
  source 1..2424: mol_type = other DNA; note = Synthetic coding sequence
atgcttgagcgacgtgctttactgtggcaaagagaggccggcccgggctggggggatagagcacgtgccgggacgggaggagctggagggggctgcggaggcgccatggctgaaagggggcctgctttttgcggcctgtatgatacctcttccttgctgcgatattgtaacgacgataatctgagtggaacctctgggatggaagtggatgacagggtgtcagctctcgaacagcgtctccaattgcaggaggatgaactggcagtgctcaaggcagcactggccgacgctctccggagactccgggcctgtgaggaacagggagcagcgttacgagctcgcggcacacccaaaggtcgtgcccccccgagactgggaaccacagcttccgtgtgtcagcttctaaagggcctccccacaaggaccccgctcaacggctcagggcctcctcgaagggtgggtggctacgcgaccagccccagctctcccaaaaaggaggcaacctccggccggagtagtgtcaggaggtacctgtccccagaacggcttgcttccgtccgtagggaggatccacggagccggaccacatctagctcgtcaaattgtagtgccaaaaaggagggcaaaacgaaagaggtgatcttttctgtggaggacggcagtgtgaagatgtttctgagaggcagaccagtaccaatgatgatcccagacgagctcgctcctacctacagcctggatactcggtccgaactgcccagctgtaggctgaaactagagtgggtgtacggataccgcggccgtgattgcagagctaacctgtacctgctgccgacaggggaaatagtttattttgtggcatcggttgccgtgctgtattctgtcgaggagcaacggcagcggcactaccttggccacaacgacgatattaagtgtctggcgattcaccccgatatggttaccatagccaccggccaggtggctggcacaaccaaagaagggaagccgcttcctccacacgtcagaatttgggattcggtgagcctctcaactctgcatgtgttgggcctgggtgtttttgacagggccgtttgctgtgttggctttagcaagtcaaacggcgggaacctgctgtgcgccgtggacgaaagcaacgatcatatgctgagtgtgtgggattgggctaaggaaaccaaagtggtggacgtcaagtgtagcaatgaggccgtgcttgtggctacctttcatcctaccgatcccaccgtgctgattacctgtggcaagtctcacatatacttctggacgttggagggtggatccctctcaaagcggcagggactcttcgagaagcatgagaagcccaaatatgtgctatgtgttaccttcctcgagggtggagatgttgttacaggtgattccggcggaaatctgtacgtgtgggggaagggaggtaataggattacccaagctgtgctgggtgcacacgacggaggagtgtttgggctctgcgcgctgcgcgacgggactctagtgtccggtggtggccggaacagcatcttgcaaggcagtgtgcacacagggttttcgcttctggtgcagggccacgtggaagaactttggggattggccactcacccatcacgagcccaattcgttacctgtggacaggacaagttagtgcatctctggagctcggatagtcatcaacccctgtggtcacgtattatcgaggatcctgcacgatctgctggctttcaccccagcggtagtgtcctggccgttgggaccgttaccggcagatggctgctgttagacaccgaaacacacgatctggttgctattcataccgatgggaacgaacagatcagcgttgtgtctttcagcccggacggcgcctacctggcagtgggaagtcacgataacctggtatacgtgtatacagtggatcagggaggtagaaaagtttcgcgcctgggaaagtgcagcggccattcttcgttcataacacatctggattgggcccaggacagcagctgcttcgtcaccaactcaggggattatgagatcctgtattgggacccggcaacctgcaagcagataacatcagcagacgcagtcaggaacatggagtgggccactgctacctgcgtattaggttttggagtgttcggcatttggtccgagggagcagacggcaccgacataaatgcagtcgctcgaagccacgacggcaagctcctggcaagtgcggacgatttcggaaaagtgcatctgttttcctatccatgctgccagccacgcgcactctctcacaagtacgggggtcacagctctcacgtgacgaacgttgcatttttatgggacgactctatggctctgaccaccgggggcaaggataccagtgttctccagtggagggtggtgtag

SEQ ID NO: 17006 - DNA, 1413 bp, synthetic construct
  source 1..1413: mol_type = other DNA; note = Synthetic coding sequence
atggaagagactatcaaagaccccccaacatccgccgtgctcctggaccactgccactttagtcaggtgatcttcaacagtgttgagaaattctatatccctggcggagacgtcacttgccactatacctttactcagcacttcattccccggaggaaagattggatcggtatcttcagggcctttaagtgttttcaggacaaacttgagcaggaattgcttaagtggcggagtcaggggcagaagctgcaggtgggctggaagacaacaagggagtactatactttcatgtgggtcacgcttccaatcgacctgaacaataagagcgcgaagcaacaggaagtacagttcaaagcttactacctgcctaaagacgacgagtattatcagttttgctatgtggacgaggacggcgtggtgagaggagcttccattcccttccaatttagacctgaaaatgaggaggatatcctggttgtcactacccaaggcgaggttgaggaaattgaacagcacaataaagagctctgcaaagagaatcaggaactgaaggactcttgcatctctttgcagaagcagaattcggacatgcaggctgagctgcagaaaaaacaagaagagctggagactctccagagcataaacaaaaagcttgagctgaaggtgaaagagcagaaggattattgggagacagagctcctgcaactgaaagagcagaatcagaagatgtctagtgagaatgagaaaatgggcatccgcgtggatcagctgcaggctcagctctctacccaggaaaaagagatggagaaactggtgcagggtgatcaagacaagacagagcaactggaacagcttaagaaagaaaacgatcacctgtttctttctctcaccgagcagcgaaaagaccagaagaagctggaacagaccgtggagcagatgaagcagaacgaaactacggcaatgaaaaagcagcaggagctgatggacgagaatttcgacctctctaagagactgagcgaaaatgaaatcatctgcaatgctctacagcgccagaaggaaaggttggagggggaaaatgacctgttaaaacgggagaattctcggttgttatcttatatgggcctggattttaacagcctgccctaccaggtccccacgagcgatgagggtggagcgcgacagaatccaggtttggcctatggcaacccctattcaggtattcaagaaagtagtagcccctcacctctttccattaagaaatgccctatctgcaaggccgacgacatatgtgaccataccctggagcagcagcaaatgcagcccctgtgctttaactgccctatatgcgacaaaatatttcccgcgaccgaaaagcagatttttgaggatcacgttttctgccactctctctag

SEQ ID NO: 17007 - DNA, 1023 bp, synthetic construct
  source 1..1023: mol_type = other DNA; note = Synthetic coding sequence
atgagcaagactcacgatcaccaactggaaagttccctttctcccgtcgaggtcttcgcaaaaaccagcgcaagtctggaaatgaatcagggagtctccgaagagcgaatccatcttggtagcagccccaagaagggggggaattgcgacctgtcccatcaggaaaggctacagagcaagtcacttcaccttagtccccaagaacagtccgcatcatatcaagatcgccggcaaagttggaggcgggcttccatgaaggaaacaaatagacgaaaatccttacaccccatacatcagggcataacagagctctcacgatctatctccgtggacctggccgagtctaaacgattggggtgcctgctactatcttcttttcaattttcgatacagaaactggaaccttttttacgagacacgaaaggatttagcctggagagctttcgagcaaaagcatctagtttgagcgaggagctcaagcactttgccgacggcctggagaccgacggaactctgcagaagtgtttcgaagatagcaacgggaaggcctccgacttctcattggaagccagcgtcgcggagatgaaggaatatatcacaaagttctcattggagcgtcagacctgggaccagctcttgctccactatcaacaagaggctaaggagatactcagtaggggcagcaccgaggccaagataaccgaggtgaaggtggagccaatgacttatctcggtagttcacagaacgaggtactaaacaccaaacccgactatcaaaagatcttgcaaaaccagagcaaagtcttcgactgcatggagctcgtgatggacgagctccagggatctgttaagcagctgcaagccttcatggatgaatcaactcagtgcttccagaaggtatctgtccagctggggaagcgctctatgcagcagttagacccatccccagcccgaaagttgctgaaacttcagctccagaatccacccgctatccacggttccggtagcgggtcctgccagtag

SEQ ID NO: 17008 - DNA, 522 bp, synthetic construct
  source 1..522: mol_type = other DNA; note = Synthetic coding sequence
atgactcacgtggcctcgcagttcgcctctagttacgtgttttattggcgggactatttcgaggaccagccactgctgtatcctccaggttttgacgggcgcgtcgtcgtttatccaagcaaccagaccctgaaggattatctcagctggagacaggctgattgtcatatcaacaatctatataacaccgtattctgggctctgatccagcaaagcggcctaactcctgtgcaggcccaaggacgccttcaaggcaccctggccgcagataagaacgaaatcctgtttagtgagttcaatattaattataataacgaattgcccatgtatcgcaagggaaccgtgctgatctggcagaaagttgacgaagttatgactaaggaaattaagctgccaaccgagatggaggggaaaaagatggccgtaactcgcacacgtacaaagccagtgcccctgcactgcgacattattggtgacgcattctggaaagagcaccctgagattctggatgaggattcttag

SEQ ID NO: 17009 - DNA, 285 bp, synthetic construct
  source 1..285: mol_type = other DNA; note = Synthetic coding sequence
atggagatggagtccgctgccgcgtccactagatttcaccagcctcacatggaacgcaaaatgagcgccatggcctgtgagatttttaacgagctgcgtctggaaggcaagctttgcgacgtcgtgattaaggtcaacggcttcgagttctctgcccacaaaaatatcctctgtagctgttctagctattttcgggcgctcttcacgagcggttggaataataccgagaaaaaagtgtacaatataccggggattagccccgatatgatgaagctcattatctag

SEQ ID NO: 17010 - DNA, 1572 bp, synthetic construct
  source 1..1572: mol_type = other DNA; note = Synthetic coding sequence
atgaaccaaccatgtaacagcatggagccacgagtgatggatgacgacatgctgaagctagcagtgggtgatcaaggcccccaggaggaagctgggcagttagccaaacaggaaggcatactgtttaaggatgtcctcagtttgcagttggactttcggaacatactgcgaatagacaacttgtggcagtttgaaaatctgcgtaagctgcaactggacaataacataatagaaaagatcgagggtctagaaaacctcgcccacctggtttggctcgatctgagtttcaacaacatcgagacaatcgaaggtttagacactctagtcaacctcgaggatttgagtcttttcaacaaccggatatctaagattgattccctggatgctctggtaaagttgcaggtgctaagcctgggaaacaaccgcatagacaacatgatgaacattatttatctccgtcggttcaaatgcctccgcacattatccctgtctcgaaatcccatcagcgaagctgaggactataaaatgttcatatgcgcctatctccctgatctaatgtacctagattaccggcggattgacgatcatacaaaaaaactagctgaggccaagcatcagtactcaatagacgaattgaaacaccaagaaaatttgatgcaagcacagctggaggatgagcaggcacaacgggaagagttagagaagcacaagacagccttcgtggaacacctaaacgggagtttccttttcgactctatgtacgcagaggattcagagggcaataatctatcctatcttcctggtgtgggagaactcctagaaacttacaaggacaagttcgtcataatttgcgtgaatattttcgagtacggactgaagcagcaagaaaagcgcaaaactgagcttgacaccttttccgaatgcgtgagagaggccattcaggagaaccaggagcagggaaagagaaagatcgctaagtttgaggagaaacatctgagttctcttagtgccatccgagaagagctggaacttcccaacattgagaaaatgattctggagtgctccgcagatatcagcgaactgtttgacgccctgatgacgctggagatgcagcttgtcgagcagctggaggagactatcaacatgtttgaacgcaatatcgtggatatggtgggattatttattgaaaatgtccagtcactaatggctcagtgtagggacctcgagaaccatcaccatgagaagctgttggagatctccatctccactcttgagaaaatcgtggaaggagatctagacgaagacctccccaatgaccttcgagcactttttgtcgataaggacaccatcgtgaatgctgttggggcctcccacgacatccacctcctcaaaattgacaatagagaagatgaactggtcacaaggataaattcttggtgcacgcgactgattgacagaatccataaggacgagattatgcgcaacaggaagagagtcaaagaaatcaatcagtacatagatcacatgcagtcagagctggataatctggaatgtggcgatatcttggactag

SEQ ID NO: 17011 - DNA, 372 bp, synthetic construct
  source 1..372: mol_type = other DNA; note = Synthetic coding sequence
atgggcaccggagatttcatctgcatttctatgaccgggggtgctccttggggattcagattacagggaggcaaagagcagaagcagcccctccaagtcgcaaaaatccgcaatcagagcaaggcttccggttctggcctgtgcgagggggacgaagtggtgagtatcaacggcaatccatgcgccgacctcacatacccggaggtgatcaaactgatggagtcaatcacagatagtctgcagatgttgattaaacgaagggtgggggctccattcttatttctcgaagatcagtctcatcctcccttccttcatctcctgggctacacctccctgctcatcgtaaccctggtcaatcagcctatggactag

SEQ ID NO: 17012 - DNA, 1146 bp, synthetic construct
  source 1..1146: mol_type = other DNA; note = Synthetic coding sequence
atgcctcttcaggtcagcgactacagttggcagcagacaaagaccgcggtcttcttgtcactgcccctcaaaggcgtatgcgtgcgcgatacagatgtgttctgtacagaaaactacctcaaagtgaatttccccccctttctttttgaggcttttctctatgcacctatagacgatgagagctctaaagcaaagatcggaaacgataccatcgtgttcactctttacaaaaaggaagccgccatgtgggagacgctgtctgtgacgggcgtcgacaaagagatgatgcagcgaatccgagagaagtctattcttcaggcacaggaaagggcaaaggaagccacagaggctaaagcagcagctaaacgcgaggatcagaaatacgccctgagtgtgatgatgaagatcgaggaagaggaacgcaagaagatcgaggacatgaaagaaaatgaacgcataaaagctaccaaggcccttgaggcgtggaaggagtaccagagaaaggctgaggagcagaagaaaatccagcgtgaggagaaactctgtcagaaggaaaaacagatcaaagaggaacgtaaaaagattaagtataaaagtttgaccagaaatcttgcttcccgcaatctcgcccccaagggccggaactctgaaaacatttttacggagaagctgaaagaggattccataccagctccacgttctgtcggctctataaaaatcaacttcaccccacgcgtgtttccaactgcgcttagagaatcacaggtggctgaggaagaagaatggttgcacaaacaggccgaagctaggcgagccatgaatacagatattgcagaactttgtgacctgaaggaagaggaaaaaaacccagaatggttgaaggataaaggcaataagctttttgccaccgagaattatttggcagccattaacgcctacaatctggccattcgcttaaacaataagatgccccttctgtacttgaatcgtgcagcgtgtcatttgaaactgaagaacctgcacaaggcaattgaagactcatctaaagaattttgctccctggaagggattgaatgccaggcttcggagccgaaactctcccaccacatacccagcgacctgcacgtgtacattcagatggcctag

SEQ ID NO: 17013 - DNA, 615 bp, synthetic construct
  source 1..615: mol_type = other DNA; note = Synthetic coding sequence
atggtgatggctgagggtacagccgtcctaaggcggaaccgaccgggtactaaggcccagtatatccaacagaatattagagctgactgttctaacattgataagatactcgagcctcccgaggggcaggacgagggggtatggaaatatgagcacctgaggcagttttgcctggagctgaacggtttggcggtgaaattgcaatctgagtgtcaccctgacacctgtacgcagatgaccgctaccgaacaatggattttcctttgcgccgcccacaagacaccaaaagagtgccccgctatcgattataccagacacaccctggacggcgccgcttgcttactcaattctaataaatacttcccatccagagtctcgataaaagaatcgtccgtggccaaactaggcagcgtttgccggagaatctacaggatattcagccatgcctattttcaccataggcagatcttcgatgagtacgagaacgagacctttctgtgtcacagatttactaagttcgtgatgaagtataacctgatgagcaaagataatctgatagtgccaatcttggaagaagaggtacaaaactctgtgagtggcgagtcagaagcatag

SEQ ID NO: 17014 - DNA, 1293 bp, synthetic construct
  source 1..1293: mol_type = other DNA; note = Synthetic coding sequence
atggccgccaaccttagcaggaatggccctgcgctgcaagaggcatacgtgcgcgtcgtgaccgaaaaatctccaaccgattgggctttatttacctacgaggggaattcgaacgacatccgggtggccggaaccggcgaaggcgggcttgaagagatggtcgaagagctgaactccggaaaggtaatgtatgccttctgccgggtgaaggacccaaacagcggcctccccaaattcgtccttatcaattggactggggaaggggtgaatgatgtgaggaaaggtgcctgtgcctcacatgtgtcgactatggcctccttcctgaaaggcgcccacgtcaccatcaatgcaagggcggaagaggatgtggaacctgaatgtatcatggagaaggtcgctaaagccagcggagcaaattacagtttccataaggagtcaggccggtttcaggacgtggggccccaggcaccagtcggctcagtgtaccaaaagacaaacgctgttagcgagattaagagggtggggaaagattccttttgggccaaggccgagaaagaggaggaaaaccgtcggttagaagagaaacggagggccgaagaggcacagcggcagctggagcaggagcggcgcgaacgggagttacgcgaggctgcaagaagagagcaaagataccaggagcagggcggcgaggcgtctccccagagaacatgggaacagcagcaggaggtggtgagccgcaaccggaatgagcaggaatcagcggtgcacccccgtgagatctttaagcaaaaggagagagccatgtcgactacgtctataagctcgcctcaacctggaaagctccgcagcccattcctccaaaagcaacttactcagccagagacccactttggaagagagccagccgctgcaatctccaggccgcgggccgatctacctgctgaggagcctgccccatctactcccccctgccttgtgcaggccgaagaggaagccgtgtacgaagagcccccagaacaggaaacattttatgaacaacccccactggttcaacagcagggggcagggtctgagcatattgaccatcatattcagggccagggtcttagcgggcaaggcctgtgtgcaagagctttgtacgattatcaggctgctgacgacaccgagatcagctttgatcctgagaacctcatcactgggatagaagtcatcgatgagggctggtggagaggatacggccctgacggccacttcggcatgttccctgcgaactatgtagaattaattgagtag

SEQ ID NO: 17015 - DNA, 3189 bp, synthetic construct
  source 1..3189: mol_type = other DNA; note = Synthetic coding sequence
atggtgtcctccgcacagatgggctttaatctgcaggccctgctggaacagctcagccaggacgagttatccaaatttaagtacctgattaccacgttcagtttggcacatgaactccaaaagattccccacaaagaagtcgacaaggccgatgggaagcagctggtggaaattctgaccacacattgcgactcatattgggtggagatggctagcctgcaagtattcgaaaaaatgcaccggatggacctttccgagagggctaaagatgaggttcgggaagcagctttaaagtccttcaataagagaaaaccattgagcctgggaattactcgtaaagagcggccccctctggatgtggacgagatgttagaaagatttaaaacagaggctcaggccttcaccgaaaccaaggggaatgtgatctgcttgggtaaggaggtattcaagggaaagaagcctgacaaagacaatcgctgtcgttatattctgaaaactaagttcagggagatgtggaagagctggcctggcgacagcaaggaggttcaagtaatggccgagcggtacaagatgctcatccccttttcaaacccccgtgttttgcctggaccgttctcctacacagtggtcctctacggtccagccggtcttggaaagactaccttggctcagaaactgatgttagactgggcagaagataacctgatacataagttcaagtatgccttctatctaagctgccgcgaactgtcacggcttggaccatgttcattcgccgagctagtctttcgcgattggccagagcttcaggatgacattccacatatactggcccaggctagaaagatcctgtttgtcatagatgggttcgatgaattgggcgctgctccaggtgccctgattgaggacatctgcggagactgggagaagaagaaaccagtgcctgttctgctggggtcactccttaaccgggtgatgcttcctaaggcagcactgctggtgacaaccaggccccgggcactgagggatctccgaattcttgccgaagaacctatctatattcgcgtggaaggatttcttgaagaagataggagggcatactttttgcgacactttggcgacgaggaccaagctatgagggcatttgagctgatgcgcagcaacgctgcattgttccagttgggcagcgctccagccgtttgctggattgtttgcacgaccctgaaattgcagatggagaagggtgaagaccccgtgcccacgtgtttgactcggaccgggctgttcctgagattcttgtgcagcaggttcccccagggcgcacagctccgcggcgccctgcgcacgctttcccttttagctgcacagggcctctgggcccagacttctgtgttgcatagagaggacctcgagcggttgggggtccaggagtccgatctgaggctatttctggatggggatattctgcgtcaggatagagtgagtaaagggtgctattcttttattcatttgagcttccagcagttcctgactgcactgttctacaccctggagaaagaggaggaagaagatagagatggccatacttgggatatcggggatgtccagaagctgttgagtggagtcgagcgcctaagaaaccctgacctaatccaagcaggatattactctttcggtctggctaatgagaaaagagccaaggagttggaggccacctttggctgtagaatgagccctgatattaaacaagaattactgcgctgcgacatttcctgcaaaggagggcattcaaccgtgactgatttacaggagctattgggatgcctgtatgagtcacaggaggaagaactggtcaaggaagtgatggctcaatttaaagagatttccttacaccttaatgccgttgatgtagtgccctcgtcgttctgcgtgaagcactgtcggaacctgcagaaaatgtctttacaagtaatcaaggaaaaccttcccgaaaatgtaaccgcctccgagtcagacgccgaggtggagaggagccaggacgaccaacacatgctgcctttctggacagatctatgctccattttcggttctaacaaagatctaatgggtctggcaatcaacgattccttcctctcagcaagcctagttcggattctgtgcgaacagattgcctcggacacttgtcatttgcaacgagtcgtcttcaagaacattagcccggcagacgctcaccgaaacctctgcctcgcgctgcgtgggcataagacagtgacatacctgaccttacagggaaacgatcaggacgacatgtttccggcattgtgcgaggtcctgcggcaccctgaatgcaatcttagataccttgggctggtgtcttgcagcgcgactacacagcagtgggctgacctttcactggccttggaagtcaatcagtccctcacctgcgtgaacctctccgacaacgagttgctcgacgagggcgcaaagttactttatacgacgctcaggcatcccaagtgtttcctgcaacgactgtctctggaaaattgccacctcactgaagcgaactgcaaggatctggctgctgtcttagttgtctcaagagagttgactcacctctgccttgccaagaacccaatcggcaataccggcgtgaaatttctgtgcgaaggactccgctacccggagtgcaagttgcaaaccctcgtcctatggaactgtgatattacatcagatggctgctgtgatctcacgaaattgctgcaggagaagagtagcctgttgtgcttggatttagggctcaatcacatcggggtgaaaggtatgaagtttctctgcgaggcattgcgcaaacctctctgcaatctaagatgtctgtggctttggggttgtagcataccacctttcagttgtgaggatctgtgctccgctctaagctgcaatcaaagcttggtgactctcgatttggggcagaacccattgggtagctctggggtcaaaatgttattcgaaacccttacatgtagctcagggactttgcgcactttgcggctgaagattgacgatttcaacgatgagctgaacaaactgctcgaggagatagaggagaagaatccccagctaatcattgatactgaaaagcaccatccctgggctgagagaccatcgtcgcacgattttatgatctag

SEQ ID NO: 17016 - DNA, 390 bp, synthetic construct
  source 1..390: mol_type = other DNA; note = Synthetic coding sequence
atggccgagctaattcagaagaagctgcaaggagaagtcgagaagtaccagcagctacaaaaggacttgtccaagtcaatgtctggcaggcagaaactcgaggcccagctgaccgaaaacaatatcgtcaaagaagaacttgcattgttggacggttccaatgtcgttttcaaactcctcggacccgtgttagtcaaacaggagttgggcgaggccagggctaccgtagggaaacgcctcgattacattaccgccgagatcaagagatacgagagccagctgcgagatttagaacgtcagagcgaacagcaaagagaaacactcgcacagctccagcaggaatttcagagagctcaggccgcgaaggcaggcgcgccgggcaaagcttag

SEQ ID NO: 17017 - DNA, 516 bp, synthetic construct
  source 1..516: mol_type = other DNA; note = Synthetic coding sequence
atggaggtcgctgagccatcttccccaaccgaagaggaggaggaggaggaggaacattcggccgagccacggccccgcacacgatcaaaccctgagggcgccgaagatcgcgccgttggcgcacaggcttcagtgggttcacggtcggagggagaaggcgaagctgcgagcgctgacgacggatctctgaacacgtccggtgccgggccgaagtcctggcaggtgcctccccctgcgcctgaggttcagatacgcaccccaagggtcaattgccccgaaaaggtgattatctgcctggacctgagcgaagagatgagtctgcctaaattagagtcattcaatggacagcagaagaccgaactgcctgtcacagaaaatgtgcagactatcccccctccatacgttgtgcggactattctggtgtattccagacccccttgccaaccccaattttcactaacagaacctatgaaagtcggcgaggcgtgggaaagggaaggctgcctgcagccctag

SEQ ID NO: 17018 - DNA, 1446 bp, synthetic construct
  source 1..1446: mol_type = other DNA; note = Synthetic coding sequence
atggcatcggcggcgtcagtgacctcattagcagacgaggtgaactgcccgatctgccagggaacactgagggagcccgtgacgattgattgtgggcataacttttgccgggcctgcctcacccggtattgcgagattccagggcccgatcttgaggaaagtcctacttgccctctttgcaaggaaccatttaggcctggtagtttcaggccgaactggcagctggctaatgtcgtggagaatattgaacgcttacagctggtgtccactcttgggttaggtgaggaggatgtctgtcaggagcacggagagaagatctattttttttgtgaagacgatgaaatgcaactgtgtgtagtctgcagagaggcaggggagcatgcaacacataccatgaggttcctggaagatgcagctgcaccctatcgggagcaaattcacaagtgcctgaagtgcctcagaaaagaaagggaggaaatccaagagattcagtcaagagaaaataagcgtatgcaggtgctgcttacacaggtaagcaccaaacggcagcaggtcatcagcgaatttgctcacctacgtaagttcctggaggaacagcagagtatccttctggcccaactagagagccaggatggagatatcctgcgacagagggatgagtttgacctgctggtcgcaggtgagatttgcaggttctctgcacttatcgaagagctggaggagaagaacgaacgccctgcccgggaattacttaccgatattcggtctactttaatccggtgtgaaacaagaaagtgccgtaagcctgttgccgtttcacccgaactgggtcaaagaatccgcgacttccctcaacaggccctccccctgcaaagagagatgaagatgtttctggagaaactgtgtttcgagctggactatgagccagctcatatttccttggacccacagacaagtcatcccaagctattgctatctgaggaccatcagcgggcccagttttcctataaatggcaaaattctcctgacaacccgcaacgattcgatcgcgcaacatgcgtgctggcacatacaggcattacggggggcaggcacacctgggttgtgtcgatcgacttggcgcatggcggctcatgtacagttggggttgtgtctgaagatgttcagagaaagggggagttacggctgaggcctgaggaaggggtatgggcagtaagactagcttggggatttgtctcagctttgggcagctttcctacgcggctcacactgaaggaacagcctcgccaggtgcgggtctcgctggattatgaggtgggctgggtgacattcacaaatgccgtaactcgagagcccatctatacatttacggccagcttcacccgaaaggtgatccccttctttggtttatgggggagaggatcctccttcagtttgtccagctag

SEQ ID NO: 17019 - DNA, 1986 bp, synthetic construct
  source 1..1986: mol_type = other DNA; note = Synthetic coding sequence
atgaatacaggcagagactctcagtcacccgatagcgcttggagatcatacaacgacgggaaccaggagaccctcaacggtgatgcgacatactctagcctggcagcaaagggttttcgatctgttaggcctaacttgcaggacaagaggtcgcccacccaatcccaaattaccgtcaatggtaattcagggggggcagtatctcctatgtcctactaccagaggccgttttccccatcggcatattcactgccagcttctcttaatagttccatcgtcatgcaacacggtacctccctggactctacggacacctacccacagcatgcccagagcctagacggaactacatcttcgtctattcctctgtaccggagcagtgaggaggaaaaacgggttaccgtgattaaggctccccactatcccggaatcggccccgtggacgaaagtggtatccccaccgccatccggacgaccgtcgatcgcccaaaggactggtataaaacgatgttcaaacaaattcatatggtgcataagcctgacgacgacaccgacatgtacaacaccccgtacacatacaatgccggcctgtataaccctccctattccgcccaatctcatccggctgctaagactcagacatataggcctttatccaagtctcactccgataattcgccaaatgcttttaaagacgctagtagccccgtgcccccccctcacgtaccaccccctgtcccgcccctccggccacgggacagatccagtacagagaagcacgactgggatccccccgacaggaaagtggatacgaggaaatttagatccgagccaagaagcatctttgagtacgagcctggcaaaagctccatcttgcagcatgaaagaccacctcctaagaaacctctcgactatgttcaggaccactcctcaggtgttttcaacgaggccagcctgtatcaatctagcatcgatcggagtcttgagcggccaatgtctagcgcctctatggcgtccgacttccggaagcgcaggaaaagcgaaccagcggtggggcctccaagaggtctgggcgatcagagtgcctcaaggacttccccagggagggttgatcttcccggatcttcaacgactctgacgaagagttttaccagttccagtcctagcagcccctctagagcaaaagatagggaatctcctcgctcctactcttctacgctcacagacatgggaagaagtgcccctcgcgagcgccggggcacccccgaaaaagagaagctaccagcaaaggctgtgtacgattttaaggctcaaacgagtaaggagttatcttttaagaagggggatacggtttatatcctgaggaaaatcgaccagaactggtatgagggcgaacaccacggccgggtgggaatttttccgatctcctacgtggaaaaattgactccgcccgaaaaagcccaacccgccagacctcctcctcctgcccaaccaggcgagatcggcgaagctatagccaaatataattttaatgctgacactaacgtcgagctgtcgctcagaaaaggggacagagtgattctcttaaaacgtgtggatcagaactggtacgagggcaaaatacccggcaccaatcgacaaggcattttcccagtttcttatgtagaggtcgtcaagaagaacacaaagggagctgaggattaccccgatcctccaatcccgcatagttactctagtgaccgcattcactcgctgtccagcaacaagcctcagcgccctgtgtttacacatgagaacatccaggggggaggagagcctttccaagccctgtataattacacacctcgcaatgaggatgaactggagttaagagagagcgatgtaatcgacgttatggagaagtgcgacgacggatggttcgtcggtacctcaagaaggacaaagttcttcggcactttcccaggcaactacgttaagcgtctatag

SEQ ID NO: 17020 - DNA, 483 bp, synthetic construct
  source 1..483: mol_type = other DNA; note = Synthetic coding sequence
atggaggccgagcgtccacaggaagaggaagatggggaacagggaccacctcaggacgaagagggatggccccctccaaactccactactcggccatggcgatccgccccaccctctccaccaccacctggtacgaggcatacggcccttggtccacgctctgcttcactcttatcactccagactgagttactcctcgatctggttgccgaggcgcagagcagacgattagaagagcagagggccacgttttacacacctcagaatccgtcttctctagcccccgcgccactgcgccctctggaggacagagagcagctctatagtactatcttgtcacatcagtgtcaacgtatggaagcccagagatcagagcctccccttccccccggagggcaggaactgcttgaacttctcctgagagtgcagggtggtggtcgaatggaggaacaacgctcccgaccacctactcacacttgttag

SEQ ID NO: 17021 - DNA, 717 bp, synthetic construct
  source 1..717: mol_type = other DNA; note = Synthetic coding sequence
atggactgtcgcgaaatggatctgtatgaagattatcagtcacctttcgacttcgacgctggtgtcaataaaagctatctatacttatcgcctagtggtaacagcagcccacccgggtctccaaccctgcaaaaatttggcctgctgcgcacagaccctgtgccagaagagggcgaagacgtcgctgcaacgatctccgctaccgagaccttgagcgaggaggagcaggaggagctgcggagggagttagctaaagttgaggaggagatccaaaccctgtcacaagtcctcgccgccaaagagaagcacctcgcagaaatcaaacggaaactcggcatcaattccctccaggaactgaagcaaaacattgccaaagggtggcaggatgtgaccgccacctccgcctataagaagacctctgagactctgtcccaggccggacaaaaagcctctgcagccttctccagtgtcggatctgtgattaccaaaaaattggaggacgttaacataagatctatccagcactcgatatccatgcccgcgatgcggaacagtccaacattcaaatcttttgaagaaaaagtcgagaatttgaaaagtaaagtcggaggcacgaaacctgccggaggagacttcggggaggtgctgaactccgccgccaacgccagcgctactactaccgagccccttccagaaaagacccaggaaagcctgtag

SEQ ID NO: 17022 - DNA, 108 bp, synthetic construct
  source 1..108: mol_type = other DNA; note = Synthetic coding sequence
atgcaaacaagctcctcgagatctgttcacctgagcgaatggcagaagaattacttcgctattaccagcggaatttgtaccggacccaaggctgatgcctatagatag

SEQ ID NO: 17023 - DNA, 327 bp, synthetic construct
  source 1..327: mol_type = other DNA; note = Synthetic coding sequence
atgacacggggcaatcaacgggaattggcaaggcagaaaaatatgaagaagcaatctgatagcgtcaagggaaagcgaagggatgacgggctaagcgccgccgcacgcaagcagagcgctataaccagcagcaggaattttctttatccagcctacgtgtactttcctagtagtgtgccctctccaccccgcaagtatacccagacctattacgcggccgtgccggcgggatggtggggcagtggcggaggccccgctactcagcccgcggcaggaggcagatggcggttcctgcacattttaggcacgcagcctcagtcacattag

SEQ ID NO: 17024 - DNA, 846 bp, synthetic construct
  source 1..846: mol_type = other DNA; note = Synthetic coding sequence
atgggagctggtaatctgccacctattactcaggaggaagctcttcatattctcggctttcagcctccattcgaggatattagatttgggcccttcactgggaataccactctcatgcggtggttcagacagattaacgatcacttccacgtgaagggatgttcgtacgtcctgtataaacctcatggcaaaaacaaaacagccggcgagaccgctagtggagctctcagcaaactgactaggggactcaaagatgaaagcctcgcttatatttatcactgtcagaaccactacttctgtcctatcggttttgaggcaactccggtgaaggccaacaaggctttttctcgcggaccattgagcccacaggaagttgagtactggatcctgattggcgaatcctcaagaaaacacccggcaatccactgtaagaaatgggcagatatcgtgacagacctgaatacacagaatccagagtacttagacattcggcatctggagcgtggattgcagtatcgaaagaccaagaaacccacgtttttctcctcccaggtgggaggtaacctgcattgtattatcgcgtttcaacgactgaactggcagcgcttcgggctgtggaatttccccttcgggacaatccgccaggagagccagccgcccactcatgcacagggcattgcaaagagtgaatccgaggataatatatctaaaaaacaacacggcaggctgggtagaagcttctctgcttcattccaccaggattccgcctggaagaagatgtcctctattcacgaacggcgcaactctggctatcagggttacagcgactacgacggaaacgactag

SEQ ID NO: 17025 - DNA, 213 bp, synthetic construct
  source 1..213: mol_type = other DNA; note = Synthetic coding sequence
atgcgtgcactgacagttcagcgtgtgaaatttgccatggacctgccgctcctgaagcgggccggccaggatctggccgaaaaaacaaaaaatttcgtgagcagaagtttagtgatcggggaggtgctctcaatggccgacatggccacaggagtgaaatgtgggataatctactggctgtttgggggtgcaattcgtaacttgggtagctag

SEQ ID NO: 17026 - DNA, 1644 bp, synthetic construct
  source 1..1644: mol_type = other DNA; note = Synthetic coding sequence
atggctgggaccaagaataaaacaagggcacaggcaaaaacagagaaaaaggcggcaatacaggccaaggccggagcggaacgagaggccaccggggtcgtgcgcccagtagctaagacacgcgctaaggcaaaagccaagacagggtctaagactgatgccgtggccgagatgaaggccgtgtctaaaaataaggttgtcgctgagaccaaggagggtgcactgtctgaaccaaaaaccctaggaaaggctatgggcgactttaccccaaaagccggcaatgagtctacctcctccacatgtaagaatgaggctggaacagatgcatggttctgggcgggggaagaagctaccattaacagctggttctggaacggcgaggaggcgggcaactccttcagcacaaagaacgacaagcccgagataggagcacaggtctgcgctgaggagctggagcccgcggcaggcgcggattgcaagcctaggagcggcgctgaagaggaagaggaagagaacgtcatcggaaattggttctgggaaggcgatgatacatcctttgacccaaatccaaaacctgtttcccggattgtgaagccccagcctgtctacgagatcaacgaaaagaataggcccaaggattggtcagaggtgacaatctggcccaacgccccagctgtgacccctgccgtccttggcttcaggagtcaggcccctagtgaagcctctccaccttcctatattgttctggcaagtgccgaagagaacgcttgctctctgccggtggccacagcatgcagaccctctaggaacacccgctcttgcagccagcctattccagagtgtcgttttgacagtgatccatgtatccagacaatagacgaaattagacggcagatccgcatcagagaagtcaatgggatcaaaccattcgcatgcccgtgcaagatggagtgctacatggactccgaagagtttgaaaagctggtgtccctactaaagtcaactaccgaccctctgattcacaaaatagcccgcattgctatgggcgtgcataacgtccaccccttcgctcaggaattcatcaacgaagtgggagttgtgactctgattgagtctctgctaagcttcccctcccccgagatgcgcaaaaagacagtaattacactcaacccaccaagcggggacgagagacaacgcaagatcgagctccatgtaaagcatatgtgcaaagagactatgtcattccctcttaattcccccggccaacagagtgggctgaaaatcctgggacaactgacaacagacttcgtgcaccactacatcgtggctaattacttttccgagctctttcacctgctgtcctccgggaattgtaagaccagaaacctcgtcctgaagctgcttcttaatatgtcagaaaacccgacagcggcgcgggatatgatcaacatgaaagccttagcagctctcaagttgatcttcaaccagaaagaggcaaaggctaatctggtatctggcgtggccatctttataaacattaaggagcacataaggaaaggttctatcgtggtggtggatcaccttagctataatacactgatggctattttccgcgaagtaaaggaaatcatcgaaaccatgtag

SEQ ID NO: 17027 - DNA, 489 bp, synthetic construct
  source 1..489: mol_type = other DNA; note = Synthetic coding sequence
atgagctacaactgctgttcacgcaacttttccagctgcagtcacggtggctaccttcattaccccggtagctcgtgtggctcctcgtacccctctaacctggtatactcaaccgatttgtgcagcccatccacctgccagctggggagtagcctctatagggggtgccaggagacgtgctggagacccaattcttgtcagacattttgttactacccccgcacgcacatgctttgtaacagttgccttacaatgcatgtcggttctaggggcttcggcagtaactcctgttgtagcctgagctgtggctctcgctcctgttcaagcttgggctgtggctccaacggttttaggtacctgaactatagaattcacaccagcccatcccagagttaccggtcccgtttctgccaccctatttacttccctcctaggcgctggtttcactcttcgtgctaccaacctttttgcaggagcggtttctattag

SEQ ID NO: 17028 - DNA, 495 bp, synthetic construct
  source 1..495: mol_type = other DNA; note = Synthetic coding sequence
atgtttatatccttttacgatttcaagaacataccccaggatagcagatgcgacggccagctattcattaacggacgcaataataagaacaactcgatcagcctttacttccagggaggactgcgacatgctagtgcttccatcgggggaagcgaggcctacagacacatgaaatttgagggcggagttcacagagtacagcgcgtaccaaagacagagaagcagggacgggtgcacacttcaacaatgacagtggcaatactacctcagcctacagagattaatctggttataaacccaaaggaccttcggatagataccaaacgggctagcggggctggcggacagcatgtgaacaccaccgattctgccgtcaggattgtgcacctcccgaccggggtggtctcagaatgccagcaggaaaggtcccagctcaaaaacaaagaacttgccatgaccaaacttcgcgcaaagttgtacagtatgcatctgtag

SEQ ID NO: 17029 - DNA, 2166 bp, synthetic construct
  source 1..2166: mol_type = other DNA; note = Synthetic coding sequence
atggaagaggagctcaagtgtcccgtatgcgggagtttgtttagagagcccataatcctgccatgctcacacaacgtttgcctcccatgcgcccgtacaatagcagtccagacacccgacggcggatcagccgctggaggactcggcggtggcgccggaggcgggggagaccacgccgacaaactttcgctgtactctgagactgatagtgggtacggtagctatacgccttccctgaagtcacccaacggcgtgagagtcctgcctatggttcctgcaccccccggttcctcagcagccgcggcacggggggccgcatgttcctctcttagtagctcgtcatcttcaatcacctgtcctcagtgtcatcgctccgcttctctggatcacaggggtcttaggggctttcagagaaatcgccttctggaggctatcgtccagaggtaccagcaggggcgtggggctgttccgggaacatccgctgcagcagcagtcgccatttgccagttgtgcgaccgaacccctcctgaaccagcagccacattatgtgaacagtgcgatgtgctttattgttccgcttgccagctgaagtgccatccttccaggggcccttttgcgaagcaccgcctgggggcaccatctggcgggggcggatgcaagtctcccgggggcgccggggctggagccaccgggggatctacagctaggaagtttcccacctgcccagaacatgagatggagaattactcaatgtattgcgtctcttgtcggacccccgtgtgctacttatgtctagaggaaggtagacatgccaaacatgaggtgaagcccctgggagccatgtggaagcagcataaagctcagctgagtcaagctttgaacggagtgtccgacaaagccaaggaggccaaggaattcttggtgcagctgaagaacattctgcagcagattcaggaaaatggactagattacgaagcttgcctggtcgcccagtgtgacgccttggtggacgcgttgactcgacaaaaagcaaagcttctgacaaaggtgaccaaagaaagagagcataaactgaagatggtgtgggaccagataaaccactgtacactgaaactgagacaaagtacagggctcatggaatactgtctggaggtgattaaagagaacgacccgtccggatttctccagatctcagacgctctcatcaaacgagtgcaggttagccaggagcaatgggttaaaggtgccctggagcctaaggtgagcgcagagttcgacctgactctcgactcagaacctctgctgcaggccatacaccagctggattttatccaaatgaaatgccgggtgcctcctgtgccacttctgcagctggaaaagtgttgtacccgcaataacagcgtgacactggcctggcggatgcccccattcacccactccccggtggatggttatattctcgaattagacgacggcgcaggaggccagttcagggaagtgtatgtgggcaaggaaacactttgcacgatcgacggcctgcatttcaacagcacttataacgctagagtaaaggcctttaattcctccggtgttggcccttatagcaaaaccgtggtgctgcagacctccgatgtcgcgtggtttacatttgatcctaatagcggacatagggacatcatcctcagtaacgataaccagacggccacctgctcctcttacgacgaccgcgtagtacttgggacagctgcattttccaaaggagtccattattgggaattgcatgtcgatcggtacgacaaccacccagaccccgcattcggcgttgctagggcctcggtagttaaggatatgatgttgggaaaagacgataaagcctgggcaatgtacgtggataataatcgttcctggttcatgcattgcaatagccacacaaacaggacagagggaggggtgtgtaagggggccacggtaggggtgctgctggatctgaataagcatactctcacctttttcattaatggacagcagcagggacctacagcgttttcccatgtcgacggcgtgttcatgcctgccctgtcactcaacagaaatgtacaggtgactctccataccggcctcgaagtccctacaaacttgggaagaccaaaactgagtggaaactag

SEQ ID NO: 17030 - DNA, 1479 bp, synthetic construct
  source 1..1479: mol_type = other DNA; note = Synthetic coding sequence
atggacttcttgctggggaaccctttcagttctcctgtggggcaacggatcgaaaaagcaacggacggcagtctccagtctgaagactgggccctgaacatggaaatctgcgacatcattaatgaaactgaggagggtcccaaagacgcactccgcgcagttaagaaacgcatcgtaggcaacaaaaacttccacgaagtcatgctggctctcacagtactcgagacctgtgtgaaaaattgcggccatcgctttcacgtgctggtggccagccaggatttcgtcgaatccgtgctagtgaggaccatcctgccaaagaataatccacccacgattgttcacgataaagtcctgaacttgatccagtcatgggccgacgccttccgatcctccccagatttgaccggggttgtaacaatctacgaagatcttcggcgcaaggggctagaatttcccatgacagatttggatatgctttcccctatacacaccccacaacgtaccgtgtttaattcagagacgcagagcggtcaagattctgtgggcaccgattccagccagcaggaagatagtggccagcacgccgccccactacctgctcccccgatattgtctggtgacacaccaatcgcacccacccctgaacagatcggcaaactgcgcagtgagctggaaatggtgtccggcaatgttcgagtgatgagcgagatgctgactgagttggtgcccacccaggctgagcctgccgaccttgaactgctgcaggagcttaacagaacttgccgggcaatgcagcagagagtcctcgaattgatacctcagatcgccaatgagcaacttaccgaggagctgctgattgtaaatgataatttgaacaatgttttcctccgacatgagaggttcgagaggttcaggactgggcagacgactaaggcccccagcgaggccgaacccgcagcagatcttattgatatggggcctgatccagcagccacaggcaatcttagctcacaactcgcaggaatgaatctgggaagttcgtctgtacgagctggtctgcagagtctcgaagcatcaggtagactggaagatgaatttgatatgtttgccctcaccaggggcagctctttagctgaccaacgaaaagaggtcaagtatgaggcgccccaagctactgacggcctggccggcgcactcgacgcaaggcaacagtctaccggggctatccccgtgacccaagcatgtcttatggaggatatcgaacagtggctgtccaccgacgtgggaaacgacgctgaggaaccgaagggcgtcacgagcgaggagttcgataaattcttagaggagagagcgaaagccgcggatcgcctgcccaatctctcatccccaagcgccgagggtcctccaggacccccaagcggacccgctcctcgcaaaaagacccaggaaaaggacgacgatatgctgttcgcactctag

SEQ ID NO: 17031 - DNA, 747 bp, synthetic construct
  source 1..747: mol_type = other DNA; note = Synthetic coding sequence
atggcaacgtccgctcctctgcggtctctcgaggaagaagttacctgttctatatgcctcgattatcttcgcgacccagtgacaattgactgcggacacgtcttctgtcgcagctgcaccacagatgtcaggccgatctctggatcacggccagtgtgcccactctgtaaaaaacccttcaaaaaagaaaacattcgtcccgtctggcagttagcctccctggtcgaaaatatcgaacgcttaaaggtggacaaaggtcggcagcccggagaggtgacacgcgaacagcaggacgctaaactatgcgagagacatagagagaagctgcactactattgtgaggatgacggtaaattactctgtgtcatgtgccgggaaagtcgcgaacaccgccctcacacagcagtgctgatggagaaggctgcgcaaccccaccgggaaaaaatcctgaaccacctttcaacactgcgtagagatcgtgacaagatccaaggcttccaagctaaaggggaggccgatatcctcgccgcacttaaaaagttgcaggaccagcgccagtatattgtggcagaatttgagcaaggtcaccagtttctgcgggagagggaggagcatctgctggaacaactcgccaaactggagcaggaactcacagagggccgtgagaagttcaaatctcggggagtgggcgagttagcgaggctggctctggtgatctctgaactcgaaggtaaagcccaacaatag

SEQ ID NO: 17032 - DNA, 21 bp, synthetic construct
  source 1..21: mol_type = other DNA; note = Synthetic coding sequence
atgtcacgtcggcggttttag

SEQ ID NO: 17033 - DNA, 165 bp, synthetic construct
  source 1..165: mol_type = other DNA; note = Synthetic coding sequence
atgagtgagcagggtgaccttaaccaagcaatcgctgaagagggaggaaccgaacaggagacggccactccggaaaatggcattgtcaagtcggagagcctagatgaggaggagaaactggagctgcagcgaagactggaggcccagaaccaggagaggaggtag

SEQ ID NO: 17034 - DNA, 1446 bp, synthetic construct
  source 1..1446: mol_type = other DNA; note = Synthetic coding sequence
atggcgtccgctgcctccgtgacaagcctcgcagatgaggttaattgtccaatctgccagggcacactgcgtgagccagttacgattgattgtggacacaacttctgtagagcatgtctgaccagatactgcgagatacccggaccagatctggaagagagccccacctgtcccttgtgcaaagaaccttttagacctggaagcttccggcctaattggcagctcgcaaacgtagttgaaaatatcgagagattgcagttggtatctacacttggactgggcgaggaagatgtgtgccaggagcatggggaaaagatatacttcttttgcgaggatgacgagatgcaattgtgtgtggtgtgtcgagaggccggcgagcacgctacccacacgatgcgcttcctggaggacgctgcggcaccgtacagggaacagattcacaagtgcctcaaatgtctgaggaaagagcgggaggaaatccaggagatccagtcgcgagagaataaacgtatgcaggtgcttttgacccaggtgtctacaaagcggcagcaggtgatctccgagtttgctcacctgaggaagtttctggaagagcagcaaagtattttactggctcagctggaatcccaagacggcgacattctgagacaacgggacgagttcgatctactggtggcaggggaaatatgcaggttttcagcgctgatagaggagttggaggaaaaaaatgagagaccggctagagagttgcttacagatattagaagcaccctaattcgatgtgaaactcgaaaatgccgcaagccagtggccgtgtctcctgagctcgggcagagaattcgggattttccacagcaagccttaccccttcagcgagagatgaagatgttcttggaaaagctgtgcttcgagctcgattatgagccggcgcacataagtctggacccgcaaacaagtcaccccaaattgctgcttagtgaagatcaccagagggctcagttttcatacaaatggcagaatagtcctgacaacccacagcggttcgacagggcaacttgcgttctggcccacaccgggatcacaggaggtcggcacacatgggtggtgagtatcgatctggctcatgggggcagctgcaccgtgggagtggtgagtgaagacgtccaaagaaagggcgagctcaggctgaggcccgaggagggcgtctgggctgtaagactagcctggggctttgtgtcagcgctgggctccttccccacgcggttgactcttaaggaacaaccgagacaggtgcgggtgtcactcgattatgaggtgggatgggtaacatttaccaatgccgtgacccgtgagcccatttatacgttcaccgcttcctttaccagaaaagttatcccctttttcgggctctggggtcgcgggagctccttctcactcagcagttag

SEQ ID NO: 17035 - DNA, 312 bp, synthetic construct
  source 1..312: mol_type = other DNA; note = Synthetic coding sequence
atggggcagcagtcctccgtccggcgccttaagaggagtgtaccctgcgagagcaatgaagccaacgaggccaacgaggcaaacaaaacgatgcccgaaaccccaacaggtgactcagacccccagccagcccccaagaaaatgaagaccagcgaatcttccaccatcctagtggttaggtaccgaagaaacgtgaagcgcactagtccagaagagctggtgaacgaccatgctcgtgagaatcgaatcaacccggaccaaatggaggaggaagagtttattgagataactaccgaaagacctaagaagtag

SEQ ID NO: 17036 - DNA, 2919 bp, synthetic construct
  source 1..2919: mol_type = other DNA; note = Synthetic coding sequence
atggagcgaatgaattggctgagtcgcctggcttcccgtggtccaggacacagaatacctcagggcgcaaatctgcaaacccctgtaatggccgaccccgagacgtgcctcatggtcttcaagaatcactggagccaggtggtgcggatcctggaaaggcaaggaccccgagccgcacctggaggcgccgatgacctgtcagctgtgaggaaccacacttaccagatgttgacactcttggcagaggatagggccgtcccctctgcccctaccggaccgggtcccttactagagttcgctctccacgaagaccttctgacacgggtgctgacttggcaactgcagtgggacgagctgggtgacggcgtagaagagaggcgggccgaacaactcaaactgtttgagatgctagttagtgaagcaagacaacctctcttgagacacggaccagtcagagaagcattgctgaccctgcttgatgcgtgcggacgtcccgtccccagttctcctgcgctggatgagggcctcgtgctgctgctgtcccagctgtgcgtgtgcgtagcgcaggagccctcgctcctggagttctttctccagcctcccccagagcctggtgcggcgccaagacttcttctcttttcccgactggtgcctttcgtgcacagggagggaacactcggccaacaggcaagggacgcacttttgcttttaatggccctctccgcaggaagtcctactgtcggaaggtacattgctgatcattcttacttttgtcccgtcctagcgactggcttgtctgccctgtactcttcacttccaagaaaaatcgaagtgccaggagacgactggcactgtctcaggcgggaagactggctgggtgttcccgctcttgctctatttatgtcgtcacttgagttctgcaatgccgtgattcaggttgctcaccccctggtccagaagcagctcgtggattacatccacaatggatttctggtccctgtcatggggcctgccctgcacaagacaagcgtggaagagatgatcgcctccacagcttacctcgagctctttctgagatctatttctgagcccgctctgttgcggaccttcttgcgcttccttctgctgcacagacacgatacccacacaatccttgatacactggttgcccgaatcggcagcaactctaggctgtgtatggtatctcttagcctattcaggacactcctgaatttgtcctgcgaagatgttcttctgcagctggtcctgaggtacctcgttccttgcaaccatgtaatgcttagccagaagcctgcagtgagagatgttgatttatatggcagggcagcagacaaatttctgagtttaatccccaggtgctgcagacatcatgcccctagtcccccccgacctgagcacgctagctgggcccgggggcccggctctccatcagtagatagcagttcagtgactaccgtgcctcggcccagtactcccagtcggctggcactgttcctcagacaacagtctctgggtggcagtgagtctcccgggcctgccccatgctctccaggtctttcagctagccccgcctcaagcccggggcgcagacctactccagccgaggagccgggcgagctcgaggacaactatcttgaatacttaagggaggcccggcgcggtgtcgatcggtgcgttcgcgcctgtagaacctggtccgctccctatgacggagagaggccctccccagaaccatctcccttcggctcccggaccaagaaacgcagcttactgcctgaggaggataggaataatgtgggcgaaggtgaagaggaagagctggggagacgcgggcgcgcagggggcgctggtgaaggccccggccatctgcctcccccacagctcaacggggtccccggctcttggccagagggagccaagaaagtcaggctcgtccccaaggaaggagctggcgaacttttagaaggcatttctgaaggtatggcgggtctggaggggttcgggcaggagctccgcgaactagaagtggccctctctaacggcggaacaggtagcgaaagccctctcgagccccctctcccactggaggaagaggaggcctacgaatccttcacctgccctcccgagccacccggtccctttctatcaagtcccctgcgcaccctgaaccaattgccctctcagccattcacaggtccttttatggcagttctctttgccaaactcgagaatatgctacagaactccgtgtacgtcaactttctgcttactggcttggtcgcccaattagcttgccatccacagcctttattacgcagcttcttgctgaacaccaacatggtgttccaaccaagtgtcaaatcacttctgcaggttctgggttctgtgaaaaacaaaattgagaacttcgctgcatcccaagaggatttccctgcacttctgagcaaagccaagaagtacctaatagccagaggcaaattggactgggctgaaggtcctgcggccggccctgcccctaggcgttctgatcccttagtgaagagccgccgccccagcttgggcgagttactcctccgtcacgcacatagtcccacacgcgctagacaggctgctcaactggtattgcaaccgggtcgtgatggcgcaggtcttggactgtcgggcgggtcccccggtgcctccacgcccgtgttgctgactcgaggcggggccccagagcgccagggcgaggcactgagagttaagaatgctgtatattgtgcagtcatttttcccgaatttctgaaagagttggcggcaatatctcaagctcacgcggtaacctctcccttcctactggaaacctcagaagaaggcagtggcccgttaatttctgggtgcggccctctcaacccctag

SEQ ID NO: 17037 - DNA, 1929 bp, synthetic construct
  source 1..1929: mol_type = other DNA; note = Synthetic coding sequence
atgaagattttttgctcaagagctaatcccacgaccggttctgtggaatggttagaggaggacgagcactacgattatcaccaagaaattgcccggtcctcctatgctgatatgcttcacgacaaggatcgagtgttcaaacccatggccgacgccgctgtgaaaattgtcgagaaaaatgggtttagcgacaaaatcaaagtaattaataaacatagcactgaagtgacagtgggacccgaaggagacatgccctgcagggctaacatacttgtcactgagctgttcgacaccgaactcatcggcgagggggccctacctagctacgagcacgcacaccgtcacttagtcgaagagaattgcgaagccgttcctcaccgtgcgacggtttatgctcagctcgtggaatcagggcgtatgtggagctggaacaagctttttccgattcatgtacaaaccagcctgggcgagcaagtgatcgtaccacccgtagacgtggaaagttgtcccggggccccctccgtatgcgatatccagctgaaccaagtaagcccagcagattttactgttctctccgatgttctccccatgttctccatcgatttcagtaaacaggtgtccagtagcgcggcctgccatagccgcaggtttgaaccgctaacaagtggccgtgcccaagtggtgctctcctggtgggacatagaaatggatccagaaggaaagatcaaatgcacaatggccccgttttgggcgcacagcgaccccgaggagatgcagtggcgggaccattggatgcaatgcgtctacttcctcccacaggaggaaccagttgttcaggggagtgcactgtacctcgtggctcatcatgatgattactgcgtgtggtattcgctccaacgaacatcgccggagaaaaatgagagggtaagacagatgcgaccagtgtgcgattgccaagcccatctattgtggaacagaccccggttcggcgaaataaatgatcaggatcgcaccgaccggtacgttcaggcgctgcgcaccgtgctcaaacctgactcagtgtgtttgtgcgtttctgacggatctttactgtccgtgctggcccaccaccttggcgttgagcaagtgtttacagtggaaagcagcgctgcttctcacaagctcctgaggaaaatcttcaaggctaaccacttagaggataaaattaacatcattgagaagagaccagagctgctgactaacgaggatctccagggcaggaaggtatcactgcttctgggggagccattcttcacaacaagtctgctaccttggcataatctgtatttttggtatgtgagaacagccgtggaccagcacctgggacccggcgcaatggtgatgccacaggccgctagtctgcacgcagtagtcgtcgagttcagagatctgtggcgtattcgctctccatgcggggattgcgaagggtttgacgtccatatcatggacgacatgatcaaacgagcactggacttccgcgagagcagagaggccgagccgcaccctttgtgggagtacccatgtcgaagcctgagcgaaccctggcagattctgactttcgacttccagcagcccgtgccccttcaacccctctgcgccgaaggcaccgtggagcttagaagacccggacagtcacatgctgcagttttgtggatggagtatcatctgacgcccgagtgcactttaagtactggtcttctggaaccagctgatccagaggggggatgttgttggaacccccactgcaaacaagccgtgtattttttttcacccgccccagatccacgagctctgcttggaggtcctcgaacagttagttatgctgtggaattccatcccgataccggagacattattatggagttccgccatgccgacactcctgactag

SEQ ID NO: 17038 - DNA, 1935 bp, synthetic construct
  source 1..1935: mol_type = other DNA; note = Synthetic coding sequence
atgtcagtcacccttacgtcagtgaaaagggttcagagttctcccaacttgctagcagcgggccgcgacagtcagagccctgacagcgcttggcggtcatataatgacggaaatcaggagaccctcaacggggacgctacctactcatccctcgctgccaagggctttcgatcagtgcggccgaacctgcaggataagcggtcccctacacagtcacaaataacggtgaatggcaactcaggaggagccgtttcccctatgtcatattatcagcggcccttctcaccctccgcatattctctgcctgcgtccctgaactcatcgatagtgatgcaacatgggaccagtctggactcgactgatacctatcctcagcacgcccagagtttggacggcacaacctcctctagcattcctctgtatcgatcgtcagaagaggagaaacgggtcacagtgatcaaggccccccattacccgggcatcgggcccgtggatgagtctggtattccaaccgccattagaaccacggtcgaccgacccaaggactggtacaagaccatgtttaagcaaattcacatggttcacaaacccggcctttacaatccgccttattcggcacagtcccatccagctgcgaaaacccagacatatcggcccctgagtaagtcccattctgacaatagtcctaacgcctttaaagacgcttccagcccagtcccccccccacacgttcctccacctgtaccccccttacgtccacgcgaccgctcatcaaccgaaaagcatgactgggatcctcccgacagaaaagttgatacccgtaagttcagatctgaaccgcggtcgatcttcgaatatgaaccaggcaagtcttccattctgcagcatgagaggccagcatctttgtaccagagctcgattgacagaagtctcgaacggcctatgtccagtgctagcatggcctccgactttaggaagcgaaggaaatccgagcctgctgtaggtccccccagagggcttggggaccaatccgcgagcaggactagtcctggtagggttgatctgcctggatctagtactacgctgacaaagagcttcacaagcagctccccttcctcccccagccgcgccaaagatcgggagagtcccagaagctattcctccacactgactgatatgggccgttccgcacctcgggagcgtcgaggtacccctgaaaaggagaagctcccggccaaggccgtttatgattttaaggcccagacatcgaaggagttatcctttaagaagggcgatactgtgtacattcttaggaaaattgaccagaattggtatgaaggggaacatcacggccgcgtgggcatctttcccatttcatatgtcgagaagctgacccctcccgagaaggctcagcctgctcgtccacccccaccggcacagcctggggagatcggcgaagcaatcgccaagtacaatttcaatgcagataccaatgtcgaactgagtctgcgtaagggagatcgcgttattctcctcaagcgcgtggaccagaattggtatgaaggaaaaattcctggcacaaataggcagggtatcttcccagtcagttatgttgaggtagtgaagaaaaacacgaagggcgcagaggactatccagatccaccaatcccccacagctacagtagtgatcgcattcattccttgtccagcaataagccacagcgacctgtgtttacccacgaaaacatacagggcgggggagagccctttcaggctctgtacaattacacaccccggaacgaagatgagctggagctcagggaaagtgatgtgatcgacgtcatggagaagtgcgatgacggatggttcgtgggaaccagccgcaggacaaaattcttcgggaccttcccgggcaattacgttaagcggctgtag

SEQ ID NO: 17039 - DNA, 294 bp, synthetic construct
  source 1..294: mol_type = other DNA; note = Synthetic coding sequence
atggggaaatcatgtaaggtggtcgtatgtgggcaggcgtccgtcgggaagacaagcattctggaacaattgctgtacggaaaccacgtagttggctccgaaatgatcgagacccaagaggacatctatgtcgggtcaattgaaaccgataggggcgtgagggaacagatcgccgaatctcttttcagcgtgtggagttgctcacggaggagattgacaaatcccagaactagacggcggtctccaagctggagtctcgctacttccgttacctaccgttcatccggggtctag

SEQ ID NO: 17040 - DNA, 915 bp, synthetic construct
  source 1..915: mol_type = other DNA; note = Synthetic coding sequence
atgtcgaagacccacgaccaccagctggaaagttccctctcgccagtcgaggtgtttgctaagacgtcagccagtttggagatgaaccagggggtttcagaagaacgtatccatctgggaagcagcccaaaaaaaggaggtaactgtgatctgtcacatcaggagcgcttacaaagcaagtccctacacctgtcccctcaggagcagtcagccagctatcaggataggcggcagtcttggaggagggcctcaatgaaagaaacgaacaggagaaagagtctgcacccaattcatcagggtattacagagctttctcggagcattagcgtggaccttgctgagtccaagcggctgggttgcttgctactctctagtttccagttcagcatacagaagctagagccatttttgcgggacactaaggggttcagcctggagagtttcagggccaaggcctcatctctaagtgaggagcttaagcacttcgccgatgggcttgagacagatggcacccttcagaagtgcttcgaggactcaaacgggaaggcatcagatttcagtttggaggccagcgttgcagaaatgaaggagtacatcaccaaattttcactggaaagacaaacttgggatcaactgctcctgcattaccagcaggaggcaaaagagatcttgtcgcgaggaagtaccgaggcaaaaatcacagaggtaaaggtggagcccatgacctacctcggctcttctcagaatgaagtgctgaacaccaaaccagattaccagaaaatcctgcagaaccagtcaaaggtatttgattgcatggaactggtcatggatgaattgcagggatctgtcaagcagctgcaagcctttatggacgagtccactcaatgctttcagaaagtgtctgtgcaactttag

SEQ ID NO: 17041 - DNA, 1842 bp, synthetic construct
  source 1..1842: mol_type = other DNA; note = Synthetic coding sequence
atggcaaccatccccgactggaagctgcaactgctggccagacgtaggcaggaagaggcaagtgtcagaggacgggagaaagccgaaagggagaggttgtctcaaatgcctgcttggaaacgggggctgctagaacggagacgcgcgaagctgggactaagtcccggcgagccatctccagtgctgggtacggtcgaagcaggacctcccgatcccgacgagtctgcggtgctgttggaggctattggacctgtccatcagaatcgttttatcaggcaagagaggcagcagcagcagcaacagcaacagcggtcagaggagctccttgctgagagaaaacccgggccccttgaagctcgcgagcgcagaccctctccaggtgaaatgagagatcagtcacctaaaggcagggagtccagagaagaaagattgagcccgcgggaaactagggagcgtcggctgggaatcggtggtgcgcaggagctgtcactccggcctctcgaggcccgcgactggcggcagagccctggcgaagttggggatagatcttcgagattgagtgaagcctggaaatggagactgtcgccgggagaaactcctgagagatccctccggttggctgagtcccgggaacagtcaccaaggagaaaagaggttgaaagtcgactaagcccaggggaaagtgcctaccagaaactcggtctcaccgaggcacataagtggaggccagattcacgagagtcacaagaacagtcgcttgtgcaactggaggctacagaatggaggttacgatccggagaagaacgacaggactactccgaggaatgcggcagaaaggaagagtggccggtccctggtgtggcccccaaggaaactgcagaactatcagaaacgctcactcgcgaggcccaggggaattcctccgccggggttgaagccgctgagcagcgcccagtagaggacggggaacggggaatgaaaccaacagagggatggaagtggacgctgaactctggtaaggctagagagtggacacctcgggacatcgaggcacaaacgcagaaaccggaacctcccgaatccgccgagaagctgttagaatcacctggggttgaggccggagagggggaggccgaaaaagaggaagctggtgctcagggtcgaccgctgagggcgctacaaaattgctgttcagtgccatctcccttgccccctgaggacgccgggactgggggattgagacaacaggaagaagaggccgttgagctacaacctcctccacccgcgccactctcaccaccacccccagctccaacggccccccagcctccaggggaccctctcatgtctcgactgttctatggcgtgaaagcaggacctggagtcggagcaccacgaagaagtgggcacaccttcactgtaaatcctaggcgtagcgtgccccccgctacgcccgcgacacccacctccccagctactgtggacgcagcagttcctggtgccggcaagaaaaggtatccaactgccgaagagatactcgtcctcggaggttacttgagactgtcacggagctgcctggctaagggcagccctgagcggcatcataagcaactgaagatctcattttcagagacagcgctggaaactacatatcagtacccctcagagtcgagcgtcctggaggaactcggcccggagccagaagtgcctagtgctccgaacccccccgccgctcagcccgatgacgaagaggatgaagaggagctgcttcttctccagcctgaactgcagggcggtcttagaaccaaggctttaatcgtggatgagagctgtcgccggtag

SEQ ID NO: 17042 - DNA, 1560 bp, synthetic construct
  source 1..1560: mol_type = other DNA; note = Synthetic coding sequence
atggagggcgtgctctataagtggacgaactacctaagcggttggcaaccccgctggttcctgctttgcgggggaatccttagttactacgactcaccagaggacgcatggaaggggtgcaaaggatctatacagatggctgtttgcgagatccaggtccactctgtagataataccaggatggatctcattatcccaggggaacagtatttctacttaaaagctagaagtgtcgcagagcggcagaggtggctggtggccctcgggtcagctaaggcatgcttgacggactcacgaacccagaaggaaaaagagtttgccgagaacactgaaaatctgaagactaaaatgtcagaactccgactgtattgtgatctccttgtgcaacaggtggataagaccaaggaggtgaccactacgggagtgtctaatagtgaagagggaatcgatgtaggcaccttactgaagtctacctgtaacacatttctgaaaacattggaagagtgcatgcagatcgcaaacgctgcatttacctccgaactcctgtaccggacacccccgggaagtccccagctggcaatgctgaagtcatcaaagatgaaacatcccatcatcccaattcataacagcctggaaaggcaaatggaactatccacatgcgagaacggcagtctcaacatggagatcaacggcgaagaagagattctcatgaagaacaagaattccctgtacctgaaaagcgccgaaattgattgttccatctcttcagaggagaacacagacgacaacatcacagtccagggagaaattaggaaggaggacgggatggagaatctgaaaaaccacgataataacctgactcaatctggcagtgactcctcgtgctcccccgagtgcctgtgggaggaggggaaggaggtcattcctactttcttctcaaccatgaatacatcgttctccgacattgagcttctggaggactccggtatacccaccgaagctttcctcgcgtcatgctacgccgttgtacccgtacttgacaaactcggcccgacagtttttgcccccgtgaaaatggacctcgttggtaatattaaaaaggtcaatcaaaagtacatcactaataaagaagaattcactacgctgcaaaagatcgtgctgcacgaggtggaggccgacgttgctcaagtcaggaattcggccaccgaagcactgctctggcttaagaggggcctgaagttcctcaagggatttcttacagaggtgaagaacggggagaaggacatccaaacagccctcaacaatgcctatggcaagaccctgcggcagcaccacggttgggttgttcggggagtgttcgccctggccctcagggctgccccgagttatgaggattttgtcgccgctctcactgttaaagagggggatcaccagaaggaggccttcagcattggtatgcagcgcgacctgagcctctacttgcccgcaatggaaaagcagcttgccatcctggatacattatacgaagtccatggccttgagtccgacgaggtagtgtag

SEQ ID NO: 17043 - DNA, 1446 bp, synthetic construct
  source 1..1446: mol_type = other DNA; note = Synthetic coding sequence
atggcctcagccgccagtgtgacctctctggctgacgaggtgaattgccctatctgtcaaggcaccctgagagagcccgtaacgatcgactgtggtcacaacttctgtagagcttgcctgacccggtactgtgaaattccagggcccgatctggaggagtcccctacatgtccgctgtgcaaagagcctttcagaccgggcagtttccgacctaattggcagcttgccaacgtggtggagaatatcgaacggttgcagctcgtctccacgctgggactgggagaggaggacgtttgccaggagcacggcgaaaagatctactttttttgcgaagacgacgagatgcagctctgtgtggtgtgccgagaggccggagaacatgctacacacaccatgagattcctcgaagacgccgctgctccctatagggagcagatccacaaatgcctaaagtgcctccggaaagaacgcgaggagatccaggagatccagtcaagagagaataaacgaatgcaggttctgcttacccaggtgtccactaaaagacaacaagtaattagcgaatttgcacatctgcgaaagtttctcgaggaacaacaaagcatcttattagcacagttggaatcccaggatggcgatattttgagacagcgagacgagttcgatttactggttgctggcgagatttgccgttttagcgcgctgatcgaggagctggaggagaaaaacgagagaccagcccgtgaattgttgactgatatccggtctaccctcatacgctgtgagacgcggaagtgccgcaaaccagtggcagtaagtcctgaacttgggcaacgaattcgggatttcccccagcaggccctgccactgcaacgcgaaatgaaaatgttcctggaaaaactttgcttcgagctggattacgaacctgcgcacatatctctggaccctcagacctcccacccaaagctactgctctccgaagaccaccagagagcccagttttcctataagtggcagaattcacccgataacccacaaagattcgacagagcaacctgtgtgttggctcacactgggattactggggggcgtcacacttgggtggtgtcgatcgacctggcgcacgggggttcttgtacggtaggtgtcgtcagcgaggacgtgcagcgcaaaggggagttgagactgcgacccgaggaaggcgtgtgggctgtccggctggcctgggggttcgtatccgcactcggtagtttccctactcggctcactctcaaagaacagcccaggcaggtacgcgtttctctggactatgaggtaggttgggtgaccttcactaacgcagtgaccagagagcccatctatacatttacagccagctttaccaggaaggtgattccttttttcgggctgtggggccgggggtcctctttttcactatcctcatag

SEQ ID NO: 17044 - DNA, 1173 bp, synthetic construct
  source 1..1173: mol_type = other DNA; note = Synthetic coding sequence
atgtccgccgccaatccagagacccccaattcaacaatttccagggaagcaagcacacaaagtagttccgcagcggctagtcaggggtgggtgttgcccgagggtaagatcgtgccaaatactgtgtttgttggcggtattgacgctcgcatggacgaaacagaaatcggaagttgttttgggaggtacggaagcgtgaaagaggtaaaaatcattaccaacaggaccggagtcagcaagggatacggtttcgtctcattcgtcaacgatgtggacgtccagaagattgtgggaagtcagattcactttcatgggaaaaagctgaagctcgggccagcaatacggaaacagaagctgtgtgccagacacgtccagccccgccctctggtggtaaatccccccccccctcctcagtttcaaaacgtctggagaaatcccaatacagaaacctaccttcagccccaaatcaccccaaaccctgtcacacaacatgtccaggcctactccgcttatccccactcccccggacaggtgattactggctgccagcttcttgtctataactatcaagaatatcctacctatcctgattccgcattccaggttaccacaggctaccagctgccggtctacaattaccagccttttcctgcatatcctcgcagccctttccaggtgacagctggatatcagctgcctgtctacaattatcaggcattccctgcctatcctaactctcccttccaggtcgcaacgggctatcagttccctgtttacaactaccagcccttccctgcttacccatcaagccccttccaggtgacagccgggtatcagctccctgtgtacaactaccaggccttccccgcatatcccaattccccttttcaggtagctacgggataccaattcccggtgtataactatcaggccttccccgcctaccctaactctcctgtacaggtcacaacgggatatcagttacctgtgtataattatcaggctttccctgcatacccaaatagcgccgtgcaggtaactactggataccagtttcacgtgtacaattatcaaatgccgccacagtgccccgttggagaacagcggcgaaacctgtggaccgaagcctataaatggtggtacctggtgtgcctgattcagcggagagactag

SEQ ID NO: 17045 - DNA, 1143 bp, synthetic construct
  source 1..1143: mol_type = other DNA; note = Synthetic coding sequence
atggagaagaaaaagatggtgactcagggcaatcaggagccaaccaccacgcctgacgcaatggtgcagccctttactactattcccttcccccctccgccccaaaatggcattcccaccgaatatggcgttccccacactcaagactacgctggacagaccggagagcataacctgaccttatatggctccacacaggcacacggtgagcagagctctaattcccccagcacacagaatggatcattaaccaccgagggaggggcacagactgacggtcagcagagtcagactcagtcatctgagaattcagagtccaagtccaccccgaagagattacacgtgagcaacatccccttccgtttcagagaccccgacctccgacagatgttcggtcaattcggcaaaatactcgacgtggagatcattttcaacgagcggggttcaaagggattcggattcgtcacttttgagaatagtgccgacgctgaccgcgcccgggaaaagttgcacggaacagtggttgagggaaggaagatcgaagtgaacaacgccacagcgagggtgatgactaataagaaaatggttactccctatgccaacggatggaagctatctcctgttgtcggagctgtttacggacccgagctttatgctgcaagttcgttccaggccgatgtgtctctgggaaacgatgccgccgttccactgtctggccgcgggggtatcaatacctacattccattgatctcactgcctctggtgcccggctttccttatcctactgcggccacaacagcggccgcctttagaggagctcatttacgtggccgtgggagaacagtctatggcgccgtccgggctgtaccccccacagccattcctgcttaccctggcgttgtttatcaagacggcttttacggcgccgacctttacgggggctacgccgcataccggtacgcccagccagccacagcaaccgccgctacagccgccgccgccgcagccgccgcttatagtgatggatacggtcgagtgtacaccgcagacccataccatgctttggcgccagctgctagctacggggtgggagctgttgcatccttataccggggtggatattccagatttgccccctattag

SEQ ID NO: 17046 - DNA, 1614 bp, synthetic construct
  source 1..1614: mol_type = other DNA; note = Synthetic coding sequence
atggaccccggggacgcggctattctagaatcctccctccgcatcctgtacagactatttgagtctgtgttaccccctctgcctgctgccctgcagtccaggatgaacgtcatcgatcacgtccgggacatggcagcggccggcctgcatagcaacgttagacttttgtcttcccttctgcttactatgagcaacaacaatccggagcttttctctcccccacagaaataccagctgctggtttatcatgcagactcacttttccacgataaggaatacagaaatgccgtatcaaaatacactatggccctgcagcagaagaaggctctgagtaagacgtccaaagtgagaccatccactggcaacagtgcttccactccccagagtcaatgcttgccatcagagatagaagtcaagtacaagatggccgaatgttacaccatgcttaagcaggataaagacgcgattgctattctggacggtatcccctctcgacagaggaccccaaagattaacatgatgctggctaatctctataagaaggcaggacaggagcgaccttcagtcacttcttataaggaggtgcttcggcagtgccccctggcccttgatgcaattttgggcctcctcagtctgtctgtcaaaggagccgaagttgcttccatgacaatgaacgtaatacagacagtgcccaaccttgattggttgtcagtttggatcaaggcttatgcatttgtgcatactggggataactctagggctatatccacgatctgcagtcttgagaaaaagtccttgcttcgagacaacgttgaccttctgggctcactcgctgatctatatttcagggcaggcgataataagaactcggtcctgaagtttgagcaggctcaaatgttggatccatatctcattaaaggcatggatgtctacgggtaccttctggcccgggagggcaggctcgaagacgtggagaatctgggctgccgacttttcaatatttctgatcagcacgccgaaccttgggtagtgtcaggatgccatagcttttacagcaaacgatacagcagggcgctgtatctcggcgctaaggcaatccagcttaatagcaactccgtacaagccctgttactgaaaggagcagccctgcgaaatatgggtagggtccaagaagccattattcatttccgggaagccattcgtcttgccccctgccgcctcgattgttacgaagggctcatagagtgttacctggccagtaacagcatccgtgaggctatggtcatggccaataatgtatacaaaacgcttggggccaatgcacagacccttacactgctcgctaccgtatgcctcgaggaccccgtcacacaggagaaggccaagactttgttggacaaggctcttacccagaggccagactacatcaaggccgtggtgaaaaaggcggaactgcttagtcgcgagcaaaaatatgaggacggaattgctctcctccgcaatgccttggcaaaccaatcggattgcgttctgcataggattctgggggacttcttggtcgctgtgaacgagtaccaagaggccatggaccagtacagtatagcattacgctag

SEQ ID NO: 17047 - DNA, 351 bp, synthetic construct
  source 1..351: mol_type = other DNA; note = Synthetic coding sequence
atggcctttatgactaggaagctatgggatttggaacagcaagtgaaggcccagactgatgaaatcttgtccaaagatcagaagattgcggcccttgaggatctggttcagaccctgcgtccccatcctgcagaagccacccttcagcggcaggaggagctcgaaacaatgtgtgtgcaattacagcggcaagtgcgggagatggagagattcctgtccgactatggcttgcagtgggttggggagccaatggaccaggaggattccgagtccaaaaccgtcagcgagcacggtgaacgtgattggatgaccgccaagaaattttggaagcctggaagggcgggtcgttag

SEQ ID NO: 17048 - DNA, 285 bp, synthetic construct
  source 1..285: mol_type = other DNA; note = Synthetic coding sequence
atgacgggctctcgcaattggagggctactcgggacatgtgtcggtaccggcacaactatcctgatttagttgaaagggattgcaacggagatactcctaatctcagcttctaccgcaatgaaattagatttctccctaatgggtgtttcatcgaggatatcctgcagaactggacagacaattacgacttactcgaggacaatcactcttatatccaatggctgttccccctgcgcgaacccggcgtcaattggcatgccaagccccttactcttcgcgaatag

SEQ ID NO: 17049 - DNA, 1029 bp, synthetic construct
  source 1..1029: mol_type = other DNA; note = Synthetic coding sequence
atgcgtttctgggctccttggggcagccgaactccttcaggacgcagtttgtggacagaccctgtcacttactataccgctctccacatagctgtgttaagaaatcagcctgacatggtggagttgttagtgcatcacggagcggacgtcaaccgaagagacaggatccatgaatcatccccactggacctggcttctgaggagcctgagcgattgccctgccttcaaaggcttctggatctgggagccgatgttaatgcggcagataagcacgggaaaactgcccttttgcatgcgctggctagcagcgacggagtccagatccacaacaccgagaatattaggttactactggagggtggcgcagatgtgaaagctacgactaaggatggcgatacagtgtttacctgtattatcttcctgttaggtgagacagtgggcggtgataaggaagaagctcaaatgattaaccgattctgctttcaggtgacacgtctgcttttggcccacggagccgatccatctgaatgcccagctcacgagagcctgacacacatctgcctgaagtccttcaaattgcactttcctctgctgcgctttttgctggagtctggagctgcctataattgtagcctacacggcgcttcatgttggtctgggttccacattatttttgagcgactgtgtagtcaccccggctgcacagaggatgagtctcacgcagacctgctgcgcaaagctgagacagttctggatttaatggtaaccaattcacagaaactccagttgccggagaatttcgacatccacccagttggctcactcgctgaaaagatacaagccctgcacttttcactgcggcagttagagagctacccacctcctctgaagcatttgtgcagagtagccattaggctatacctccagccctggcctgtagacgtgaaagttaaggcactgccactccctgataggttgaagtggtacctcttatcggaacactctggatcagttgaagacgacatttag

SEQ ID NO: 17050 - DNA, 3192 bp, synthetic construct
  source 1..3192: mol_type = other DNA; note = Synthetic coding sequence
atgccccatctccctctggcgtcctttaggcctcctttttggggtttgcggcacagccgcggcctgcctcggttccatagcgtaagcacccagagcgagcctcacggttcccctatttctagacgtaacagggaagctaagcagaagcgcctgcgagagaaacaggccaccctggaagccgaaatagccggtgaatcaaaatcgccggcagagtccattaaagcgtggcgtccaaaagaactggttctgtacgaaatccccacgaagcccggcgagaaaaaagacgtttctgggccactgcctcccgcatattcacctcgttacgtggaagccgcttggtacccatggtgggtacgggagggatttttcaagccagaatatcaggctagacttccccaggctacaggggaaacattttccatgtgcattcccccccccaacgttaccggaagcctgcatattggtcacgctctgaccgttgcgattcaggacgcactggttaggtggcatcgaatgcgcggggaccaagtgctgtgggtccctggctccgaccatgctggaattgcgacgcaagctgtggtggaaaaacagttatggaaagaaaggggcgtgagaagacacgaattgagcagggaggcttttcttagggaggtctggcagtggaaggaggccaaggggggcgagatttgcgagcagttgagagcgctgggggcatccctagactgggacagagaatgttttactatggacgtgggatcaagtgttgctgtcactgaggcattcgtcaggttgtacaaggcaggattattgtacagaaatcatcagctcgtgaactggtcctgcgcgctgcgctcagcaatctccgacattgaggtcgagaatcgcccattgcctggccatacacagctgaggttgcccggctgccctacccctgtgagctttggcctgctgttttccgtggcgttccctgttgacggtgagccggacgctgaggtagtggtcgggacaacacgtcccgaaacgctgcctggtgatgtggcggtggcagtgcaccctgacgattctcggtacacccacttgcatggtcgtcagctgcgccacccgctgatgggccagccactccccctcatcacagactatgctgtacagcctcatgtgggaacgggagcggttaaggtcacacctgcgcacagcccggccgatgcagagatgggggctcgacacgggcttagtcctcttaatgtgatcgcagaggacggcacgatgacttctctgtgcggggactggctgcaggggctgcataggttcgtggcccgagagaaaattatgtccgttctgtcagagagaggtctcttcaggggactgcaaaatcatcctatggtcctaccaatctgtagcagaagtggcgacgtgattgaatatctgcttaagaaccagtggttcgtgaggtgccaggagatgggcgcaagggcagctaaagctgttgagagcggcgcccttgagctgagcccttcattccatcaaaagaattggcaacactggttttctcacataggagactggtgtgtctcacgacagctttggtggggccatcaaattccagcctatctagttgtcgaagaccatgcccagggagaggaggattgctgggtcgttggacgctccgaagcggaggctcgggaggttgcagccgaactcaccggtagacctggcgccgagttgacccttgagagagatccagacgtactcgatacgtggttcagctcagctcttttcccattttctgcgctgggatggcctcaggagacgcctgatttggcccgattctacccactgagtttgttggaaacaggctctgatctgctcttattctgggtgggtcgcatggtgatgctaggcacacagctgacaggccaactgccatttagcaaggtgctgctgcaccctatggtacgtgatcgtcaagggaggaagatgtctaaaagtctaggaaatgtgctcgatccgcgcgacataatctcaggcgtcgagatgcagttgctgcaggaaaagttacggtctggcaatctcgatcccgcagaattggctatagtcgccgccgcgcaaaagaaagacttcccacacggcattcccgaatgcggaactgacgccttgaggttcacactgtgctcccatggggtccaagccggcgatctccatctcagcgtgagcgaggtgcagtcctgtaggcacttctgcaataagatttggaatgccctgcggtttatactcaacgcactcggcgaaaaatttgtgcctcaaccagccgaagaattaagcccctcttcccctatggacgcatggatactcagtcgactcgctctggcagcccaggaatgtgaaaggggatttctgacccgcgagctaagcctagtgactcacgcattgcatcatttctggctacataatctatgcgacgtgtatttggaagccgtcaagcccgtcctctggcattctcctcgccctctgggacctccccaggtgctgttttcgtgtgccgatcttggactgaggttgctagcccctctgatgcctttcttagctgaggagctctggcagcggttgccgcctcgccctggctgtcccccggcacccagcatttcagtggccccttatccaagtgcctgtagcctggagcactggaggcagcccgagctcgaacgaagattctcaagggtccaagaggttgtgcaggtgctaagagcgcttcgcgctacttatcaactaaccaaagcgcgccctcgggttctgcttcagagttccgagcccggagaccagggcttgttcgaggcgttcctggaaccacttgggactctgggttattgcggcgccgtaggactcctgccacccgggactgccgcgccctctggatgggcccaggcacccctgagcgacacggctcaggtatacatggagttgcaggggcttgttgacccccagattcagctgcccctgctggctgcgagaaggtataagcttcagaagcagcttgactccctgacagcacggactccttctgaaggagaggccgggacacaaagacaacagaagctcagctccctacagttagaactgagcaagctggataaggctgcatctcacctcaggcaactcatggatgagccacctgctcccgggtctccagaactgtag

SEQ ID NO: 17051 - DNA, 96 bp, synthetic construct
  source 1..96: mol_type = other DNA; note = Synthetic coding sequence
atgtctgacgaagtcttcagcaccaccctggcttacactaagtcaccaaaggtgacgaaaagaactacgttccaggacgaactgattcgggcatag

SEQ ID NO: 17052 - DNA, 606 bp, synthetic construct
  source 1..606: mol_type = other DNA; note = Synthetic coding sequence
atgcctctccagctcaagaatcccaggttaagacaaaagtccaggacccgttgcaacaagtcgcagaaaaaggctgagctgcttgacaacgagaagcccgcggctgtcgtcgccccaataaccacggggtacaccgtcaagatttccaattacggatgggatcagagcgataagttcgtgaaaatttacattaccctgaccggggtccaccaggtgcctactgagaacgtgcaagttcactttacagagcgctccttcgacttgttggtgaagaacttgaacggcaagagctactctatgattgttaataacctgctgaaacctatatcagttgagggcagctccaagaaggtgaagaccgataccgtgctgatcctctgtcgaaaaaaagtggagaatacacgctgggactatctcactcaggtggaaaaagaatgtaaagaaaaggagaagccctcctacgacaccgagactgatcctagcgagggtcttatgaatgtcttgaagaaaatctacgaggatggagatgacgatatgaaacggacaataaataaagcttgggtcgagtctcgggaaaagcaggcaaagggggataccgaattctag

SEQ ID NO: 17053 - DNA, 480 bp, synthetic construct
  source 1..480: mol_type = other DNA; note = Synthetic coding sequence
atggcgacgagtgccccgctgcgcagtctcgaagaggaggtgacttgttccatttgcctcgactatttgcgtgaccccgtgaccatcgactgtgggcatgttttctgtcggtcctgcaccactgacgtgaggcctatatctggttccaggcccgtttgcccgctgtgcaagaagccctttaagaaggagaacataagaccagtgtggcaattggaaaagattttgaaccaccttagcacactgagacgcgaccgcgacaaaatccaaggcttccaggcgaaaggggaggccgatattctggcggcccttaaaaagctgcaggaccagcggcagtacatcgtcgccgaatttgaacagggacatcagttcctgcgcgagcgcgaggagcaccttctggaacaactcgccaaacttgagcaggaactcacggaggggcgcgagaagttcaagagcaggggagttggggagctggccagatag

SEQ ID NO: 17054 - DNA, 4599 bp, synthetic construct
  source 1..4599: mol_type = other DNA; note = Synthetic coding sequence
atgcagcgtgaactcgtatatgccagaggcgacggcccaggcgccccacggcctgggtcaacagcccacccaccacacgctataccaaactccccaccttccaccccagtacctcacagcatgccaccatccccttcccgcatcccgtatggaggtactaggtcaatggtcgttcccggaaacgccactattccccgggacaggattagcagccttcctgtgagccggccgatttctcccagcccgagcgcaatattggagaggagagatgtgaaacctgatgaagatatgtcgggcaaaaatatcgctatgtatcgcaacgaaggattttatgctgacccttatctttaccacgaaggaagaatgtctatcgcttccagccatggcgggcatcctctagatgttcctgaccatattatcgcttaccacagaacagccattcggtcagcctccgcctattgtaatcctagcatgcaagccgaaatgcacatggagcaatccctgtatagacagaagtctaggaagtatcccgattcgcatttgcctacccttggctccaaaactccccctgcttccccacaccgggtgtctgacttgcgcatgattgacatgcacgcgcattataacgcacatgggcctccacacacaatgcagcctgatcgggcaagtccaagcagacaggcttttaaaaaggagccaggcaccctagtgtatatagaaaaaccccgaagtgctgccggtctttcttctctagtggacttagggccacctctcatggagaaacaagtctttgcctattctacggccactatacccaaagaccgcgagacctccgagaaaatgatgaaaactaccgcaaatcgaaaccatacggattccgctgggaccccgcacgtctcagggggaaaaatgctctccgccctagaatccaccgttcccccctcacagcccccgcctgtaggcaccagtgctatccatatgtctctgttggagatgcgacgatccgtggcagagttaagactccagctgcaacagatgcgccagttgcagctccagaatcaggagttacttcgtgcgatgatgaagaaggcagagcttgaaatatccggtaaagtgatggagaccatgaagaggctcgaggatcccgtgcagcgccagagggtgctggtggagcaggaacgacagaagtacctgcacgaagaggaaaaaatagttaaaaaactgtgcgaactcgaggatttcgtggaagatttaaagaaggacagcacagccgcttccagattggtgaccctgaaggacgtggaagatggggcgtttttactgaggcaggttggcgaagctgtcgcaaccttgaaaggcgaattcccaaccctgcagaacaagatgagagctatcttacggatagaggttgaagccgtcagatttcttaaggaggaaccccacaagttggacagtctcctgaaacgagtgagatctatgacagatgttctgactatgctcaggcgccacgtgactgacggcttattgaagggcacagacgccgctcaagccgcccagtatatggccatggagaaggccactgctgccgaagtattaaagagccaggaggaagctgcccacacctctggccagcctttccattcaaccggggcccctggcgatgcgaagtcagaagtggtcccattgtcaggcatgatggttagacacgcccaatcgtctccggtcgtgattcagccatctcagcattccgttgcacttttgaatccagcccaaaacctacctcacgtggctagcagtccagcagtgccacaagaagccacctctacactccagatgtcacaggccccacaatctccccaaatccccatgaatggcagcgccatgcagagccttttcatcgaggaaatacacagcgtctccgcaaagaatagagccgtgtcgatcgaaaaggctgagaagaagtgggaggagaagcggcagaatctggaccactataacggaaaagagtttgagaagttacttgaggaagcgcaggccaacataatgaagagtatccccaatcttgaaatgcccccagccacgggcccgctgccgcgcggagatgctccggtagacaaggtggagctatccgaggatagccctaatagtgaacaggatctcgagaagcttggaggaaagtcaccacctccacctcccccaccgccccggcgaagctatctgcccggaagcgggcttaccaccacgcgctccggggatgtagtctacacgggacggaaagagaacattaccgctaaagctagcagcgaggatgccggaccgtccccacagactcgagccaccaaatacccggctgaggagcccgctagcgcctggactccttcgcctccgcccgtcacaacttcatcgagcaaagatgaggaagaagaggaggaggaaggggacaagatcatggccgaactgcaggcttttcagaaatgtagctttatggatgtcaactctaatagccacgctgagcctagtcgggccgattcgcacgtaaaagacactagatctggtgccaccgtgccacctaaggaaaagaaaaacctcgaattcttccacgaggatgtgcgaaagagcgacgttgagtacgaaaatggaccacagatggagtttcaaaaggttacaacgggcgccgtccggccttccgaccctcctaagtgggagcgtggcatggaaaactccatatccgacgcctcaaggacaagcgagtataagactgaaattattatgaaggagaactcaatatccaacatgtcacttctgagagatagtaggaactactctcaggagactgtcccgaaggcgagttttgggttctccggaatctccccattagaggacgagatcaacaagggttcaaagattagtgggctccagtacagcatcccagacactgagaatcagacattgaactacggaaaaacaaaagagatggagaagcagaacactgataaatgtcatgtttcatcccataccagactcaccgaaagttcagtgcacgatttcaagaccgaggatcaggaggtcataaccaccgactttggccaggtcgtactgcgaccaaaagaagcgagacacgccaacgtcaatccaaacgaagatggagagagttcttccagctctcccactgaagagaatgccgcaaccgacaacatcgccttcatgatcacagaaactactgtacaagtgctgagctccggggaggtccatgatattgtttctcagaaaggggaggacatccagaccgtgaatattgatgctaggaaagagatgaccccgcggcaagaaggaacagacaacgaagacccagtcgtttgtttggataagaaaccagtcatcataatcttcgacgagccaatggatatacgtagcgcctataaacgtttaagcacaattttcgaggaatgtgacgaggagttagagcggatgatgatggaggagaaaattgaagaagaggaggaggaggagaacggcgactcggtggtacagaacaataacacaagtcagatgtcacataagaaggtggcccccgggaatctacggaccggtcagcaggttgagactaagtcccagccccacagcttggcaacagagacaaggaatccgggcggacaagaaatgaatcggacagaactcaacaagttcagtcatgtcgacagccccaattctgaatgtaagggcgaggacgcgactgacgaccaatttgagtcccctaaaaagaaatttaaattcaagtttccgaagaagcagttagccgccctcacccaggccatcaggacaggcaccaaaactgggaagaaaacacttcaggtggttgtgtacgaagaagaggaggaagacgggaccctcaagcagcacaaggaggcaaaaagatttgaaatagcaaggtctcaacccgaggacacacccacaagcatacccagcgcctctaggaagggctcatccggtgctccccagacctcccgcatgccagtcccaatgtccgctaaaaaccggccagggacgctcgataagccaggcaaacagtcgaagctccaggaccctcgtcagtacaggcaggctaatggatcagccaagaaatccggtggagactttaagcccacaagccctagtctgccggcatcgaaaattccagccctatccccttcctcaggaaagtcttccagcctaccctcctctagtggcgactcctcaaatctcccgaaccctcctgctacaaagccaagcattgccagcaatccgttatctccacagacgggcccaccagcccacagtgctagcctgattcctagcgtgagcaacggcagtttgaagtttcagtctctcacccacaccgggaaaggccaccacttgtcattcagtcctcagagccagaacggacgtgctcctcccccattgtccttttcctctagcccaccgtctcccgcttcctccgtcagcctgaatcagggcgccaaaggcacacgcacgattcatacacccagcctcacaagttacaaggctcagaatggctctagctccaaggccactccatctaccgctaaggagacttcttag

SEQ ID NO: 17055 - DNA, 1566 bp, synthetic construct
  source 1..1566: mol_type = other DNA; note = Synthetic coding sequence
atgaccagcgcctttaaactagattttttgcctgacatgatggtcgagggcagactgctggtacccgatcggatcaacggtaccgcaaacaaaatgaatggagcactagatcatagcgatcagcccgatcccgatgcaattaagatgtttgtgggacagattccacgatcttggtccgagaaagaactaaaggagctctttgagccatacggggccgtctatcagatcaacgtcctcagagacaggagccagaaccccccccagtccaaaggctgctgttttgtgacattttacactcggaaagccgccctcgaagcccagaacgcccttcataacatcaaaactctgcctggtatgcatcatcccatccaaatgaagccagccgatagcgagaaaagtaacgctgtcgaggataggaagttgtttatcggaatggtttcaaagaaatgcaatgagaacgatatcagagtaatgttcagccctttcggccagattgaagaatgccgcatcctcagaggacctgatgggctcagcaggggatgtgcattcgtaaccttttctactcgagccatggctcagaatgccatcaaagccatgcatcagagtcaaacaatggagggctgttcctcacctatcgtcgtaaagtttgccgacacacagaaagacaaggagcagagaaggctacaacaacagttggctcagcagatgcagcaactcaacactgctacgtggggcaacctgacagggctcgggggattaacaccccagtatttagccctgctgcagcaggccacgtctagtagcaatcttggcgccttctccgggatccagcagatggccggaatgaatgctcttcagctccagaacctggctaccctggcagcagctgccgccgccgctcagacaagtgccacatccactaacgcaaaccccttgtctaccacctcctccgctttaggtgccctcacttctccagtcgccgcatctacaccgaattcaacagcgggagccgccatgaactccctgacatctctcggcacgctgcaagggctggcaggggcaactgttggattgaacaacataaatgcgttggccgtggctcagatgcttagcggtatggccgccctcaacgggggcctgggagctactggtctgaccaacgggaccgccggcaccatggacgccctcacccaggcgtactctggaattcaacagtacgcagccgcagcactgccaactttgtacagccaatcactcctgcagcagcaatccgctgcaggctcccagaaggaaggcccagagggagccaacttatttatctaccacttgccccaagaattcggggatcaggacatcctgcaaatgtttatgccctttgggaacgtgatatcagccaaagtctttatagataagcagactaacctcagcaaatgcttcggatttgtgtcatacgacaatcctgtgagcgcccaagcagctatccaggccatgaacggatttcagattggaatgaagcgactgaaggttcagctgaaaaggagtaagaacgacagtaagccttactag

SEQ ID NO: 17056 - DNA, 315 bp, synthetic construct
  source 1..315: mol_type = other DNA; note = Synthetic coding sequence
atgtccgagcagggcgacctgaatcaggctatagcagaggaaggcggaaccgagcaagaaacagccacacccgagaatggaattgtgaagtccgaatcattggacgaagaggaaaaactggaactgcagcggaggttagaggcccagaatcaggaacgcaggaagagcaagtccggggctggcaagggtaaattgacgcgctccttggccgtgtgtgaggagagctcagcccgccctggcggcgagagcctgcaagaccaggaatccattcacctgcaactatctagcttttctagtctccaggaagaggactag

SEQ ID NO: 17057 - DNA, 1653 bp, synthetic construct
  source 1..1653: mol_type = other DNA; note = Synthetic coding sequence
atggagccgccccaggagactaatcgacctttttcgacattggataaccgttcgggacaagttcaggtactctccgcgacgcctttacttcagcggaatccttattcctcgcctgatatcatgcacatcaaaggaagtgaggccagtagcgtcccatacgcactgaatcagggcacaactgcgctgcccaaaaacaagaatcaggaaggtactgggcaccggttgctcaatatgctgagaaagacgctcaaagagagtgattctgaagaactcgaaattacacaggaaacacccaacttggtaccattcggagatgtcgtgggttgtttagggatccacatcaaaaactgtaggcattttatgcccaaaatttcgttgcagcattatgccaacctcttcatccgaatcagcatcaacaaggccgttaagtgcaccaagatgtgttccttgctctcaaagaatgacgaaaagaatacagtgatcaaattcgatgaagtcaagtattttagtgtgcaggttccgcggcgctatgacgacaagcgcaataacattttgctggagctaatacagtacgacaatagggagaaaagggccttcctgctcggttctgtgcaaatccacctctatgaggtaatccagaaagggtgtttcatcgaagaagttcaggttctgcatggtaacatttttgtgtgcaggctggaggtagaattcatgtttagctacggaaattttggttatggattttcacatcagctgaagccgttgcaaaaaattacggagccgtcaatgtttatgaacctggctcctcccccggaaagaacagaccccgtaacgaaagttattactccccaaacagtggagtacccggctttcctatctcccgacctaaacgtgacggtaggaactccagcagtacagtcaagtaatcaaccaagcgtagttagactggagaagcttcagcagcagcccagggaacggttagaaaagatgaagaaggaataccgaaacctcaacacatggatagataaggcgaactatctcgagtccattctgatgcctaaattggagcataaagactctgaggagactaacatcgacgaggcaagtgagaacaccaagtctaatcatcccgaggaagagctggagaacattgtcggcgtggacatcccgcttgtcaatgaagaagccgaaacaacagcaaacgaactcctggacaacgattctgagaagggactgacgatacctactctgaatcaatccgatcaggacaacagcaccgccgacgcttctaagaatgacgaaagtacccctagcccaactgaggtgcactcactctgtaccattagtaatcaggagacaataaaagccggcaggatacctccattaggagagagacagagcgaatcgatgcccgacagaaaaatgaagaatgtctttttcccacttgaggtaaaactgaaagacaactacccgagcattctgaaagctgactcttctctttccgaggtaaacctacggagcatctgcattaatcctaagagcagaaacctcgactcatccccaacggagatctcgtggcagaataacaacttgaatctcgcagagcgggagaatacggggctggtgagtacaaggctcaaaatcaagcgatag

SEQ ID NO: 17058 - DNA, 363 bp, synthetic construct
  source 1..363: mol_type = other DNA; note = Synthetic coding sequence
atgagcatctcctccgacgaggtgaacttcctcgtgtacaggtacctgcaggagtccggcttttcacatagcgcatttaccttcggcatagagtctcacatctcacaatcgaacattaacggagcgctcgttcctcccgcagctctgatctctatcatccagaaggggctacagtacgtggaggccgaggtgagcattaatgaagatggcactcttttcgacggccgacccatagaaagtctatcactgatcgatgccgtgatgccagatgtggtccaaactcgacagcaggcctaccgggataagttagctcagcagcaggcagctgccgctgctgccgctgcagccgccgcttcacagtag

SEQ ID NO: 17059 - DNA, 222 bp, synthetic construct
  source 1..222: mol_type = other DNA; note = Synthetic coding sequence
atgtcttactatcagcgacctttctctccctcagcttactctctgcctgctagcctgaatagctcaattgtgatgcagcatggtacatccctcgactctactgatacatatccacaacacgcccagtccctggacgggaccactagttcatctattcccctgtacagatcctccgaggaggagaagagggtgaccgtgatcaaggccccccattatccgtag

SEQ ID NO: 17060 - DNA, 717 bp, synthetic construct
  source 1..717: mol_type = other DNA; note = Synthetic coding sequence
atgacagaagactcccagcgtaactttcggtctgtttactacgagaaggtgggcttccggggagtcgaggagaaaaagtctctcgagatcctcctcaaagacgaccgattggggattctcccgccacaccacgagtcacacgctaaagtgatgatgtaccgcaaggaacagtatctggacgtcttgcacgcactaaaagtggtgcgctttgtttcagacgccactccgcaggccgaagtgtatctgcggatgtatcagttggagtctggtaagttaccacgaagccctagctttccactcgaacccgatgatgaggtctttctggctatcgctaaggctatggaggagatggtggaggacagcgtggactgttattggatcactcgacgcttcgtgaaccagcttaacaccaagtaccgggactccctgcctcaactgcccaaggctttcgagcagtacttgaatttggaggacgggcggctgcttacgcatcttaggatgtgcagcgctgctcccaaacttccatacgatctatggttcaaaaggtgttttgccggatgtctgcccgagtcctccctccagagggtctgggataaagtcgtcagcggcagctgcaaaattctggtgttcgtcgcggtggagattttgctgacgtttaaaatcaaggtgatggcccttaactccgctgaaaagatcacaaagttcctggagaattag

SEQ ID NO: 17061 - DNA, 1620 bp, synthetic construct
  source 1..1620: mol_type = other DNA; note = Synthetic coding sequence
atggccaccagcgcccctttgcgaagcctggaagaagaagttacttgttcaatttgcctggactatcttagagaccccgtaaccatcgactgtggacatgtgttctgccggtcctgtacaacggacgtgaggcctattagcggctctcgccctgtgtgtccgttatgcaagaagccattcaagaaggagaacatacgtcctgtgtggcagcttgccagcctcgttgagaacattgagcgtctcaaggtggacaaaggtcgccagcccggagaggttacaagagagcaacaggatgccaaactctgcgaacgtcaccgcgagaagctgcactactactgcgaggatgacggaaagttgttgtgcgtgatgtgccgcgagtcaagggagcaccgcccacatacagccgtgctaatggagaaggccgctcaacctcaccgcgagaaaatcctgaatcacctctcaacattgcgacgcgaccgcgacaaaatccaggggtttcaggcaaaaggtgaggctgatatcttggctgctctcaaaaagctgcaggaccagaggcagtacatcgtcgctgagtttgagcagggacaccagttccttcgggagcgcgaggagcatctcctggaacagctggccaagctcgaacaggaacttacggagggaagagagaaattcaaatcacgtggcgtcggcgagctggcccgactggcattggttatttctgaacttgaggggaaggcgcagcagcctgccgcagaactgatgcaggacacccgggacttcctgaatcggtaccctcgaaagaagttctgggtgggaaaacctatagctagggtcgttaaaaaaaagacgggagagttcagcgataagctgctctcattgcagcgtggacttagggagttccaaggcaagcttcttcgggatcttgagtataaaaccgtgtcggtgacacttgatcctcagtccgccagcggctacctccagctcagtgaggactggaagtgcgttacatacacctccctctataagagtgcttatcttcacccacagcagtttgactgcgagcccggcgtgcttggcagcaagggtttcacatggggcaaggtgtactgggaggtggaagtagagcgagaggggtggtcggaagatgaagaggaaggagatgaagaagaggaaggggaagaggaggaagaagaggaagaagccgggtatggagacggttatgatgattgggagactgatgaggatgaagaaagcctgggggatgaagaggaagaggaagaggaggaagaagaggaagtgctggagtcctgcatggtcggtgttgcccgcgatagcgtgaagcgcaaaggagacctttccttgcgccctgaagatggcgtgtgggctttgaggctgtcgtccagtggcatatgggcaaatacctccccagaggccgagctgtttcccgccctcaggcctagacgggtgggaatcgctctggattatgaaggcggcactgtgacttttaccaatgccgagagccaagagctgatctacacatttactgcaacgttcacccgtagactggtgccattcctttggctcaaatggcctgggacgcgtttattgcttcggccatag

SEQ ID NO: 17062 - DNA, 609 bp, synthetic construct
  source 1..609: mol_type = other DNA; note = Synthetic coding sequence
atggggcagaaggtgacaggtggaattaagactgtcgatatgagagaccccacctacagaccgctgaagcaggagctgcagggcctggattactgtaagccaaccaggctagatttactactggacatgcctcccgtgagttacgatgttcaactccttcacagctggaataataatgacaggtctctgaatgtgtttgtcaaggaggacgataaacttatctttcaccgccatcccgtagctcagtccaccgatgcaattcgaggcaaagtgggttacactagaggcttgcatgtgtggcaaattacatgggccatgagacagagaggaacacatgccgtcgttggagtggctactgctgacgcccctttacatagcgtgggatacaccactctagttggaaataaccacgagagttggggctgggatctgggtcgcaatagactgtaccacgatggtaaaaatcagccatctaagacctaccctgcctttctcgagccagatgagaccttcatcgttcctgactcctttctcgtagcactcgatatggatgatggcacactgtcctttattgtggacggtcagtatatgggagtcgctttccgttag

SEQ ID NO: 17063 - DNA, 174 bp, synthetic construct
  source 1..174: mol_type = other DNA; note = Synthetic coding sequence
aacctccccatttgcatggcaaagacccacctcagcttaagccatcagcctgataaaaaaggcgtcccaagagactttatattgcctatctccgacgtgagggcatccattggggccggttttatatatccattagtcggtactggcgggagggaggctcccctctggctgtag

SEQ ID NO: 17064 - DNA, 468 bp, synthetic construct
  source 1..468: mol_type = other DNA; note = Synthetic coding sequence
atgaacaaccaaaagcagcagaagcctactctttccggtcagcgctttaaaacacggaagcgggatgagaaagagagattcgatccaacccagtttcaggattgtatcatacaaggcctgaccgagaccgggacagatcttgaagctgttgctaagtttctggatgcttccggcgctaagctggactaccggaggtatgctgagacgttgttcgatattcttgtggccggaggaatgcttgcccccggcggcactctcgcagacgacatgatgagaacagatgtgtgcgtctttgccgcccaggaggacctggaaactatgcaggccttcgcccaggtgtttaacaagcttatccgaaggtacaagtatcttgaaaaaggctttgaagacgaggttaaaaaactgctgctgtttctaaagggtttctccgagtcggaacgcaacaaactggctatgttgacagggtag

SEQ ID NO: 17065 - DNA, 528 bp, synthetic construct
  source 1..528: mol_type = other DNA; note = Synthetic coding sequence
taatttgacgaccagcggcgtatgtccttgcatctgcacggagcggactgtgatccaaaaacccagaatgagatgaacatttgtgaagaggagtttgtggaatataaaaaccgagatgcaatatcagccctgatgcccttattcagcgaggaagagtcttcggacggctctaaacataataacggactcccggatcacataagcgcacaactacaaaatacctacaccttgaaggcgttcaccgtgggcagcaagtgtgtggtctggtcaagtctgcggaacacctggtccaagtgtgaaattctggagacggccgaagaaggtacacgggtcctgaatctctctaacggtatggaagaaattgtcaacccggagaatgtgtggaatgggatcccaaagctggataagtctccccctgaagctgtgagtcaacgagttggcaaggatctttattttatgtctgttggggacacaactatcaaggagaagggcttcggaggagatggtgatctgactgtggatctgtag

SEQ ID NO: 17066 - DNA, 2814 bp, synthetic construct
  source 1..2814: mol_type = other DNA; note = Synthetic coding sequence
tgattacgatcacaacccggttgtggctgcctctggcaggaggcacctacccattcaacagggccttcagtcgagggcgaagcacctagttcagagaccggaacgtcgctggactctccaagcgcctacccacagggcccactggtgccgggcagctctctctcacccgatcactacgagcacacatctgttggggcctatgggctttattcaggccctcctgggcagcagcaacgaactaggcggcctaagctccagcactctacaagtatacttagaaagcaggccgaagaggaggccataaaacggagtcgatccctgtcggagtcttatgaattgtcttccgatctccaggacaaacaggttgagatgctcgaaaggaagtacggaggtaggcttgtgacgaggcatgctgcaagaactatacagacggcctttaggcaataccagatgaacaagaattttgaaagattaaggtctagcatgtctgagaaccgtatgagccgccggattgtgctgagcaatatgaggatgcagttctcttttgagggacccgaaaaagtccacagtagctatttcgaaggaaagcaggtctcggtgactaatgacggaagccagctgggggctctcgtttctccagagtgcggagatcttagcgagcccaccactttaaaatctcccgcaccctctagcgatttcgccgacgccattacagagttggaggacgcgttttctaggcaggtgaagtcccttgctgaatctatcgatgatgccctaaactgtagaagcctgcatactgaggaggcacctgccctggacgctgcccgagctcgcgataccgagcctcagactgcgttgcacggaatggaccacaggaaactggacgaaatgacagcctcgtactccgatgttaccttgtatatcgacgaggaggagctgtccccccccctcccactgagtcaggctggagaccggccttcaagtaccgagagtgacctgaggttaagagccggaggcgcagcaccggactattgggccctggcccacaaagaagataaagcggacacagacacttcttgtcggtctacacctagcctggagcgccaggagcaacgcctgcgcgtggagcatctccccctgctgacaattgaaccaccaagcgacagcagcgtggacctgtcagatcgaagcgagagggggagtctcaaaagacaatccgcttatgaacgtagtcttggtggccagcaaggctcaccaaagcacgggccacattcgggcgcccccaagtctctacccagagaagaacctgaactacgacctcgaccccctcgccccctggactcccatctggcgattaacggttctgccaacagacagagcaagtcggagtccgattactcggacggtgacaatgattcaataaattccactagtaattccaacgacaccattaactgttcctctgagagtagctccagggacagcctgcgcgagcagaccctttccaagcaaacctatcacaaggaagcccgcaactcctgggatagcccagccttctccaacgacgtcattaggaaacgccattatcggattggcctgaatttattcaataaaaaaccagagaagggtgtccagtatctaattgaacgtgggttcgtgccagacacacccgtcggggtggcgcactttttgcttcagaggaagggacttagccgacagatgatcggagaatttttaggcaacaggcagaagcagtttaaccgggatgtgctggattgtgtggttgatgaaatggatttcagcaccatggagctggacgaggccctgcgcaagttccaggcacatatcagagtgcagggtgaagcccagaaggtggagcgcctgattgaggccttctcccagagatactgcatttgcaacccaggagtcgttagacagtttcggaaccctgatacaatctttattttggcttttgctattattctactcaataccgacatgtactcacctaatgttaaaccagagaggaagatgaagctggaggacttcatcaaaaatctgaggggggtcgatgacggggaggacatcccacgtgagatgctgatgggaatctatgaaaggataaggaagcgtgagctcaaaactaacgaagaccatgtgtcacaagtgcagaaggtggagaagctgatcgtgggcaagaagccgatcgggtctctgcatcctgggctcggatgtgtcctgagccttccccaccgaagactggtgtgctattgcagacttttcgaggtccccgatcctaacaaaccacagaaactggggttgcaccagagggagatcttcctttttaatgacctcttggtggtgactaagatctttcagaaaaagaagaactctgtgacctactcattccgacaaagcttctctctgtatgggatgcaggtgcttttatttgaaaaccagtactaccctaacggcatcagactaacttcttcagttcccggggctgacatcaaagtgctgatcaatttcaatgctccgaatcctcaggatagaaaaaagttcaccgatgacttgcgggagtccattgctgaggtgcaagagatggaaaagcatcgtatagagagcgaactggagaaacagaaaggagttgtgcgtccaagcatgtcccagtgttcatccctgaagaaggaatcgggaaatggcactctctctagagcttgtcttgatgattcgtacgcctccggcgaggggctcaaacgaagcgcgctctctagcagtctgcgagacttgagcgaagccggggtccatcactag

SEQ ID NO: 17067 - DNA, 198 bp, synthetic construct
  source 1..198: mol_type = other DNA; note = Synthetic coding sequence
atggtcgaggctgcggatcgtgagaaggtggagctactgaaccaacttgaagaggaaaaacgtaaagtcgaagatcttcaatttagggtagaggaagagtccatcaccaagggggatctagaacaaaaaagccagatatcagaagatcccgagaacgtcgcaacagtatctgagaagtccagaattatggagctgtag

SEQ ID NO: 17068 - DNA, 630 bp, synthetic construct
  source 1..630: mol_type = other DNA; note = Synthetic coding sequence
atggatttcctgttgggtaatccgtttagctcgcccgtggggcagcgtatcgaaaaggccacagacggaagcctgcagtcagaggactgggccctcaatatggagatctgcgacatcatcaacgagactgaggaaggtcccaaagacgcgctgagggctgttaagaaacgcatcgtgggtaataagaatttccacgaggtgatgctggccctcaccgttctcgaaacatgtgtgaagaactgcggacatcgatttcacgtgttggttgcaagtcaagattttgtcgaatcagtgctcgttaggacaattctgccaaaaaacaaccctcccactattgtccatgataaggttctaaatctgatacagagttgggctgacgccttccggagttctccggatctgacaggggtggtgactatttacgaggatttgcgacgcaaaggcctggagtttccaatgacagatttagacatgctgagtcccatccacactcctcgcgggccgtgtagtacacaaagacataaccaggatagaattctttgggctctgaccccagcaagtaagagaacgctggcatcaatgctgccattatgtccgccacgaccttatagccctgtgactaggccttag

SEQ ID NO: 17069 - DNA, 255 bp, synthetic construct
  source 1..255: mol_type = other DNA; note = Synthetic coding sequence
atggccgatacagacctgttcatggagtgtgaggaagaagagctggaaccctggcaaaagatctcggacgttatcgaggattcggtagtggaggactataacagcgtcgacaaaacgaccaccgccggaaatccgctcgtccagcaagggggacagccactgatcctgacacaaaatcctgcacccgggctaggtaccatggtgactcagccggtgttgcgacctgttcaggtgatgcagaatgctaatcactag

SEQ ID NO: 17070 - DNA, 618 bp, synthetic construct
  source 1..618: mol_type = other DNA; note = Synthetic coding sequence
atggcaactcctctgggttggtcaaaggcaggatccggatcagtttgcctcgccctcgaccagcttagggatgtcatcgagtctcaagaggaactgatccaccagttaagaaatgtgatggtcctgcaggacgagaatttcgtctccaaagaagagttccaggccgtggagaaaaagcttgtggaggaaaaagcagcacatgcaaaaactaaggtcctgcttgccaaggaggaggagaaacttcagttcgccttaggggaggttgaggtcctgagcaaacagttggaaaaggagaagctggcttttgagaaagctttgtcatctgtgaagtctaaggtcctgcaggaatccagtaaaaaggaccagttaataacgaagtgtaatgagattgagtcccacattattaagcaggaggatatcctgaacggcaaggaaaatgagatcaaagaactccagcaggttatttcacagcaaaagcagatattcagaaaccatatgtccgattttcggatccaaaaacagcaagagtcatatatggcccaggtcctggatcagaagcacaaaaaggcgagcggtacccgccaagcgcggtcacaccaacacccgagggagaaatag

SEQ ID NO: 17071 - DNA, 330 bp, synthetic construct
  source 1..330: mol_type = other DNA; note = Synthetic coding sequence
atggagccaagtgctcagcaactgcagcttgcggcatctctgcccgctaacctgtctaacttttgccaaggcagcgagatgcctaccaccagtcggcccgctcttgacgtaaagggtggaacttcgcctgcaaaagaggacgctaaccaagagatgtcttccgtcgcatatagcaacctggccgtgaaggaccgcaaggcggtggcaatacttcactaccccggtgtagcctccaacggaacaaaggccagtggcgcccctacttcttcctccggctctccaatcggctcacctactactactccacccacgaaacccccaagcttctag

SEQ ID NO: 17072 - DNA, 1737 bp, synthetic construct
  source 1..1737: mol_type = other DNA; note = Synthetic coding sequence
atgcccgaaatccgtgtgaccccactgggtgcaggtcaagatgttggaaggtcctgtattttagttagcattgccggaaagaacgtcatgctcgattgcggaatgcacatggggttcaatgatgataggcggtttccagactttagctatattacacaaaatgggcggcttaccgactttctggactgtgtgatcatctcccacttccatctggaccactgcggggctcttccttatttctctgaaatggtcggctacgatggtccaatatatatgacacatcctactcaggcaatatgtcctatcctgcttgaagactacaggaaaattgccgtggataagaagggtgaagcaaattttttcactagccagatgattaaagattgtatgaagaaggttgtggccgtgcacctacaccagacagtgcaaatcaaggtgggctccgaaagtgtggtctataccggggactacaatatgacacctgacagacacttgggcgccgcatggatcgataaatgccggccaaatttattgattacagagtcaacatatgccactacaatccgcgattctaaacgctgcagagaaagagactttcttaaaaaggtacatgagaccgtggagcgagggggaaaagtgttaattccggttttcgcattgggacgggcgcaggagctgtgcattcttctggaaactttttgggagcggatgaaccttaaggtccctatctacttctccaccggcctgactgagaaggcaaatcactactacaagctcttcatcccctggacaaatcagaagatccgcaagacgttcgtacagcgcaatatgtttgagtttaagcacatcaaggcatttgatcgcgccttcgcagacaaccctggaccaatggtggtgttcgccactcctggtatgcttcatgcaggccagtcattgcaaatttttagaaaatgggcgggaaacgaaaagaacatggtcattatgcccggctactgcgtgcagggcacggtcgggcataagattctcagtggccagagaaaactggaaatggaaggacggcaagtgctggaggtgaaaatgcaagtagaatacatgtctttcagtgctcatgccgacgcgaaaggaatcatgcagctggtaggacaggcagaacctgagagcgtattgctagtccatggggaggctaaaaaaatggaattcctgaagcagaagattgaacaagagctaagagtgaattgctacatgccagccaacggggaaactgttactctgccgacatcgcctagcataccagtaggcatttccttggggctacttaagcgggaaatggcccaggggctgctgcctgaggccaaaaaaccacgtttgctgcatgggacactaatcatgaaggattccaatttccgccttgtttccagtgagcaggctttgaaggagctggggctggctgaacaccaactgagatttacttgtcgtgtccacctgcacgatacccggaaggagcaggagacagcacttagagtgtatagccaccttaaaagcgtgttaaaggaccactgcgtgcagcatctgccagatggttcagtgactgtggagtccgtgctgctgcaggccgccgcgccatccgaggatcccggaacaaaggtcctgctagtatcctggacctaccaggacgaagagctgggcagcttcctgaccagcttgctgaaaaagggcctaccccaagctccaagctag

SEQ ID NO: 17073 - DNA, 570 bp, synthetic construct
  source 1..570: mol_type = other DNA; note = Synthetic coding sequence
atgcagcctatgtcattcggatgggaccattctctgcacaagcgcaagaggttacctcccgtgaaaaggtctctggtgtactatttgaaaaaccgggaggtacggctgcagaacgagacctcatattcaagagtcctgcatggatatgccgctcaacagttaccttcactgctcaaggagcgcgagtttcacctcggaactctcaacaaggtgtttgcatcccagtggctgaatcacaggcaggtcgtatgcggcaccaaatgcaataccctgtttgtggtcgatgtgcagacgtcacagataactaaaattcctatattgaaggacagagagccgggtggcgttacacagcagggctgcggtatccatgccatcgagctgaatccttcccgaacactgttagctaccggaggtgacaacccaaactccctggctatctaccgattgcctacacttgatcccgtgtgtgtgggggatgacggccacaaggactggattttttctatcgcgtggatttcagataccatggctgtgtccgggtctcgtgatggctcaatgggcctgtggtag

SEQ ID NO: 17074 - DNA, 2289 bp, synthetic construct
  source 1..2289: mol_type = other DNA; note = Synthetic coding sequence
atggcttcgctgctgcaggaccagcttacaaccgatcaggacttgctcctgatgcaagaggggatgcctatgaggaaggtacggtccaagtcctggaagaagttgcggtatttcaggctccaaaatgatggcatgactgtctggcacgcccgacaggcccggggatccgccaaacctagttttagcatcagtgatgtagagactatcagaaacggtcacgactcagagctgctacggtcgctggcggaggagctgccactcgaacagggtttcactatagtgttccacggtagaagatctaatcttgaccttatggctaatagcgttgaagaggctcagatatggatgcgaggtctccagctgctagtcgatttagtgactagcatggaccaccaggaacgactcgatcagtggctgtcggattggtttcagcgcggcgataaaaaccaggacggtaaaatgagcttccaagaagtgcagcggctgctccatctaatgaacgtcgagatggaccaggaatacgcatttagtttgttccaagctgcggacacatcacagagtggtactctcgagggtgaagagttcgttcaattctacaaagctttgacgaagagagccgaggtgcaagaactctttgagagcttcagtgctgatggccaaaagctgacgctgcttgagttcctggacttccttcaggaggagcagaaggaacgcgactgcacctccgaactggctctggaactgatcgatcggtatgagccatccgactccggcaagcttagacacgtgctcagcatggacggatttctatcttacctctgttctaaagacggagatatatttaacccagcgtgcctcccaatctaccaggatatgactcagcctctgaatcactacttcatttgcagctcccacaatacctatttggtgggtgaccagttgtgcggccaatcctctgtcgagggatacatcagagcactgaagcggggatgtcgctgtgtggaggttgacgtgtgggacggaccttcgggggagcctgtggtatatcatggccacacccttacatcgaggatcctctttaaagacgtggtcgccaccgtcgcccagtacgcatttcagacgagcgattatccagttattttgagtctggagactcattgctcctgggagcagcagcaaaccatggcaagacacctgaccgagatactcggagagcagctgttgagcaccacattggatggagtgctcccaacccaacttcctagccccgaagagcttaggcgaaaaattctagtcaaggggaaaaaactgaccctcgaggaggaccttgagtatgaagaagaggaagcggaacccgagttggaggaatctgagctggctctcgagtcgcagtttgagacagaacctgaaccccaggagcagaacctacagaacaaagacaagaaaaaaaaatcaaaacccatcctttgtccagcactgagttctttagtgatttacctcaagtcagtgtcgttcagatcatttactcattccaaagaacactatcatttttacgaaatctcttctttttccgaaactaaggccaaaagactcatcaaggaggcgggcaacgaattcgtacaacacaacacttggcagttatcacgggtctacccatctggactgcgtacagacagcagcaattataatccacaggagctctggaacgcaggctgtcaaatggttgctatgaatatgcagacagcaggtttggagatggatatctgcgatggccactttaggcagaatggcggatgcggttacgtgctgaagcccgattttcttcgggatattcagagcagttttcatcctgaaaagcctatatccccttttaaggcccagactttactgatccaagtaatcagtggccagcagctgcccaaagtcgacaagaccaaggaagggtccatcgttgacccactcgtcaaagtccagatcttcggggttcgtttggatacagcccggcaggaaacgaattatgtggagaataatgggtttaatccctactgggggcaaacactctgttttcgggtcttagtgccggagctggccatgctgaggtttgtggtgatggattacgattggaagagtcggaatgatttcatagggcagtacacactgccgtggacttgcatgcagcagggctaccggcatatccacctactatcaaaagacggaatatccctccgccctgcaagtatttttgtgtacatctgcattcaagagggactcgaaggagatgagagttag

SEQ ID NO: 17075 - DNA, 1362 bp, synthetic construct
  source 1..1362: mol_type = other DNA; note = Synthetic coding sequence
atggcgggtgctgctggaagagtgcaggaccgtgcattaagacgttttcctataacactgcccgtgggggatcttagcaacctgcacctcaaagaggaaaaaatcaagcccgatactaacggtgcggtagtgaagaccaatgccaatgccgagaaaactgacgaagaggagaaggaggacagagcagcacagtccctgctgaacaaactgatcagatcaaacctggttgacaataccaaccaggttgaagtattgcagagagatccaaacagtcctctgtactccgtcaagtcttttgaggagctgagactcccacagaatttgatcgcccagtcacagtccggaactggtaagaccgccgctttcgtgctcgctatgctaagccaagtcgagccggccaataaatatccacagtgtttgtgcctttcacctacatatgagctggcactgcaaaccggaaaggtgatcgagcagatggggaaattttatcccgaactcaaactagcgtacgccgttcgcggaaacaagctcgaacgtgggcagaagatctccgagcagatcgtgattggcactccaggtaccgtgctggattggtgttctaaacttaagttcattgatcctaagaagataaaggtgtttgtattggacgaggccgatgttatgattgctactcagggtcaccaagaccagtccatccgcattcagcggatgctgcccaggaactgccagatgcttctgtttagtgcgacctttgaggatagcgtctggaaattcgcccagaaagttgtacccgaccctaatgtgattaaactaaaaagagaggaggagaccctggacacaataaaacagtactacgttctctgctcaagtcgggatgagaaatttcaggccctgtgtaacctttacggcgccatcacgatcgcacaggccatgatcttctgccataccagaaagaccgcgagctggctggcggcggagctgagtaaggaaggacatcaggtggctctgctatccggtgagatgatggtggagcagcgtgcagctgtgattgagagattccgcgagggaaaagagaaagtgttggtcaccacaaatgtgtgtgcgcgtggaattgatgtggagcaggtatctgtagtcataaatttcgacctccctgtcgataaagacggaaatccagataatgagacttacctacaccgaattggccgcacaggaagattcggcaaacggggtctcgctgtgaacatggttgactctaagcattcaatgaacattctcaaccgcatccaagagcacttcaataaaaagatcgagaggctcgacaccgacgacctcgacgaaatcgagaaaatcgccaactag

SEQ ID NO: 17076 - DNA, 921 bp, synthetic construct
  source 1..921: mol_type = other DNA; note = Synthetic coding sequence
atggctagggtgccattgggacgcagcctgaccctcagtccacgattggaacacaatggcatgacgagtgcgcatcataacttccgcctgccaggcagccgcgattcccccgcttcagcctctcaggttgcggaaatcatcgatttagaatggtacgaaaaatccgaagagactcatgccagccagatcgagctactcgagacttcaagcacccaggaacctcttaacgcgtctgaggccttttgtccacgcgattgcatggtgcccgtggtatttcccggacctgtttcgcaagagggttgctgccagttcacctgtgagctccttaagcacatcatgtatcagcgacagcaactgcctctcccctatgagcagctcaagcacttctatagaaagccaagtccacaggctgaggaaatgctcaaaaaaaaaccccgtgcgaccacggaggtgagttctaggaaatgccagcaagcccttgctgagctcgaaagcgtcctgtctcatttggaggactttttcgcaaggactctcgttccccgggtgctcatcctgttaggtggcaacgctctgtctcccaaagaattttatgagctcgatcttagcctcctggccccatatagtgtggaccagtctttatccaccgccgcctgcctgcggcgcctgttcagagcgatttttatggcagacgcctttagcgagctacaagcaccacctttgatgggaaccgttgtcatggcacaggggcacagaaactgcggcgaggactggttcagaccaaagctgaattaccgcgtgccgagtaggggacacaagcttaccgtgactctgtcttgcggcaggccctcaattcgcactaccgcttgggaggattacatttggttccaggcaccagtgacgtttaagggtttcagagagtag

SEQ ID NO: 17077 - DNA, 426 bp, synthetic construct
  source 1..426: mol_type = other DNA; note = Synthetic coding sequence
atgccccagctcttgcagaatataaacggaattattgaggcgttccgccggtatgcccgcacggagggcaactgtactgcccttacgcggggtgagctcaagcgcctgctggagcaggagttcgccgatgtaattgtcaaaccccacgatccagccacagtggacgaagttctgcgtctgctcgatgaagatcacaccgggacagtggagtttaaggaatttctcgtgcttgtttttaaggtcgcccaggcctgcttcaagacactgtctgaatccgccgaaggcgcttgcggatctcaggagagtggctcgttacactcaggggcctcacaggaactaggcttccggccacgcgtaaggccattggctctgcgcgggagcgctgccatgacaggcaaacttagccccagggctcgaaaagagtag

SEQ ID NO: 17078 - DNA, 480 bp, synthetic construct
  source 1..480: mol_type = other DNA; note = Synthetic coding sequence
atggctacatccgctccacttcgtagcctcgaagaagaggtcacatgttctatctgcctcgattatttaagggaccccgtgaccatcgattgcggacatgttttttgccgttcctgcactacagacgtccgacccatatcagggtcccgtcccgtgtgccccctgtgcaagaagccgttcaaaaaagaaaacatccgacctgtctggcagcttgagaaaatcctgaatcacctcagtaccttgcgccgggatcgcgacaagattcagggtttccaagccaaaggcgaagctgatatcctcgccgccctgaagaagctgcaggaccagcgccagtacatcgtggccgagttcgagcagggccatcagttcctcagggaacgcgaggaacacctgcttgagcagctggcgaagctcgagcaggagttaactgaaggaagagaaaagttcaagagtcgcggggttggcgaactagccaggtag

SEQ ID NO: 17079 - DNA, 1506 bp, synthetic construct
  source 1..1506: mol_type = other DNA; note = Synthetic coding sequence
atggacttcctactcgggaacccattctcgagccccgtggggcagagaatcgaaaaggcaacagacggaagcttgcaaagtgaagactgggccctgaatatggagatctgtgacatcatcaatgaaaccgaggagggccctaaggacgcgctgagagcggtgaagaagaggatcgttggtaataaaaattttcatgaagttatgctagcccactcagcaaggagacatctctcggcccttcaggtattagagacttgcgtcaagaactgcggtcatagattccacgtgctggtggccagccaggatttcgtcgagtcggtgctagtccggacaattctgccaaagaacaacccacccaccatcgtccacgacaaagtgctcaatctgattcagtcttgggctgatgccttcagatcaagtcctgatctcaccggggtcgtgacaatctacgaggacttgcgccgcaaagggttggagtttcccatgaccgacctggatatgctgagccccatacacacgccccagcgtactgtctttaatagtgagacacagtccggtcaggactccgtggggacagactcttcacagcaggaggattctggccagcacgccgctccactgcccgcgcctcctattcttagcggggatacaccaatcgcacctaccccagagcagatcgggaagctcagaagcgagctagagatggtaagtggcaatgttagggtcatgtccgagatgctaacggagcttgttcccacccaggccgaaccagctgatctggagctactccaagaactgaatcggacatgtcgggctatgcagcagcgagtcttggagctcattccacaaattgcgaatgagcagctgacagaggaactgctgattgttaatgacaatctcaataacgttttcctacgtcatgagcgcttcgagcgcttccgtaccggccagacaaccaaggcccccagcgaagccgagccggcagccgatctaattgacatgggcccagaccctgccgcgactgggaatctgtcttcacaactggcaggaatgaacctgggatcgtcatcagttcgggccggcctccagtccctggaagcctccggacgattggaagatgaattcgatatgttcgcactcacgcgaggaagcagccttgccgatcagagaaaggaggtaaaatacgaagcgccacaagcaacagatggcttagcgggcgccctggacgccagacagcagtctactggagcaatcccggtcacacaggcttgccttatggaggatatcgagcagtggctttctacggatgtgggtaatgacgccgaggagcccaaaggcgttacgagcgaagagtttgacaaatttcttgaggaacgggccaaagcggccgaccgtctgcctaatctttcttccccctctgctgaaggcccccctggcccaccatctggcccagcacctagaaagaagacccaagaaaaagacgatgacatgctgttcgccctgtag

SEQ ID NO: 17080 - DNA, 117 bp, synthetic construct
  source 1..117: mol_type = other DNA; note = Synthetic coding sequence
gaacctgtgtatttcgccgagaaagttatgagtctggggagaaactggcatagaccctgcctgaggtgccagcggtgtcataaaaccctaacagctgggtctcatgcagaagtttag

SEQ ID NO: 17081 - DNA, 1122 bp, synthetic construct
  source 1..1122: mol_type = other DNA; note = Synthetic coding sequence
atggctcaggaatcaccaaagaatagcgctgcagagattccagtgacatccaatggtgaagtggacgactccagggagcactctttcaaccgtgacctcaagcactctctcccctctggattgggcctgtcagagacacagattactagtcatggattcgacaataccaaagagggagtcatcgaggcgggagcattccagggcagcccagctccacctctcccaagtgtaatgtcccccagtcgtgtggctgccagtcggcttgctcagcaggggtctgatctcattgttcctgctggaggccagaggacccaaacaaagagtggtcccgttatccttgctgacgaaatcaagaatccagccatggagaaacttgagctggtgcgcaagtggtccctgaatacatacaagtgcacccgacagatcatttcggagaagctcggccgggggagtcgcacagtggatctcgagttggaggcccagattgacattctccgcgataacaaaaaaaagtacgagaatattctcaaacttgctcagaccttgtccacacagcttttccaaatggttcatacgcagaggcagttaggagacgctttcgctgatcttagcctgaagtccctagagctgcacgaggagttcggatacaacgctgatacccagaagctgttggccaaaaacggtgaaactttattaggggctattaatttcttcattgcaagcgtgaacactctcgtcaataaaacaatagaagataccctgatgaccgtgaaacaatacgaatccgcccggattgaatatgatgcctatagaactgacctcgaggagctgaacctcggaccccgggacgcaaacacactgccaaaaatcgagcagtcgcagcacctcttccaagcacacaaagaaaaatacgacaaaatgcgcaatgacgtcagtgtgaaacttaaatttctcgaggagaataaggtcaaggtccttcacaaccagcttgtcctgtttcataacgccatcgcagcctattttgccggcaaccagaagcaattggagcagactctaaagcagttccatattaagcttaagacccctggcgtagatgccccgagctggttggaggagcagtag

SEQ ID NO: 17082 - DNA, 453 bp, synthetic construct
  source 1..453: mol_type = other DNA; note = Synthetic coding sequence
atgcacacaggggatccaaaacaggatctggcctacgaacggcagtacgaacagcagacttaccaggtgattcctgaggttatcaagaattttattcaatactttcacaaaactgtatcagacctgatagatcagaaagtttacgaacttcaggcctccagggtctcttcagacgtgattgaccagaaggtctatgaaatccaggatatctacgagaactcttggacaaaactgacagaacgatttttcaaaaacacaccctggcccgaagccgaagccatcgcccctcaagtaggcaacgatgcggtgtttctgattttgtataaggagctttactaccggcacatttacgctaaggtttccgggggaccctctttggagcagcggtttgagtcctactataactactgcaatctcttcaattacatactgaatgctgatggccccgcatag

SEQ ID NO: 17083 - DNA, 2136 bp, synthetic construct
  source 1..2136: mol_type = other DNA; note = Synthetic coding sequence
atggcaatgcaggagaaatatccgaccgagggaatcagccacgtgaccagtcctaatttctgtagttcatccggaagcccccctttccagccaataaagagtcacgtcacaatccccacagctcacgtaatgccgtctaccttgggtacaagccccgccaaaccaaacagtacaccagtagggccctccagcagcaagctaccattgagtggcttggcagaatccgtagggatgactcggaatggggatctgggggcgatgaaacacagccctggattaagcagagatttgatgtatttcagcggggccacgggagaaaacggaatcgaacagtcatggttcccagcagtgggccacgagcggcaggaggaagcgagaaaatttgatattcctagcatggaaagcaccctgaatcagagcgctatgatggagacgctctatagtgaccctcaccatcgggtgagattccacaacccccggaccagcacatcaaaggagctgtacagggtgcttcctgaggctaagaaagcacccggatcgggggccgtgtttgagcggaacggcccacacagcaatagctccggcgtgttgcctctcggcttgcaaccggcacctggcctgtcgaagcctctcccgtctcaagtatggcagccatctcccgacacctggcatccccgagagcaatcatgtgagttgtcaacttgtaggcagcagctggagctgatacggcttcagatggaacagatgcagttacagaatggtgctatatgccatcaccctgcagcctttggccccagcctccctatcctcgaacccgcccagtggattagtattctgaactccaacgagcacctcctgaaagagaaagagctcttgatcgataagcagcggaagcacatctctcaactcgagcaaaaagtgagagagtcggagctgcaagttcacagtgccctgctcggccgccccgcccccttcggggatgtgtgcttgttgcggctacaggagctgcagcgcgaaaacacgttcttaagagctcagttcgcgcaaaagactgaggccttatcacgcgagaaaatcgaccttgagaagaaactgtcagcatcagaggtggaggttcagttgatcagggagagccttaaagttgctctgcagaagcacagtgaggaagtaaaaaaacaggaagaacgcgtgaaggggagggacaagcatattaataaccttaaaaagaaatgccagaaggaaagtgaacagaaccgtgagaagcagcagaggattgaaacacttgagcgatacctagctgatttaccaaccctggaagatcaccagaagcaatcgcagcagctcaaggatagcgaactgaagtcgacagagcttcaggaaaaagtcacagaacttgaatctttgcttgaagaaacacaggccatttgtcgcgaaaaagaaatccagctcgagagcctgcgacaaagagaagccgagttcagctccgccggccactctttacaggacaaacagtccgtagaggagacatctggagaagggcctgaggttgagatggagagctggcagaagaggtacgatagccttcagaagattgtcgaaaaacaacagcagaagatggatcagctacggagccaggtccagtccctggaacaagaggtcgcccaggaggagggtacctctcaggccctgcgtgaggaagctcaaaggagagactccgccctgcaacaactgagaactgcggtcaaggagttatccgtgcaaaatcaggacttgatcgagaagaatttgaccctccaggaacatctgcggcaagcacagcccggcagtccacctagtcctgatactgctcagctggcactagagctgcaccaagaacttgccagttgtctgcaggatctgcaggctgtgtgctctattgtgactcagcgtgcccagggtcacgatcctaatctgtcgttgcttctcggcatccactccgcccagcatccagaaacccagctggatctgcaaaagcccgatgtgataaagaggaagctggaggaggtccagcagctgcgaagggatatcgaagacttgcgcacaacgatgtccgacagatatgcgcaggacatgggcgagaactgcgttacacagtag

SEQ ID NO: 17084 - DNA, 531 bp, synthetic construct
  source 1..531: mol_type = other DNA; note = Synthetic coding sequence
atggcggccgccaccggcgatcccggactgtctaaacttcagttcgcacccttctccagcgccctcgacgtgggcttctggcacgagctaacacagaaaaaactgaatgagtatagattagacgaggctcccaaagacattaaggggtactactacaacggggactccgctggtctacctgccagattgaccttggagttctccgcgttcgatatgagcgctcccaccccagcgagatgttgtccagccataggcacactgtacaacacaaatactctggaaagttttaagacggctgacaagaagttgttgctcgagcaggccgcaaacgagatctgggagagtataaagtctggaactgcccttgagaatcccgtgctcctcaacaagtttcttctacttacattcgccgaccttaagaagtaccatttctactattggttctgctaccctgccctgtgcctccctgagtccttgcctctaatacaaggccccgtgggactggaccaaaggttttcccttaagcagtag

SEQ ID NO: 17085 - DNA, 1443 bp, synthetic construct
  source 1..1443: mol_type = other DNA; note = Synthetic coding sequence
atgaaactgaaggagctggaacgccctgctgtgcaagcttggtctcccgccagtcagtatccattatatttggcaacaggaacgagcgcccaacagctcgattctagcttcagcacaaacggcacgctggagatttttgaagtagatttccgcgaccctagcctcgacctcaagcaccggggtgtgctttcagccctatccagatttcacaaactggtgtggggctcattcggatcaggattgcttgagtcaagcggtgtaatcgttggtgggggtgataatggcatgctgatcctctataatgttactcacattttaagcagtgggaaagagccagtgatcgctcagaagcagaaacacacaggcgctgttcgcgccctcgatcttaatcccttccagggtaatttattggccagcggcgcatctgactccgagatcttcatatgggacctgaataatctgaacgttccaatgacattaggctccaaaagccagcaacctcctgaagacatcaaggctttgtcttggaaccgtcaggcccaacacattctctcatctgcacatcctagtggaaaagcagtggtgtgggacctcagaaaaaacgagccaatcatcaaggtgagcgatcacagcaataggatgcattgcagtgggctggcctggcatccagatatcgccactcagctcgtcctctgttccgaagacgatagactgcctgtcattcagctgtgggatcttcgttttgcaagttcgccacttaaggtcctcgaatctcattcacgaggaatcctgtcagtgagctggagtcaggctgatgccgagctgctgttaacaagcgcaaaagatagtcagattctgtgtcgtaatctgggctcttctgaggtcgtgtacaagttacccacccagagctcgtggtgtttcgacgtacagtggtgcccccgggatccatctgtcttttcggccgcctctttcaatggatggatatctctatacagcgtcatggggcggtcttgggaagttcaacatatgcgccaagctgataaaatctcatcttcttttagcaaaggacaaccgcttcctcccctccaagtcccggaacaggttgctcaagccccactgattcccccactcaagaaacctcccaagtggatcaggcgtccaaccggcgttagctttgcattcgggggcaagttggttacctttggactccctagcacccctgcccacctggtcccgcaaccgtgccctaggctggtttttatctcgcaggtcacaacagagagcgagtttctcatgcgctccgccgaactacaggaggcattaggttccggaaacctcctgaattattgccagaataagtcgcagcaggcactcttgcagagcgagaaaatgctgtggcagtttctgaaacctgcacgggactccagtggcgcacggaggtag

SEQ ID NO: 17086 - DNA, 1842 bp, synthetic construct
  source 1..1842: mol_type = other DNA; note = Synthetic coding sequence
atggccaccattccagactggaagctgcagttgcttgcacgaagacggcaggaggaagcctcggttcggggaagggagaaggccgagcgagagcgcttgtcccagatgccagcatggaagagagggttgttagagcggcggcgggcaaaactcggactctctccaggcgagccttcaccggtgcttgggacggtggaagctggacctcctgatccagacgaatccgcagtcctcctggaggccatcggacctgtgcaccagaataggttcattaggcaggagcggcagcagcaacaacagcaacaacagcggagcgaggaactcctcgccgagagaaaacccgggcccctggaggccagggaaagacggccatcccccggtgaaatgcgcgaccaatcacccaaaggacgagagagtagagaggaacgcctgagcccgagagaaaccagggagcggcggctcggaatcggcggtgctcaagagctatcactgcgccccttggaggcccgagactggcgacaatcgcctggcgaggtgggtgacaggtcctcccgcttatctgaagcctggaaatggcgactgtcacctggcgagacccctgagaggtctctgcgcctggctgaatcccgggaacagagtcctaggcgtaaagaggtggaatcccgtctgtcccccggggagtccgcctatcagaagttaggtctgacagaggctcacaaatggaggccagactcccgagagtcccaggagcagagccttgttcaactagaagctaccgagtggcgtctgcgcagtggtgaagagcggcaagattactccgaagaatgcgggaggaaggaggaatggcctgtcccgggggtggcacccaaggagactgccgaactgtccgaaaccttgacccgcgaggcgcaagggaattcttctgctggagttgaggccgcagaacagagacctgtggaggatggtgagaggggtatgaagccgactgaagggtggaaatggaccctgaattcaggcaaagctagagaatggacacccagggatatcgaggcccagactcagaaaccggaacctcctgagagtgccgagaagctcctcgaatcaccaggggtcgaagctggcgaaggcgaggctgaaaaggaggaagccggtgctcagggcaggcccctcagggccctgcagaattgctgttcggtcccgagccctttaccccctgaagacgctggcactggaggcttacggcagcaggaagaggaggctgtcgaactgcaacccccaccccctgcgcctctctcaccgccacccccagctcccaccgctccccagccccccggagatcccttgatgagcaggctgttttatggcgttaaagccgggcctggtgtcggcgcccctcgtcgttcgggacacactttcacagtaaaccctaggagaagtgttcctcctgctacccccgcgactcccaccagtccagctacggtggacgctgccgttcctggcgcgggcaagaaacgctacccaacagccgaggagattctcgttctgggcggatatcttagactctctagatcttgtctcgctaaaggcagccctgagaggcatcataagcagctcaagatctccttcagcgagacagcgctcgaaacaacctatcagtatccttctgagtccagtgtcctagaagaactggggcccgaacctgaggtaccatccgcccctaatcctcccgcagcacagccagatgacgaggaggatgaagaggaactgctcctgctccaacctgaattgcagggcggcctccgcaccaaggccctgatagttgacgagagctgccgtcgctag

SEQ ID NO: 17087 - DNA, 1446 bp, synthetic construct
  source 1..1446: mol_type = other DNA; note = Synthetic coding sequence
atggcctccgccgcttctgtgacgagcctggccgatgaagtgaactgtcccatctgccagggaacacttagagaacctgtgacaattgactgtgggcataatttttgtcgagcatgcctgacacgttactgcgagattcctggcccagacttggaggaatctccaacctgtcccctgtgcaaggagccctttagacccggctcgttccggcccaactggcagttggccaacgtggtcgagaacatagagcggctgcagttggtgtccactctcggcttaggggaggaggatgtgtgccaggaacatggcgagaagatttactttttctgcgaggacgacgagatgcagctgtgcgtggtatgtagagaggccggggagcacgccacccacacaatgagattcttggaggacgctgcagctccttacagagaacaaattcataagtgtttgaagtgcctccgcaaggagagggaagagatccaggagatccaatcaagagaaaacaagcgcatgcaggtgctgcttacgcaggtctctaccaagaggcagcaagtgattagcgagttcgcccacttgagaaagtttctcgaagagcagcagagtatcctactggcacagctagagtctcaggatggtgacatactcagacaaagggacgagttcgacctcctcgtcgccggggagatttgtaggttttctgccctaattgaggaactggaggagaagaacgaacgtcctgcgcgggagcttcttactgacattagatcaaccttgattcggtgcgaaaccagaaagtgcagaaagcccgttgccgtctctcccgagcttggccaaaggattcgagacttcccacagcaggctttgccccttcaacgagaaatgaagatgtttcttgagaagctctgcttcgaacttgactatgagccggcccatatctctttagacccccagaccagccatcccaagctcctgctgagcgaggaccaccaacgagcgcagttctcgtacaaatggcaaaactcacccgataacccacagcgctttgaccgggccacctgcgtgctcgcacacaccggcatcactggcggccggcatacttgggtggttagcatagatctcgcccatgggggcagctgtaccgttggggtggtgtccgaagacgttcagaggaagggggagctaaggctgcggcccgaggaaggagtttgggccgttaggctcgcatggggcttcgtctccgcgcttggctcttttcccacccgcctcacactgaaagaacagccgaggcaggtacgggtgtcgctggactatgaagtaggatgggtaacgtttacaaacgctgtaaccagggagccaatatacacctttactgcctcgtttacccggaaggtaataccgtttttcgggctgtggggtaggggaagctccttcagtctctcttcctag

SEQ ID NO: 17088 - DNA, 537 bp, synthetic construct
  source 1..537: mol_type = other DNA; note = Synthetic coding sequence
atgtcaagcaacgagtgctttaagtgtggacgatccgggcactgggcaagggagtgccctactgggggaggtagggggagaggaatgcggagcaggggaaggggaggatttactagcgacaggggctttcagttcgtgagcagctcactcccggacatctgctaccggtgtggggaaagtgggcacttggccaaggactgcgatctgcaggaagacgaggcctgctacaactgcggaaggggaggacatattgcaaaggattgcaaagagcctaaaagagagagggaacagtgttgttacaattgcgggaaacccggacacttggcccgcgactgcgatcatgcagatgagcagaagtgctactcttgtggcgagtttggtcatatccagaaagattgtaccaaggtcaagtgctataggtgtggtgaaacaggccatgtggccataaactgctctaaaacttccgaagttaactgttatcggtgcggggagtcgggacacctagccagggaatgcacaattgaagctacagcctag

SEQ ID NO: 17089 - DNA, 87 bp, synthetic construct
  source 1..87: mol_type = other DNA; note = Synthetic coding sequence
atggccatggccccctctccttctttagtgcaagtttatacgtcccccgccgctgtggcagtgtgggaatggcaggacggcctatag

SEQ ID NO: 17090 - DNA, 603 bp, synthetic construct
  source 1..603: mol_type = other DNA; note = Synthetic coding sequence
atggccgccaccgcacgagaagacggtgccagtgggcaggaacgtggtcagcgcggctgtgaacattatgacaggggctgcctgttgaaagccccttgctgtgataagctgtatacttgcaggttatgccatgacaacaacgaggaccaccagctcgaccgattcaaagtgaaagaggtgcagtgcattaactgcgagaaaattcagcacgcacaacagacctgcgaagagtgctctactctgttcggcgagtattactgcgacatttgtcatctgtttgataaagataagaagcagtaccactgcgaaaactgcggaatttgcagaattggacctaaggaggatttcttccattgcctcaaatgcaacctctgcctggccatgaatctgcaaggccgtcacaagtgtatcgaaaacgtgtctcgtcaaaactgcccaatttgcctggaggacattcatacatctagggtggtcgcgcacgttctcccctgtgggcatctcctacacagaacgtgctacgaggaaatgttgaaggagctgcagatgagtatcatgtatgctctgtgctttaggtacgatcaggttctagagacagcaggctag

SEQ ID NO: 17091 - DNA, 567 bp, synthetic construct
  source 1..567: mol_type = other DNA; note = Synthetic coding sequence
atggccacacccctgggttggtctaaagctgggtctgggtctgtgtgtctggccctggaccagctccgggacgtgatcgaatcccaagaggaacttattcatcagctccgcaacgtgatggtgctgcaggacgagaactttgtctccaaagaggagtttcaggctgtcgagaaaaaacttgtggaggaaaaggctgctcacgctaagaccaaggtactcctcgccaaggaagaagagaagcttcagttcgcactgggcgaggtggaggtgttgtccaagcagctggaaaaagaaaagttggccttcgagaaggccctgtcctccgtaaaatcgaaagtcctgcaagagagctctaaaaaggatcaactgataacaaagtgtaacgggaggagagaggcgcgcgcactacaccacggatatatcaacggtttatttcccaatcacccagtgccagtttctaaggctggatttcactctaacacgtgtcctcagctgcgtatccaagcaggtcccggcgggccacatcttagaaaaggcttgaagggacctgggaggcccaggaaatag

SEQ ID NO: 17092 - DNA, 381 bp, synthetic construct
  source 1..381: mol_type = other DNA; note = Synthetic coding sequence
atggacagatccaagcgcaactcaattgccggctttccacctagagtcgagcggcttgaggaattcgaggggggaggaggaggggaaggaaacgtgtcccaggtcggccgggtgtggccctcatcatatcgagccctgattagcgccttttcacgcctgactcggcttgacgacttcacctgcgagaagatcgggtccgggttttttagcgaggtatttaaggtacgacatagggccagcgggcaggtcatggctcttaagatgaatacgctatcctctaatagagccaacatgctgaaggaagtacaattgatgaatcgcctctcccacccgaatatcctgagatgccggagtatgaatcagaacttttctccaaactag

SEQ ID NO: 17093 - DNA, 1443 bp, synthetic construct
  source 1..1443: mol_type = other DNA; note = Synthetic coding sequence
atggaaacagatctgaactcacaggaccggaaggacttggataaattcattaaattcttcgcattgaagactgtacaggtgatagttcaagcgcgcttgggagagaaaatctgcaccaggagctcgtctagtccaacggggtcagactggttcaatttagccataaaagacattccagaagtaacccatgaagccaagaaagcccttgcagggcaactccctgcggtggggcgcagcatgtgtgtggagatttctttaaagacctcagaaggcgattctatggaactggagatatggtgtcttgagatgaatgaaaaatgcgataaggaaataaaggtctcctacaccgtgtataacagactgtcccttctgcttaaatccctcctcgcaatcacccgagttacgccggcctaccggctctctcggaaacaaggtcacgaatatgttattctgtaccggatttactttggtgaggttcaattgtccgggctgggagaagggtttcagacagtgcgcgtgggtactgttgggacaccagttgggacaatcactctcagttgcgcctaccgcattaatctagctttcatgagcactaggcagttcgagcggactccacctataatgggtataattatagaccattttgtagaccggccctaccctagttcctcccccatgcatccatgcaactatagaacagccggggaggacaccggcgtaatttaccccagtgtcgaagatagccaggaagtctgcactacatcatttagtacgagtcctccgtctcagttgatggtgccgggtaaagaaggaggtgtgccacttgccccgaatcagcctgtccacggaacacaagccgaccaagaacgtttagcgacctgcaccccttccgaccgcacacactgcgccgccacccccagttcctcagaggacacagagactgtttctaactccagcgaggggcgggccagtcctcatgatgtcctcgagacgattttcgtccgcaaagtaggggcctttgtgaataaaccaatcaaccaggtgacactgacaagtttggatattccctttgctatgttcgcgccaaagaatctggagcttgaagacaccgatcccatggtaaacccacctgacagccccgagactgagagtcccctccaaggctcattgcatagcgatggaagctcaggggggtcaagcggtaatacacatgacgactttgtcatgatcgacttcaagccagccttctcgaaagatgatatacttccaatggaccttgggacattttacagggaattccagaaccccccgcaactttcctcactttcaattgatattggggcacaatctatggcggaagatcttgatagtcttcccgagaaactggcagtgcacgaaaagaacgtaagggaattcgacgcattcgtggagactctgcaatag

SEQ ID NO: 17094 - DNA, 390 bp, synthetic construct
  source 1..390: mol_type = other DNA; note = Synthetic coding sequence
atggccgaactcatccagaagaagctccagggagaagtggagaaataccaacagctgcaaaaagatctgtctaagtccatgagtgggcgccagaaattagaagcgcaactgaccgagaacaacatagtcaaagaggaactggctctcctcgatggctcaaacgtagtattcaagttactcggaccagtcctggttaagcaggaattgggagaggcccgtgcaactgtcggaaagcgactggattatatcacggcggaaatcaaaagatacgagagtcagctgagagatctagagaggcaaagcgagcaacagcgcgagacattagcacagttacagcaggaattccaaagggctcaagccgcgaaggcgggtgcaccagggaaggcttag

SEQ ID NO: 17095 - DNA, 348 bp, synthetic construct
  source 1..348: mol_type = other DNA; note = Synthetic coding sequence
atggtcgaggacgagcttgccctctttgacaaaagcattaacgaattttggaacaagttcaaatcaaccgatacttcctgtcaaatggccggattaagagatacttacaaggattctattaaggcctttgctgagaaactgagcgttaaactgaaggaggaggaaagaatggtcgagatgttcttggagtaccagaaccagatctcaaggcagaataagctgattcaggagaaaaaagacaacctgctgaaactaatagctgaagtgaagggtaagaagcaggagctagaggtcttgaccgcgaatatccaggatcttaaggaggagtactcaagaaaaaaggagtag

SEQ ID NO: 17096 - DNA, 402 bp, synthetic construct
  source 1..402: mol_type = other DNA; note = Synthetic coding sequence
atggcttcctccgccagggaacatctgctgttcgtgcgacgtaggaaccctcagatgaggtatacactatcgcccgagaacctacagtctctggcggcacaatcctctatgcctgagaatatgacgctgcaaagggctaatagtgataccgatctggtaacgagtgaatccaggtcctccttgaccgccagtatgtatgaatatacattgggccaggcccagaacttgatcatcttctgggacattaaagaggaggtagatccgagtgattggatcggcctgtatcatatcgacgaaaattccccagccaacttctgggacagcaagaacaggggggtgacaggcactcagaaaggtcaaatcgtttggcggattgaacctggaccctattttatggaatag

SEQ ID NO: 17097 - DNA, 264 bp, synthetic construct
  source 1..264: mol_type = other DNA; note = Synthetic coding sequence
atgagcctgtttggtacgacttcgggattcggcaccagtgggacttccatgttcggctcagcaactacagacaatcacaatcctatgaaagacattgaggtgacaagctcccctgacgatagcattggatgcttatccttcagccctcccacactgcccggcaactttctcatagcaggctcttgggctaatgacgtgagatgctgggaggtgcaggacagtgggcagactattcccaaggcccagcagatgcacaccggttag

SEQ ID NO: 17098 - DNA, 1329 bp, synthetic construct
  source 1..1329: mol_type = other DNA; note = Synthetic coding sequence
atggccaactcctttgctgcgagaatcttcaccactctgagtgatcttcaaactaatatggcaaatctgaaagtcatcggaatagtgatcggaaaaacagatgttaagggtttcccagatcgaaagtctatcggcagcgagcgttatactttttcattcacaattagagattcacctgcacattttgtgaatgctgcatcatggggcaacgaagattacatcaaatctctcagcgacagctttcgtgttggagattgcgtcatcattgaaaaccctctgattcagagaaaggagattgagcgagaagagaaattttcccctgctacaccctcaaattgcaaattgttactctctgagaatcactcgactgtgaaggtgtgcagttcttatgaagtcgacacgaaactcttatccctcatccatctcccagtgaaggagtctcatgattactatagcctcggagatatcgtggccaatggccactccctgaatggtcgcataataaatgtgctcgccgcagtgaaatcggtcggtgagccgaagtacttcacaacatccgatcgaagaaagggacaaagatgtgaagtgagactgtacgatgagacagaaagtagttttgccatgacatgctgggataatgagtcgattcttctggcccagagttggatgcctcgagagacggtgattttcgcctctgacgtgcgcatcaatttcgacaaattccgtaattgtatgaccgccactgtgatatctaagaccattattactactaacccagacatccccgaggctaacattcttctaaatttcatcagggagaataaggagaccaatgttctcgacgatgagatcgactcctattttaaggaaagtatcaacctctctaccatcgtggatgtttatacggtggaacaacttaaaggtaaagcgctgaaaaacgaaggaaaagctgatccctcgtatggtattctgtacgcttatatttcaactcttaatatcgacgatgagaccactaaagtagtgaggaacagatgcagttcctgtgggtatatcgtcaacgaggcgtccaatatgtgtacaacctgcaacaagaacagccttgatttcaagtccgtgtttttgagctttcatgtgctcattgatctcaccgaccacacagggacccttcattcctgttcacttacgggctctgtagccgaggaaaccctcggttgtacatttgtcttgtctcatagggctcggtccggcctcaaaatcagcgtgctttcatgcaagctcgccgaccccaccgaggcaagtcgtaacttatcggggcagaagcatgtctag

SEQ ID NO: 17099 - DNA, 651 bp, synthetic construct
  source 1..651: mol_type = other DNA; note = Synthetic coding sequence
atgaacaatcagaaacagcagaagccaaccctgtctggacagaggtttaagacaaggaagcgcgatgaaaaagagcgctttgatccgacacagtttcaagattgtattattcaggggctcaccgagactgggacagaccttgaggcagtggccaagttcctagatgcttccggagccaagctcgactaccgtcggtatgctgaaacgctctttgatattttagtggcaggagggatgttggcccccggcggcacattggctgatgatatgatgaggactgacgtttgcgtgttcgcagcccaggaagatttagagacgatgcaggctttcgcacaggtcttcaacaagctgatccgccggtacaaatatttagaaaaaggctttgaggacgaggttaaaaagctgctgctgttcttgaaggggttttcagagagcgaacgcaacaagttggctatgctgaccggggtgttgttagccaacggtaccctcaacgccagcattctcaactctctgtataacgagaacctcgtgaaggaaggggtgagtgctgccttcgcggtgaagttattcaaatcttggattaacgagaaggacatcaacgcagttgctgccagcctgcggaaagtctctatggacaaccggttgatgtag

SEQ ID NO: 17100 - DNA, 429 bp, synthetic construct
  source 1..429: mol_type = other DNA; note = Synthetic coding sequence
atgaatgaggttgtgcatacgtctccaaccatcgggagcaatgtcgaggagatagtgatcaacaatactaggttcctcatgtgggacataggaggacaggagagcttaaggagctcctggaatacatattacacgaacactgaatttgtcatcgtggtagtggactctacagaccgtgagagaattagcgtcacacgcgaagagttgtacaagatgcttgctcatgaagatcttcgtaaagccgggctgttaatcttcgccaacaagcaagacgttaaagagtgtatgacagtggcagagatctctcaattccttaagctgacatcaatcaaggatcaccagtggcacatacaagcctgctgtgctctcacaggcgaaggcctttgccaagggttggagtggatgatgtcacggcttaaaattcggtag

SEQ ID NO: 17101 - DNA, 447 bp, synthetic construct
  source 1..447: mol_type = other DNA; note = Synthetic coding sequence
gcaatccatatattggatgttctggtgctgaatggcaccgacgtgagagagcagcactttaatcagcggattcagctggccgagaaattcgtgaaggctgtcagtaaaccttctagacctgatatgaacccaattcgggtgaaggaagtttatcgcctggaggagatggagaagattttcgtaaggctcgaaatgaagatcatcaaagggtcttctggcactccaaagttgtcatatacagggagagatgatagacatttcgttccaatggggctgtatattgtccgcacagttaacgaaccgtggacaatggggttctccaaaagttttaagaagaaatttttttacaataagaaaacaaaggactcgacctttgacctgccctactatccatttccctcctttttctttcctaaccgtcgttataaccttcttcttttcgtgtag

SEQ ID NO: 17102 - DNA, 300 bp, synthetic construct
  source 1..300: mol_type = other DNA; note = Synthetic coding sequence
atggaagagatccctgctcaggaggccgcaggcagcccccgggtacagttccagagcctggagacacaatctgaatgcctgtccccagagcctcaattcgtgcaagatacagatatggagcaggggctcactgggggtattctgctgcggctccctaccacacgtattcactctgtaaattcgtgcccagctctgtcacacacccaggctagtgcattttctggggaaacgctcgccgttctcactgcaggaatcagcaagaggtggcccaaataccgtcttcctattgatatcgcttag

SEQ ID NO: 17103 - DNA, 2493 bp, synthetic construct
  source 1..2493: mol_type = other DNA; note = Synthetic coding sequence
atgaaacgtgggaggctgccgtccagctctgaggattcagatgacaatggctcattgtccactacatggagccagaatagccgctcccaacatcggcggtcatcttgttcacggcacgaggaccgaaagccaagtgaggtcttccgtacggacctgataacggcaatgaagctccacgatagttatcagcttaaccccgatgagtactatgtcctggcggatccttggaggcaggaatgggaaaagggggtccaagtgcccgtttctcccggaaccataccccagccagtggctagacctaagaagtatattgtgtctagtggctccgaaccgcccgagctcgggtacgtcgacattagaaccctggcagattcagtgtgccgttacgaccttaacgacatggatgctgcgtggcttgaactgacaaacgaggaatttaaagaaatggggatgcctgagctggatgagtatacaatggaaagagtgctggaggaattcgagcagaggtgttacgataatatgaatcatgcaattgagacagaagagggcctgggaatcgagtatgatgaagacgtggtctgtgacgtctgccagagccctgatggggaagacggaaatgagatggtgttttgcgacaaatgtaacatctgtgtgcaccaagcttgttacggaatcctcaaggtccccgaagggagttggctgtgtagaacatgtgccctgggtgtgcaaccgaaatgtctcctttgccctaagaaaggcggagccatgaaacctacacgctccggtacgaaatgggtccatgtatcctgcgctctttggataccggaggtctccattggctctcctgagaagatggaaccaatcaccaaggtgtctcacattcctagttcccgatgggctctcgtctgctcgttgtgtaatgagaaattcggggcctctattcagtgctccgtgaagaattgccggaccgcattccacgtcacatgcgcttttgaccggggcttagaaatgaaaaccatactggccgagaatgacgaagtcaaattcaagagctattgtcccaaacatagtagtcacagaaagccagaagaatccttgggcaagggagccgcgcaggaaaacggagctcccgagtgctctcccaggaacccactggaaccttttgcctccttggaacagaaccgcgaggaagctcatcgagtcagtgtccgcaaacagaagctgcagcagttggaggacgaattttataccttcgtgaatctgctggacgtggctagggctttgcgcctcccagaagaagtggtggatttcctgtaccagtactggaagctgaaacggaaggtgaattttaataaaccacttataacccctaagaaggacgaggaagataatcttgcaaaaagggaacaggacgttctgtttaggcgcctgcaactgtttacacatctcagacaggatctggaacgtgtgcgcaacttgacctacatggtcactaggagagagaaaattaagaggtctgtgtgtaaagttcaggagcaaatcttcaatctgtatacaaagttgctggaacaggagagagtcagcggcgtgccctcttcttgctcttccagctccctcgagaacatgctgttgtttaactcgccttccgtggggccagatgctccaaagatcgaagacttaaagtggcatagcgcgttctttcgaaaacagatgggaacatccttagttcattctctgaagaaaccacataagcgagaccccctgcaaaatagtcccgggtcagaaggcaagacccttctcaagcaaccagacttgtgcggcagaagagagggcatggtcgtgcctgagagttttctggggctggagaagaccttcgcagaggcgcggctgattagcgcacaacagaaaaacggtgtggtcatgcctgatcatggaaagcggagggacaacagatttcactgtgatttgattaaaggtgatctcaaggacaaaagttttaaacagagccataaaccactcaggtcaactgatgttagtcagaggcatttagataacaccagagcggctacatcacccggggtaggccagtctgcgccgggcactagaaaagaaattgtgccgaagtgcaatggttccctgattaaggtgaattacaatcagaccgccgtgaaggtgcccaccactcccgccagccccgtcaagaactgggggggttttcgcattcctaagaagggagagaggcagcagcagggggaagcccatgacggagcctgtcaccagcactctgattacccctatctgggccttggcagagtgcccgccaaagagcgggctaaatctaaactcaagagcgacaatgagaacgacgggtatgttcctgacgtagagatgagtgacagtgagtccgaggcttcagagaaaaaatgtattcacactagctccacaatcagtagacgcacagacattattagaaggagcattttggcctcttag

SEQ ID NO: 17104 - DNA, 402 bp, synthetic construct
  source 1..402: mol_type = other DNA; note = Synthetic coding sequence
atggcttcagaggacattgcgaagctggccgaaacactcgctaaaacacaagtggccggggggcaacttagtttcaagggcaagtccctaaagctgaatactgctgaggacgccaaggacgtaatcaaagagattgaagacttcgattccctggaggccttgcgacttgaaggaaacactgtcggtgtcgaggctgctagagtgattgccaaggcattggagaagaagagtgaactgaaacgctgtcactggagcgacatgtttaccggtagattaagaacagagatcccacctgccctgatttccctgggagaggggctcataactgccggggcccaactggtggaactggatctcagcgacaacgcttttggtccggacggcgttcaggggttcgagtag

SEQ ID NO: 17105 - DNA, 390 bp, synthetic construct
  source 1..390: mol_type = other DNA; note = Synthetic coding sequence
atgtcacctggaagcggggtgaagagcgaatacatgaagcgctaccaggaacctcggtgggaagagtatggcccctgttatcgtgagctgctgcactaccgactgggaaggcgcctgctggaacaggctcacgctccctggctttgggacgactggggaccagctggcagcagtgaggacagtgcctcttctgagtctagtggtgctggggggccggcaccaagatgcgcacccccatcccctccaccccccgtcgaaccggcgacacaggaagaggcagagcggagagcccgcggagcgcccgaagagcaggacgctgaagctggcgatgccgaggccgaggatgccgaagatgccgccttgcccggtaacgcctggctgcgtacttag

SEQ ID NO: 17106 - DNA, 390 bp, synthetic construct
  source 1..390: mol_type = other DNA; note = Synthetic coding sequence
atggctgagttgatccagaaaaagttacagggggaagttgaaaaatatcaacagctccagaaggacctgagcaagtcaatgtccgggcgccagaaactggaggctcagctcacggaaaacaatatcgtaaaggaggagctagctttactcgatggcagtaacgtggtgtttaaactcctcggcccggtgctcgtaaaacaggagttaggtgaagctagggctactgttggaaagcggctggattacattactgccgaaattaagcggtatgaatcccaactgagggacctggagcgacagagcgaacagcaacgagagacactggcacaactgcagcaggaattccaaagggcccaggccgcgaaggccggagcccccggaaaggcatag

SEQ ID NO: 17107 - DNA, 402 bp, synthetic construct
  source 1..402: mol_type = other DNA; note = Synthetic coding sequence
atggctgaaaagttgataacccagacgtttagccaccataaccagctggcccagaaaacgcgtcgggagaagagggcacgacaagaggccgagaggcgtgaaaaagctgaacgggccgcccggctcgctaaagaggccaagagtgagactagtggtcctcaaataaaggaactaaccgacgaggaggctgagagattacagctcgagatcgatcagaaaaaggacgccgaaaaccacgaggcacagctgaagaatgggtccctggattcccctgggaaacaggacaccgaagaagatgaggaggaagatgaaaaggataagggtaagctgaaacctaatttggggaacggcgctgatctcccaaactatagatggacccagacgctgtccgaattggattag

SEQ ID NO: 17108 - DNA, 2373 bp, synthetic construct
  source 1..2373: mol_type = other DNA; note = Synthetic coding sequence
atggggacccgtaagaaggtacacgcctttgttcgcgtgaaaccgactgacgacttcgcacacgaaatgattcggtacggagacgacaagagaagtatcgacatccacctcaagaaagatatcagaagaggcgtggtgaacaatcagcaaacggactggagctttaagctggacggagttctccatgatgccagtcaggacctggtttatgaaaccgtcgccaaggatgtcgtttctcaggccctggacggatataacggtaccattatgtgctatggccagacaggcgctggcaagacgtacacgatgatgggcgctacagagaattataagcatcgagggatcctgccgagagctctgcagcaggtgttcagaatgattgaggaaaggccaacgcacgcgattacagtccgggttagttatttagagatctataacgaaagcctgttcgacctgctctcaactctaccttatgtcggccccagcgtcaccccaatgaccattgtggaaaacccccagggggtattcattaaagggttgtccgtacatttaaccagccaggaggaagatgcgttcagtttgttgtttgaaggggagacaaacaggattattgccagtcataccatgaataagaatagcagtaggtctcactgcatattcacaatctatcttgaggctcacagtcggacgcttagtgaggaaaagtacattacttctaaaattaacttagttgacctcgccggatccgagcggttgggtaaatccggctccgaagggcaggtgctcaaggaggccacctatattaacaagtcactgagttttctggagcaagcgattatcgcacttggggatcagaaaagagatcatatcccttttaggcagtgtaagctaacccacgcacttaaggactcactgggcggcaactgtaacatggtcctggtgaccaacatttacggggaggccgcccagctagaagaaactctgtcttcactaaggttcgcatctagaatgaagttagtaactaccgagcctgcaattaatgaaaaatatgacgcagagcgcatggtgaaaaatcttgaaaaggagctggcactgctaaaacaggagctcgccatccatgattctctgactaaccgcacattcgtgacctacgatcctatggacgagatccagatcgcagaaattaacagtcaggttcggcggtatttagaaggcaccctggacgagattgacattatcagcctgcgtcaaattaaggaagtattcaaccagtttagggttgtgcttagccagcaagagcaagaagttgaaagcactctgcggaggaagtacacacttatcgaccggaatgactttgccgccatttcagcgatacaaaaagcaggcctggtggacgtggatggccatctcgtgggggagccggaagggcagaatttcggtttgggcgtggctcctttttcaacgaagccaggaaagaaagccaaaagcaagaaaaccttcaaggaaccactgagctcactggcccggaaagagggcgctagctcacccgtgaacggtaaagatctcgactatgtgtcgacatctaaaactcagttggtacctagttccaaagatggggacgtgaaggatatgctgagtcgtgaccgcgagaccagctctattgaacctctcccgtcagactcccctaaagaagagctgagaccaatccgaccggatacaccacctagcaagcccgtggctttcgaagaattcaagaacgagcaagggtccgaaatcaatagaatatttaaagagaataaaagtattcttaacgagagacggaaacgggccagcgaaactacacagcacatcaatgccataaagagggagatagacgtcacaaaagaggcactaaactttcagaagtcacttcgcgaaaagcagggcaagtacgagaacaagggcctgatgattattgacgaagaagaattcctgttgatcctgaagctcaaggatctgaaaaaacaatacaggagtgaatatcaagacctccgtgatctgcgcgccgagattcagtattgtcagcatctggttgatcagtgccggcacaggctgctcatggagttcgatatctggtacaacgagtccttcgtgatcccagaagatatgcagatggccctgaagcctggcggatcaattcgaccaggcatggtgcctgtgaaccgcatcgtgtccctcggtgaggatgatcaggacaagtttagtcagttgcagcaacgggtgctgcccgaaggtccagactctatatccttctacaacgccaaggtgaagatcgagcagaaacataactacctgaaaaccatgatgggcctccaacaggcgcatcggaaatag

SEQ ID NO: 17109 - DNA, 1356 bp, synthetic construct
  source 1..1356: mol_type = other DNA; note = Synthetic coding sequence
atgtacggcgctcctggtgccccagcacagtctgccagcgtgactgtagttcggtcgctgcggcgcccccctccccaggctacaggggtttcgtttatgaacaaccagaagcagcaaaagcccaccctgtccgggcagcggttcaaaacaaggaagagagacgagaaggaacggttcgatccaacgcagttccaggattgtatcattcagggtttaactgaaaccgggactgacctagaagcagtagcgaaatttctcgacgcctcaggagcaaaacttgattatcgcaggtatgccgagaccctgttcgatattctcgtcgctggcggcatgcttgctccaggtgggacattggccgacgacatgatgcggacagacgtctgtgtatttgcggcgcaggaagaccttgagaccatgcaggccttcgcccaggttttcaataaactcatccggaggtataagtacctggagaagggctttgaagatgaagtaaaaaaattattactgttcctgaaaggattcagcgagtcagaacgcaacaagcttgccatgctgactggggtgctactggctaatgggacactcaatgctagcatcctcaactctctttataatgaaaatctggtcaaagaaggtgtgagtgccgccttcgctgtgaagctgttcaaatcctggatcaatgaaaaggacataaacgccgtcgctgccagcctgcggaaggtgtctatggacaaccggctaatggagctgtttcctgcgaataaacagagcgtggaacacttcaccaagtatttcaccgaagccggcctgaaggagctgtcggaatacgtcagaaaccagcaaaccatcggggctaggaaagagctgcagaaggaactccaggagcagatgagccggggcgacccattcaaggacattatcctgtacgtgaaggaagaaatgaagaagaataatatccctgagccggttgtgattggtatcgtgtggtccagtgtgatgagcacagttgagtggaacaaaaaggaagaactcgtggcagagcaggcaataaaacacctcaaacagtattctcccctgctcgcagcatttaccactcaggggcagtccgagttgacactgttactgaagattcaggaatattgttacgataatatacattttatgaaagcctttcagaaaattgtcgtgttgttctacaaagccgaggtactgagcgaagagcctatcctcaagtggtacaaagatgcgcatgttgcaaagggaaagtccgtcttcctggaacaaatgaaaaagttcgtcgaatggctgaagaacgctgaggaggaaagcgaatcagaagccgaagagggtgattag

SEQ ID NO: 17110 - DNA, 948 bp, synthetic construct
  source 1..948: mol_type = other DNA; note = Synthetic coding sequence
atggcgggaggtgctcgcgaagtgcttacattgcaactgggacatttcgccggattcgtgggggcgcactggtggaaccagcaggacgctgccctaggaagagctaccgatagcaaagagcctcctggagagctgtgccccgatgtcctgtacaggaccggtcggaccctccacggccaggaaacatacacgccgcgtctgatcctgatggacttgaaggggagtctgagctctctgaaggaagagggcggcttgtacagggacaagcagttagatgctgctattgcttggcaaggcaaactgacgacacataaggaggagctgtatcccaaaaacccttatctccaggacttcttatccgctgagggtgttctaagtagcgatggcgtgtggcgcgtcaagtctattccaaacgggaaggggtccagcccgctccctaccgccaccactccgaaaccactgattcctacagaggcatctatcagagtgtggtcagactttttacgagttcatctgcacccccgctcaatatgtatgatccagaagtacaatcacgatggagaggctggaaggctggaggcattcgggcagggagaaagcgtgttaaaggaaccaaaataccaggaggagctcgaagataggctgcacttttacgtagaggaatgcgattaccttcaggtcgtagcctggcagtgcgccctgcaggggggaagctcaagccaccccgctaactacctctcttccctgacccctgcccagggttttcagatcctctgcgatttacatgatggtttctcgggggtgggcgcaaaggccgccgaactgctccaggatgagtacagtggcaggggtatcattacttggggcctcctgccaggtccctaccatcgtggggtgagcggaacatggcgcagcaaacatagcaacccaattgggcgtgtcgcctag

SEQ ID NO: 17111 - DNA, 285 bp, synthetic construct
  source 1..285: mol_type = other DNA; note = Synthetic coding sequence
tgcacgagctcgtgtacaccaagctgttgtcaacagtcgtcatgccagcccgcctgttgcacctcctctccttgccagcaggcctgctgtgtacctgtatgctgtaagaccgtatgctgtaagccctcttcctgtcagcctgcttgttgcatcagttcgccatgtcagcagagctgctgtgtgccggtctgctgcaagccaatctgctgtgtccctccagcgtgctgcactacgagctgctgccggccttcttcttcagtctctctcctctgtagacccgtttag

SEQ ID NO: 17112 - DNA, 1221 bp, synthetic construct
  source 1..1221: mol_type = other DNA; note = Synthetic coding sequence
atggccgccaacctctcccggaatggcccggcgctgcaggaggcctacgtccgagttgtaacagaaaagtcacctaccgactgggccctgtttacctacgaaggaaactctaacgacatcagagtggcaggaactggggaagggggactggaagaaatggttgaggagttgaattctggcaaggtgatgtacgctttctgtagggtcaaggatcctaactctggccttccaaaatttgtcttgatcaattggggtgcgcatgtgactataaatgcccgcgctgaagaagatgtggagcctgagtgtatcatggaaaaggtcgccaaggcctcaggggcaaactattcattccacaaagaaagtggccgattccaggacgtgggaccccaggccccagtcggctccgtttaccagaagacaaatgcagtgtcagaaattaagcgggttggcaaggacagtttctgggcgaaagcggaaaaggaggaagagaataggcgtcttgaggaaaaacgcagagccgaagaagcccagcgccagcttgagcaggagcgacgggagcgagagctccgtgaggcagccagaagagagcagaggtaccaagaacagggcggcgaggcctccccgcagtccagaacctgggagcaacagcaagaggtggtttcccggaacaggaatgagcaagagtctgccgtccatccacgcgagatcttcaaacagaaggagcgggcgatgagcacgacttccatttcctcgccgcagcccggaaagctcagaagtccattcttacagaaacaactgacgcagcctgagactcattttggtagagagccggccgccgccattagcagaccgcgggcggatctacccgccgaggaaccagctcctagcacccccccatgcctggtgcaggcagaggaggaagcagtgtatgaggagccccctgagcaggagactttttacgagcaacctccccttgtgcagcagcagggggccggatccgaacatattgaccaccatatacagggacaaggactatcaggccagggcctgtgcgctagggcattgtacgattatcaggctgcagacgatacagagattagctttgaccctgagaatctgataaccggcattgaggtgatcgacgagggatggtggcgggggtacggcccagacggccacttcggcatgttccccgccaactatgtggaattgatcgaatag

SEQ ID NO: 17113 - DNA, 981 bp, synthetic construct
  source 1..981: mol_type = other DNA; note = Synthetic coding sequence
atgccccatcttccgctggctagcttccggcccccattctggggcctgcgccacagtcgagggctcccccgattccactccgtgagcactcagtctgagccacatggcagtcccatttctcgccgaaaccgggaggcaaagcagaagcgcctgcgcgaaaaacaggccaccctggaggcagaaatagctggtgaaagcaagagccctgctgagagcattaaagcctggcgtccaaaggaactcgtgctatacgagatacctaccaagccaggagaaaaaaaagacgtttcaggacccttgcctcctgcatactcccctaggtatgtggaagcagcctggtatccatggtgggtccgtgagggcttcttcaagcctgaatatcaagctcggctcccccaggcaacaggggaaaccttctctatgtgcattccaccccctaacgttaccgggagcctccatatagggcacgccttgaccgtcgctatacaggacgcactcgtcaggtggcatcggatgcggggagaccaggtcctctgggttcccgggagcgatcatgccggcatcgcaacacaagccgttgtggagaaacagttgtggaaagagcgtggggttcgacggcatgaactgagcagagaagcatttcttagagaagtgtggcagtggaaggaggccaagggaggcgaaatctgcgaacagttgagggcactgggggcgtctctggactgggaccgtgagtgcttcactatggatgtgggctcctccgtagcagttactgaagccttcgtacgcctttataaagccggcctgctatacagaaaccatcagttggtgaattggtcttgtgcacttcgctccgctatctcagatatcgaagtggaaaatcggcccctccccggccatactcagctgcggctgcctggttgtcccacccccgtctcattcggtctcctgttcagcgttgcgttccccgttgacggttag

SEQ ID NO: 17114 - DNA, 684 bp, synthetic construct
  source 1..684: mol_type = other DNA; note = Synthetic coding sequence
atgctgtgttgggggtactggagtttaggtcaacctggcatttccacaaacctacaaggcatcgtggcagaacctcaggtttgcggcttcattagtgaccgcagcgtgaaggaggtggcctgcgggggaaaccactctgtgtttttattagaagatggcgaggtgtacacctgtggacttaataccaaggggcaactcggtcacgaaagggaaggcaacaagcctgaacagatcggcgcactcgcagaccagcacataatacatgtggcttgtggcgagtcacacagtcttgctctgagtgacagaggccagctgttctcttggggcgcaggaagcgatggacaattgggacttatgaccacagaggactctgttgcggtacccaggctgattcagaaactgaatcagcagactatcctacaagtgtcttgtggcaattggcattgcctcgcccttgccgccgatggacagttctttacgtggggcaagaatagccacggccagctgggactgggaaaggaattcccaagtcaggcctccccgcagagagtacggtccttggaaggcatccctcttgcacaagttgctgccggcggggcacactcattcgccctctctttatccggggccgtgttcgggtgggggatgaataatgcaggccaactgggactgtctgatgagtag

SEQ ID NO: 17115 - DNA, 624 bp, synthetic construct
  source 1..624: mol_type = other DNA; note = Synthetic coding sequence
atgtcttcacctttggcatctctgtcaaagactcggaaggtccctcttccctctgagccaatgaatccaggacgtcgggggatacggatctatggagatgtgcctgcaagccacgattcagagttaatggcgtttatgacccgaaaattatgggatctggaacagcaggtgaaagcccaaaccgatgagatcctctcgaaggaccagaaaatcgcagcgctcgaggatctagtgcagaccctgaggcctcaccccgccgaggccacgttgcagaggcaggaagagttggagaccatgtgcgtgcagctgcagaggcaagtgcgtgaaatggagagattcctgagcgactatggcctgcagtgggtgggcgaacctatggaccaagaagactctgagtccaaaaccgtcagtgaacatggagagcgcgactggatgactgcaaagaagttttggaagcccggtgactcactggctccacctgaagtggattttgacagactgctggctagtttgcaggatctctctgagctggtggttgagggcgacactcaggtgacccctgttccaggaggagcaaggctcaggacattggaacctatacctttgaaactctaccgaaattag

SEQ ID NO: 17116 - DNA, 717 bp, synthetic construct
  source 1..717: mol_type = other DNA; note = Synthetic coding sequence
atgacagaggatagccagcgcaacttccgctctgtgtattatgagaaagtcggattcagaggcgtggaagagaagaaatccctggagatcctcttgaaagatgatcggctgggaatcctgcccccgcaccacgagagtcacgccaaagtgatgatgtataggaaagaacagtatttagacgtcctgcacgctctgaaagtagtgagattcgtcagcgatgcaacaccccaagctgaggtgtatttgagaatgtatcaacttgaatccggcaagctgcctaggagtccctcctttcccctggagcctgatgatgaggtattcctcgcgattgccaaggctatggaggagatggtggaggactccgtcgattgctactggattaccagacgcttcgtcaaccagttgaacactaaatacagggatagtttgccccagcttccaaaggctttcgagcagtacctcaatctggaggatggtcggctccttacacacctccggatgtgcagtgcagcccctaagttaccgtacgatttatggtttaagagatgctttgcaggctgtctgcccgagtccagtcttcagagggtgtgggataaggtcgtcagcggcagttgtaagatcctggtgttcgtggccgtggagattctcttaaccttcaagataaaagtcatggccctgaactcggctgagaaaattacaaaattcctggagaactag

SEQ ID NO: 17117 - DNA, 369 bp, synthetic construct
  source 1..369: mol_type = other DNA; note = Synthetic coding sequence
gtgagggagttggaagcagaactggatgccgaacagaaaaaacatgcagaggccctaaagggcgtacggaagcacgaacgtcgtgtgaaagagttggcatatcaggcagaggaggatcgcaagaatctggcacggatgcaggacctggtggataaactgcagtccaaagtgaaatcatacaagagacaatttgaggaggcggagcagcaggccaatacaaaccttgcaaaatataggaaagcccagcatgaactggatgacgccgaggaaagggctgatatggcggagacccaagccaacaagctcagggctcgaactcgggacgcactgggccctaagctgagcctgtcaccacagcataaagagtag

SEQ ID NO: 17118 - DNA, 483 bp, synthetic construct
  source 1..483: mol_type = other DNA; note = Synthetic coding sequence
tgagagagtttagtggggctgcaagaaggcaaatccactgaacagggtaaccatgaccagctgaaagaactctacagtgccggcaaccttaccgtgctggccacagaccccctgctgcaccaagacccagtacagctcgatttccatttcagattgacctcccagacaagcgctcactggcatggcctgttgtgtgaccgccgactgttcctcgatattccttaccaggcactcgatcagggaaaccgtgagtcacttaccgctacgctcgagtacgtggaggagaaaacgaatgtagattctgtcttcgtcaatttccagaacgataggaacgaccggggagcactcctgcgggcctttagttatatgggcttcgaggtcgtcaggcctgaccatccggccctgccacctctggataacgtgattttcatggtgtatcccctagagcgggacgtgggccatctgccctccgaacccccttag

SEQ ID NO: 17119 - DNA, 102 bp, synthetic construct
  source 1..102: mol_type = other DNA; note = Synthetic coding sequence
atgtctgtcacctacgacgatagcgtgggcgtcgaagtttcgtcagactcgttttgggaggtgggcaattacaagagaacagtgaagcggattgacgattag

SEQ ID NO: 17120 - DNA, 402 bp, synthetic construct
  source 1..402: mol_type = other DNA; note = Synthetic coding sequence
atgtggagtctgaccgcgagcgagggggaatcaaccacagctcacttcttcctgggagcaggagacgaagggctgggcacccgcggaatcggaatgcgtcccgaagaatccgacagcgaactgctggaagatgaggaggacgaggtgcccccagagccccaaatcatagtaggcatttgcgcaatgaccaagaagtctaaaagtaaaccgatgactcagatcctcgagaggctctgccggtttgattatctcacagtcgtcattctgggggaagacgtgattttgaacgagccggtggagaattggccaagctgtcactgcctgatatccttccatagcaaaggcttcccacttgataaggcagtggcttacagtaaactgcgaaatccttttcttatttag

SEQ ID NO: 17121 - DNA, 939 bp, synthetic construct
  source 1..939: mol_type = other DNA; note = Synthetic coding sequence
atggcccaaccataccctccggcccagtaccccccccctccgcagaacgggattcccgctgagtatgcccctcctcctccccaccccacacaggattacagtgggcaaacccccgtccccactgagcacggcatgaccttatacacccctgctcaaacccacccagaacagccaggaagcgaagccagtacccagcccatcgctgggacccagactgtgcctcagaccgatgaggcagcccagactgattctcagcccctgcatccttctgaccctaccgaaaaacagcagccaaaacgactgcacgtctctaacatcccctttagattccgcgatcctgacctcagacagatgtttgggcagtttgggaaaattctagacgtggagataattttcaatgagcgtggttctaagggcttcggcttcgtgactttcgagacctcaagcgacgctgaccgtgccagagagaaactgaatggcacaatcgtcgagggtcgaaagatcgaggtgaacaacgccaccgctcgtgtcatgactaacaaaaagacgggcaatccatataccaacggctggaaactaaacccagttgttggcgcggtgtacgggccggaattttatgcagtgacaggcttcccctaccctacaactgggactgccgtcgcataccgtggggcccacctgagagggcggggccgagcagtctataatacctttcgtgccgcaccaccacctccaccgattcctacctacggtgcagtcgtttaccaggatggattttacggggctgagatctacggggggtacgcagcataccggtacgcacagcccgcggctgctgccgccgcgtattccgacagctatggccgcgtttacgcagccgctgacccctatcaccacactattggaccagccgcaacatattctataggcacgatgtag

SEQ ID NO: 17122 - DNA, 1308 bp, synthetic construct
  source 1..1308: mol_type = other DNA; note = Synthetic coding sequence
taaagtatcctgaacagtaacgagcacctcctcaaggaaaaagagctgcttatcgacaaacaacggaagcacatctcccagctggagcagaaggttcgggaaagtgagctacaggtccattccgccctgctgggcagaccggctccattcggggacgtgtgccttctgcggctccaagagctccagcgggagaacaccttccttcgcgctcagttcgcacaaaaaacagaagccctctcccgcgaaaaaattgacttagaaaagaaactgagtgcctccgaagtcgaggtccaattgatcagggaatcgctaaaggttgcacttcaaaagcattccgaagaggtgaagaaacaggaggagcgtgttaaaggtcgggataagcatattaacaatcttaagaagaagtgtcagaaggagtctgagcagaaccgggagaaacagcagcggatagaaactttagagagataccttgctgacctacccactctagaagatcaccaaaagcagtcccagcagctgaaagattcagagctgaagtctaccgagctgcaagaaaaggtcacagaactggagtctctgctcgaggagacgcaggcaatctgcagggaaaaggagatccagcttgaatctttacggcagagggaggctgagttctcctctgctggacactcccttcaagacaaacagtctgtggaggagacaagcggcgaggggcccgaggtggaaatggagtcatggcagaaacgctacgactctctgcagaaaatcgtggaaaagcagcagcagaaaatggatcagctgaggagccaagttcaaagcctggaacaggaagttgctcaagaggaaggaacaagccaggcactgcgggaagaagcccaaagaagagattctgctctgcaacagctgaggacggctgtcaaggaattgagtgtccagaaccaggacttaattgaaaagaacttgactctccaggagcacttgcggcaggctcagcctggaagccctccgagccctgatacagcgcagctagccttagagcttcaccaggaactcgccagttgtctccaggacctgcaggccgtgtgtagcattgtgacacaaagagcccaggggcatgatccgaatctgagcttgctgttggggatccacagccagcatcccgaaacccagctagatctgcaaaaacctgacgttattaagaggaagctcgaagaagtgcagcagctgcgcagagacattgaagatctacgaactacgatgtctgaccgatatgcccaggatatgggggagaattgcgttactcagtag

SEQ ID NO: 17123 - DNA, 474 bp, synthetic construct
  source 1..474: mol_type = other DNA; note = Synthetic coding sequence
atggagcttcggtgcggcggattactgttttcaagccgatttgactccgggaacctggcccacgtggagaaagtggaaagcctcagctcagacggtgagggagttggcggcggcgcctctgctcttacctctgggatcgcctcaagcccagattatgaattcaacgtctggacgcggcctgactgcgcagaaaccgaatttgaaaatggaaatagatcctggttttacttctctgtgagaggcggcatgcccggtaaactgataaagatcaatattatgaatatgaacaaacagtcaaagctttactctcaaggtatggcaccctttgttcgaacccttcccacccgcccccgatgggaaagaataagggataggcccacgttcgaaatgaccgaaacgcaattcgtgctctcttttgtacacagatttgtcgaaggaagaggcgccacaacattcttcgctttctgttactag

SEQ ID NO: 17124 - DNA, 1620 bp, synthetic construct
  source 1..1620: mol_type = other DNA; note = Synthetic coding sequence
atggccacaagcgcccccctcagatctcttgaagaggaggtgacatgttctatctgcctcgactacctgcgcgacccagtgacaatcgattgcgggcatgtgttttgtcgatcatgcactacagatgtgaggcctatttcaggttcaaggccagtgtgtcccctgtgcaaaaaaccctttaaaaaagaaaacatcaggccggtgtggcaactggctagtctggtggagaacattgaacgcctgaaggtagacaaaggcaggcaacctggtgaggtcacacgcgagcagcaagatgcgaaattatgcgagcggcacagagagaagctgcactactactgcgaagatgatgggaaactcttatgtgttatgtgtagggagagcagagaacatcgaccacacacagctgtcctcatggagaaggctgcacagccccaccgcgagaaaatccttaaccatctgtccacccttcgccgcgaccgggacaagatacaggggttccaggctaagggagaagcagacattctggcagccctgaagaagttacaggatcaaaggcagtacatagttgcggagttcgagcaggggcaccagtttctgagagagagggaggagcacctgctcgagcagctagccaagttggagcaggaactaaccgaggggcgcgagaaattcaaatctcgcggagtcggagagctagccagactggctctggtcataagcgagctggaaggcaaagcccagcagcccgcagccgaactcatgcaggatacccgggattttctgaatcgatacccccggaaaaagttttgggttggaaagccaatagcacgggtcgtaaagaagaaaaccggagagttctctgacaaactcctaagcttacaaagaggactgagagaatttcaggggaagctgctccgagatctagaatacaaaacagtgagcgttacacttgaccctcagagtgcctcaggataccttcaattgtcagaggactggaaatgtgtcacatataccagcttgtacaagagtgcctacctccatccgcaacagtttgactgcgaacctggggtccttggaagtaaaggtttcacttggggcaaggtgtactgggaggtggaggtggagcgggagggctggtccgaggacgaggaagagggtgatgaggaggaagagggcgaggaagaggaagaagaggaagaggcaggttatggcgacgggtatgacgactgggagacagatgaggatgaagaatccttgggcgatgaagaagaggaagaagaggaggaagaggaggaagtattggaaagttgcatggtcggagtggcaagagatagcgtaaaaagaaagggagatctcagtctccgccccgaagatggcgtgtgggctctgcggttgtcttcaagcggcatctgggccaatacaagcccagaggccgagttattcccagcactccggccacgccgggttgggattgccctagactacgaaggcgggaccgtcacttttaccaatgccgagtctcaagaactgatttatactttcaccgccactttcacaaggcgtctcgtgcctttcctgtggctgaagtggcccggaacacgcctcctgctacgtccgtag

SEQ ID NO: 17125 - DNA, 6141 bp, synthetic construct
  source 1..6141: mol_type = other DNA; note = Synthetic coding sequence
atggacgaggttgaacaggaccagcacgaggcacgcctgaaggagctttttgattccttcgataccacgggcactggaagtctgggccaggaggagctgaccgacctttgccatatgttatccttggaggaggtggcgccagtgctacagcaaacactgctgcaggataacctcctgggaagagtgcactttgaccagtttaaagaggccttgattcttatcctgtcccgcaccctgagcaatgaggaacatttccaggagcctgattgttccctggaagctcaacccaaatatgttcggggcggaaagaggtacggacggagatctttaccagaattccaagaaagtgtcgaagagtttccagaggtgacagttattgagccgttagatgaggaggcccgtccctctcacatcccagctggggattgctccgagcattggaaaacacaacgaagcgaggaatacgaggctgagggccagctgcgcttctggaatcccgacgacctcaatgctagccagtcaggttcaagtcccccccaggactggatcgaagaaaagctgcaggaagtatgtgaagatctcggtatcaccagagacggtcacctcaaccggaaaaaacttgtgtcaatatgtgaacagtacgggttgcagaatgtggacggcgaaatgctggaggaagtctttcacaatcttgatcccgatggcacgatgtctgtggaagatttcttctacggactattcaagaatggaaagtccctcaccccgtccgcgtctaccccgtaccgtcaacttaaaaggcatctgagtatgcaaagtttcgatgaatcaggaagaagaaccactacctcttctgcgatgacatcaacaattgggttccgagtgttctcatgtctcgacgatgggatggggcacgcctctgtagagaggattttagatacatggcaagaagaaggcatcgagaattcacaggagatcctgaaagccctggattttagcctcgatgggaacattaacctgactgaactcaccctggctctggaaaatgagttattagttaccaaaaacagtatccaccaggctgcacttgccagtttcaaagccgaaattagacatcttctcgagcgagtggatcaggttgttagggaaaaggaaaaactgcgctcggacctagacaaagctgaaaagttaaagagcctcatggccagtgaggtcgatgatcaccacgccgccatcgaacggaggaatgagtataacctgagaaaactcgatgaagagtacaaagaacgaatcgccgctttgaagaatgaactcagaaaggagcgcgaacagatattacagcaggccggaaagcagcggctagaacttgaacaggagatagaaaaagcaaagacagaagagaactacatcagagacagactggctctgtcgctgaaggagaattcccgactcgagaatgaactgttggagaatgcagaaaaattggctgaatatgagaacctgactaacaaactccaaagaaacttggagaatgtcctcgccgaaaaatttggagacctggacccttcctctgcagagttcttcctgcaagaagagcgccttactcagatgaggaatgagtacgagagacagtgccgggttcttcaggatcaggtagacgagctgcagagcgaactggaagagtaccgcgcccaaggcagagtcctgaggttgccactgaaaaactccccatcagaggaggtagaggctaatagcggagggattgaacctgagcacggcctggggtctgaagaatgcaaccctctgaatatgtctatcgaggccgaattggtaatcgagcagatgaaagagcagcaccacagagatatttgttgcctcaggctcgagcttgaggacaaggtgagacactatgaaaaacagctggatgagacggtagtgtcctgtaagaaggcacaggagaatatgaagcagagacatgagaacgaaacccataccctcgagaaacaaatttcagatctgaaaaacgaaatagctgaactgcaggggcaggccgccgtgttgaaagaggcacatcatgaggcgacctgtcgccatgaggaagagaagaagcaactgcaggtgaagctggaggaagaaaagacacacctgcaggaaaagctgagacttcagcacgaaatggagttgaaagcacgcctgacacaagcgcaggcttcctttgaacgcgagcgagaggggttacagtccagcgcctggaccgaagagaaggttcgtggcctcacccaggagcttgagcagtttcaccaagagcaactgacttcactggtagagaagcacacgcttgaaaaggaggaactcagaaaggagttgctggagaagcatcagcgggaactgcaggaaggacgggaaaaaatggaaaccgagtgcaatagaagaacaagccagatcgaggctcagtttcaatccgactgtcaaaaggtaaccgagaggtgtgagtccgcgttgcagagtctggaaggcagataccgccaggagctgaaggacttgcaagaacagcagcgggaggagaagagccaatgggagtttgaaaaggatgagctcacacaagagtgtgccgaggcccaagagctgctgaaggagaccttaaagagggaaaagaccacatcactcgtcctgacgcaggagagagagatgctggaaaagacatataaggagcacttgaattccatggtcgttgaacgacaacagctgctccaggacctagaggatctgcggaatgtctccgaaactcaacagtcgctgttgagcgatcagatcctcgagttgaaaagcagccacaagagagaacttcgggagagggaggaggtgttgtgtcaggctggtgccagtgagcagctcgccagccaacggttagaacgattagaaatggaacacgatcaggagaggcaggagatgatgtcaaaactcctagccatggagaacattcataaggccacatgcgagaccgcggacagggaacgggctgaaatgagcaccgaaatttcaagactgcagagcaaaattaaagaaatgcagcaggctactagcccattgtccatgttacagtcaggctgccaggtgatcggggaggaggaggtcgagggcgacggtgctctatccctcctccagcagggagaacagttgttggaagagaacggagatgtgctgctctcgctacagcgcgctcatgaacaggccgttaaggagaatgtcaagatggcgactgaaatttcaaggcttcagcagcggctgcagaagttggagcctggcttagttatgtctagttgcttggacgagcccgcaacagaatttttcggcaatacagctgaacagacagagcagtttctccaacagaaccggacgaaacaggttgagggcgttacaagacgccatgtgctaagcgacttagaagatgatgaagtaagagatcttgggtcaacaggcacctctagtgtgcaacggcaagaggtgaagatcgaagagagcgaggcctctgtggaagggttttccgaattagaaaactccgaagagacacggactgaaagctgggagctcaaaaaccagattagtcagctgcaggagcaacttatgatgctgtgtgcagactgtgatagagcttcggaaaaaaaacaggacctgctatttgatgtctccgtactaaagaaaaagctaaagatgctcgaacgaatccctgaagcatctcctaagtacaaactgctctatgaggatgtgtcgcgcgagaatgattgcctccaggaagaactgcggatgatggaaactcgctacgacgaggccttggagaataacaaagaactgactgccgaagttttccggctgcaagacgagttgaagaagatggaggaagttacagaaacattcctgagcctggaaaaatcatacgacgaggtgaagattgagaacgaagggctgaatgtactggtactgcgtctgcagggaaagatcgagaaactccaggagagtgtcgtgcagcgctgcgactgttgcttgtgggaggcaagccttgaaaatcttgagatagaacccgacggtaacatactacagctcaaccagacccttgaggaatgcgtgcccagagtgcgaagtgttcatcatgttatcgaggagtgcaaacaggaaaatcagtatctggaaggaaacacccagctcctggagaaggtcaaagcacacgaaatcgcctggctgcatgggactattcaaactcaccaggagcgcccacgagtgcagaaccaagtaattctggaggagaacaccactttgctgggatttcaggataagcattttcagcaccaggccactatcgccgagcttgaactggagaagacaaaactgcaggaattgacacgtaagcttaaggagagagtgaccatcttagtgaagcagaaagatgtgctgtcccatggggagaaagaagaagaattaaaagccatgatgcacgatctgcagattacgtgttcggagatgcagcagaaagtagagctgttgcggtatgagagcgaaaaactgcagcaagagaatagcatcctgagaaatgagattacgacgctgaatgaggaagatagtatctctaatttaaagttaggcaccctcaatggctctcaagaggaaatgtggcaaaagaccgagaccgtaaaacaggagaacgcagccgtccagaaaatggttgaaaacctgaaaaagcagatttcagaactgaagatcaaaaatcagcagctggacctggaaaacaccgaactcagtcagaaaaactcccagaatcaagagaagttgcaagagctcaaccagcgtctgactgagatgctgtgccagaaggagaaggaaccggggaattctgcattggaagagcgggagcaggaaaaatttaacttgaaagaggagctcgagcgatgcaaggtccagtcaagtacactcgtgagctcactggaggccgagctctccgaggtcaagattcagacacacattgtacagcaagagaatcacctactcaaggatgagctcgagaagatgaaacaactgcataggtgtccagatctgtctgatttccagcagaagatttcatccgtgctgagctataacgaaaagctactcaaagaaaaagaagcattatcagaagagctgaactcgtgtgtggacaagctggccaagtcctcgctgctggagcatagaatcgctactatgaagcaggagcagaagtcctgggaacatcaaagtgcctcccttaaatcacagctcgtcgccagtcaggaaaaagtccaaaatttagaggacaccgtgcagaacgtgaacctgcagatgtcgaggatgaagagcgatctacgggtgacccaacaggagaaagaggctctaaaacaggaggtgatgagcctacataaacagctgcagaatgcgggcggtaagtcatgggccccggaaatagcaactcatccatccggcctacataatcaacagaagcggctgagctgggacaagctcgatcatcttatgaacgaagagcagcaacttctgtggcaagagaatgaacgactacagaccatggtgcagaacacaaaggccgaactgacgcattcacgagagaaggttcgccagcttgaatcgaacctgctcccgaagcatcagaaacatttgaaccccagcggcaccatgaatccaacagaacaggagaaactttctctgaagagagaatgtgaccaattccagaaggaacagagtcctgcaaatcgaaaagtctcccaaatgaatagccttgaacaggagctggagacaatccatctggagaatgaaggcctgaaaaagaagcaggtcaagctggatgagcagctgatggagatgcagcatttgcggtcgaccgctacaccatccccaagcccgcatgcttgggatttgcagctcctccaacaacaagcctgccccatggtgcctagggaacagttccttcagttacagagacagttgcttcaagctgagaggatcaaccagcacctccaggaagaactggaaaatcgcacatctgagaccaacacaccccaggctctgctgcccgagcaaagagctgtgcacgccgattcatatcgcaggatcggccacctgtag

SEQ ID NO: 17126 - DNA, 1203 bp, synthetic construct
  source 1..1203: mol_type = other DNA; note = Synthetic coding sequence
atggctggggagaaccaccagtggcagggctccattctatacaatatgttgatgtccgccaagcagactcgagctgcacctgaggctccagagacgaggctggtcgaccaatgttggggatgcagttgcggcgacgagcctggcgtgggtcgggaaggactactgggaggtaggaatgtagcactgctctatcgctgttgtttctgcgggaaggatcatcctcggcaaggctcaattctttactccatgctcacctctgcgaaacagacttacgctgcccctaaagcaccggaggccacacttggcccctgctggggctgttcctgcggatcagatccaggcgtcggcagggcaggtcttcctggtgggcgacccgtggctctcttgtacaggtgctgcttctgcggagaagatcaccctcgacaaggatccatactgtacagtctgttgacttcgagcaaacagactcatgttgcccccgcagcgcccgaggccaggccaggaggagcctggtgggatcgaagttacttcgctcaacggccaggcggcaaggaagcccttcccggcggacgcgccacggcactgctgtaccgctgctgcttctgcggagaagatcatccccagcagggcagcacgctgtattgcgtgcccacatccaccaatcaagcccaggccgctcccgaggaaagacccagggccccctggtgggatacttcatctggtgcactgcggcctgtggccctgaagagcccccaagtggtctgcgaggctgctagtgcaggcttgctgaagacactgcgatttgtgaaatacctgccctgtttccaggtgttgccattggatcagcaattggtattggtacgcaactgttgggcatcactcctgatgctggaactggctcaggaccgactgcagtttgaaaccgtggaagtgagcgagccctcgatgctccagaagattctgaccacacgccgtcgcgaaactggcgggaatgagcctttgcctgtgcccaccttgcaacaccacttagctccgcctgcagaggcacgtaaggtgccatctgcttcccaagttcaagcgatcaaatgctttctgtccaagtgttggtccctaaacatctcaactaaggagtatgcttatctcaagggcactgtgttgtttaaccccgggaagggtaaagagaacgactgtaaccatcactag

SEQ ID NO: 17127 - DNA, 627 bp, synthetic construct
  source 1..627: mol_type = other DNA; note = Synthetic coding sequence
atgaaacagcttgaagaccacgaagccttcgaaactagttccctgattgggcactccgcccgagtttatgcgttgtactataaggatggattgttgtgtaccgggtctgacgatctgagtgcaaagctgtgggatgtaagcaccgggcaatgcgtgtacggtattcagacccatacgtgcgctgctgttaagtttgatgaacagaagctggttacaggaagttttgataatacagttgcctgttgggaatggagctcaggggcgagaacccagcacttccgcggacatactggcgccgtcttttctgtggactataatgacgagttggatatcttggtgtctggatcagcagactttacagttaaggtgtgggcactatccgcagggacctgtctgaatacactgaccggacacacagagtgggtgaccaaggtggtgctccaaaagtgtaaagtgaagtctctccttcattctcccggagactacattctcctttccgcagacaagtatgagattaagatctggccaatcggaagagagatcaactgtaagtgtctgaagaccttgtccgtgagcgaagatagatcaatatgtttgcaacctcgactgcattttgacggcaaatag

SEQ ID NO: 17128 - DNA, 639 bp, synthetic construct
  source 1..639: mol_type = other DNA; note = Synthetic coding sequence
atgttcggagtcaccaagttcggtgataacatcgaagatgagtggttcattgtatacgtcattaaacagattacaaaggagtttcccgaattagtagcccgcattgaggacaacgatggggaatttctgcttatcgaggccgccgattttctccctaagtggcttgatcccgagaactccacaaatagagtgttcttttgtcacggggaactctgtatcatcccagcgcctcgcaagagcggggctgaaagctggctcccaactacccctcctacgattccgcaagcactcaacataattaccgcccattctgaaaaaatcttggcctctgagtctattcgcgccgccgttaaccgacgcatccgcggttaccccgagaaaatccaggccagcctccaccgggcacactgtttcctgccggcaggtattgtcgccgtgcttaagcagagaccccgcttggtggcagccgccgtacaggccttctatttgcgcgatccgattgacctgagagcttgtagggtcttcaaaactttcctgcctgagaccagaataatgacatcagttacattcaccaagtgcctctacgcgcaactggtgcagcagagattcgtgcctgatcgtagatctggttatcggtag

SEQ ID NO: 17129 - DNA, 474 bp, synthetic construct
  source 1..474: mol_type = other DNA; note = Synthetic coding sequence
atggcaacgagcgctccactgcgcagcctagaagaagaggtgacgtgcagtatttgtctggattatcttcgagatcccgtgacaattgactgcggacacgtcttttgtagatcatgtacaaccgacgtgcgaccaatcagtgggagccgccctgtctgtcccctatgcaagaagccctttaagaaggagaacataaggccagtctggcagttagcatcccttgtggagaacatcgagaggcttaaagtagataaaggccggcagccaggagaggtgaccagagagcagcaggacgcgaaactgtgcgaacgccaccgcgagaagctgcattattattgcgaggacgacggaaaattgctgtgtgttatgtgtagggaaagtagagaacacagaccccacaccgcggtcttgatggagaaagctgcccaaccacacagggagaagattctcaaccacttgagcaccctgagatag

SEQ ID NO: 17130 - DNA, 4773 bp, synthetic construct
  source 1..4773: mol_type = other DNA; note = Synthetic coding sequence
atgtccgcgacatcctggtttctggtgtcctcgtccggagcccgccaccggttgcctagggagctcatctttgtgggccgagaggaatgtgagctgatgcttcaatcaaggtctgttgacaagcagcacgccgtcataaattatgatcaggaccgggacgagcactgggtgaaagacttaggctccctcaacgggacattcgttaacgatatgcgaatcccagatcagaaatacgttactctcaaactgaatgacgttattcgctttggctacgactccaacatgtatgtacttgagcgggttcaacaccgagtgccagaggaagccctgaagcacgagaaatacacttctcaactgcaggtgagtgtgaagggcttagctcctaaacgcagtgaggccctgccagaacacactccatactgtgaagcttccaatccgcgacccgagaagggcgaccgccggcctgggaccgaagccgcttcttatcgcactcccctctatggacagccatcttggtggggcgaagatgacgggagtaccttgcctgatgcccagaggcaaggcgaaccctacccagccgaacggcccaaaggcccggttcagcaggacggcgagttgcacgggtttagagctccggctgagcctcagggttgtagctttcggcgcgagccatcttactttgagattcccacaaaggaaactcctcagccaagtcagcctccagaggtcccggctcatgagatgccgacgaaagacgcagaggctggcggcggcggtgcagccccggtggtgcagtctcacgcaagcttcaccatcgagttcgacgactgctccccaggtaaaatgaagatcaaggatcacattactaaattttcactgaggcagcgtcggcccccaggcaaggaggccaccccaggagagatggtgagtgcggaaaccaaggtggctgactggttggttcagaacgacccgagcttactccaccgcgtcggacctggggacgatcgacactctactaagtcagacctcccagttcacaccagaacactgaaaggacacaaacatgaggacggtacgcagtccgactccgaagacccactggccaaggctgcgtcagccgcaggagtacctcttgaggctagcggagagcaagtgagactgcagcgtcagattaaaagagatcctcaggagctcctgcataatcagcaggcttttgtcattgaatttttcgatgaggatacaccacgcaagaagcgatcccaatcattcacacacagtccttcaggagatcctaaagcggacaaaaggcgtggtcccactcccgcagaccgggaccgcccgtcagtgccagccccagtccaggccggtggtagaagttccggacctcagagagccggatcacttaaacgtgaaaaaactgaggagaggctaggttcaccatcccccgcaagcaggacaccagcccgaccttttggcagcgtggggcgacggagtcgactggcacaagatttcatggcacagtgtctccgagagtcaagtcccgcagcgcgtccctcacctgaaaaggtgcctcccgtcctgccggcgcccctaaccccccacggtaccagccctgttggtcctccaaccccaccccctgctcccacggatccacagctcactaaagccaggaaacaagaagaggacgactctctctcagacgccggtacctatacaatcgaaaccgaggcacaggataccgaggtggaagaagcgaggaaaatgatcgaccaggtctttggagtgcttgagtctccagaattatccagagctagtagcgccacatttcggcccgtgatcaggggagatagagacgagtcagacgatggcggtgtagcccagaggatggcgctgctgcaggagtttgcctctcgtccactgggggctgctccacaggccgaacaccaggggctgccggttccgggaagccctggtggccaaaagtgggtgtctagatgggcgagtctcgctgacagctattcggacccaggacttaccgaggatgggctaggtcggcgcggcggcgaaccagaaggaagtttgcctgttagaatgcgaagacgattaccccaattgccttctgaaagagccgattcgccggccggacccgaaagtagccgcagatctgggccgggccctccagagctagattcagagcagccaagtcgcctgtttggacaggaagaactggacccagacagcctgtctgacgcttcaggatccgacgggggcagaggtcccgaacccggggtggagccacaggactcacgaagacggagccctcaagagggacctacctggagccggggtcgccgcagcccacgggcacccggtgaacctactcctgccagcttcttcatcggtgatcagaatggcgatgctgtgctatctaggaaaccactggcggcgcctggtgacggagaggggctgggccagaccgcccagccctctcctccagctagagatggtgtctatgtatcggccaatggccgaatggttattcagcttaggcccggaagaagccccgaacctgacggccctgctcccgcctttttaaggcaggagtcatttaccaaagagcccgcctccggccccccagccccgggcaagcccccacatatttcgagccaccctctgctgcaagacctcgccgccacgcgcgccgcgcgaatggatttccacagtcaagacacccacctcattttgaaggaaacagaaacagcgctggcggctctggaagccaggctactctcaaactcagtggacgcagaatgcgaaggcggatccacacccaggcccccagaagacgctctatcaggagactcagacgtggataccgcaagcaccgttagcctgcggtccgggaagagtgggccgtctcctaccacacctcagccactacgagcccagaaagaaatgtctccatcaccccctgctgcacaggaccccgggggaaccgcactcgtgagtgcccgagagcagtcgtctgagcgccagcatcatccgctgggtcctacggatatggggagaggcgagcctgtgcgccggtcagcaattagacggggccacaggcctcgggggtccctggactggccaagcgaggaaaggggccccgtgctcgcccacctcccctcgtcagatgtgatggcctctaaccacgagacccccgaagcaaccggagccgggagattggggtcacgccggaaacctgctgcccccccaccatcacctgccgccagggaagaacaatcacggagttcagcttccagccagaagggccctcaggctctgacgcgcagcaacagcctctccactcctcgcccaaccagggcctccaggctcagacgggctcgccttggcgatgccagtgacaccgaggccgcagacggcgaaaggggctccctcggcaaccccgaacctgtcggtcgccctgccgccgagcaggccaagaaactgtcccgactggacattttagcgatgccaagaaagcgcgccgggtctttcaccgggacctctgacccggaagccgcgcctgctcggacttcatttagcggtcgatcagtggagctgtgctgtgcgagccgcaagccaactatggcggaggctcgcgctgtcagcaggaaagctgctaacacagccaccacaaccggaccccggcaacccttcagccgtgcccggtcaggcagtgcccgctacacctctaacactaggcggaggcagcaggggagcgattacactagcactagcgaggaagaatacggcagcagacacggatcgcctaagcatacacgtagccacactagcaccgccactcagacccctcgtgctggcagtagcagccgtgccagatcgagagctcctgggcctagggacacagatgacgatgaagaggaacccgacccgtacggctttattgtgcagacagctgaaattgccgaaattgctcgcctgtctcaaacactggttaaggacgtcgccattctcgcccaggaaatccacgacgtggccggcgacggcgacacactggggagcagtgagccagctcactcagcatctctcagtaatatgccctccactcctgcaagtactattagcgccagagaagaacttgtccagagaattccagaagcttccctgaacttccagaaggtgcccccgggatcactaaatagccgagatttcgaccagaatatgaacgattcatgtgaagacgctcttgcaaacaagacccgaccccgcaatagagaggaggtgatcttcgataatttaatgctcaaccctgtgtctcagctcagtcaggccatcagagaaaacactgaacacctagctgaaaagatgaaaatcctctttcaaaatacaggacgagcctgggaggacctggaggcccggatcaacgccgaaaacgaagtgcctatcctcaagacctctaacaaagaaatttctagtatcttgaaggagctcaggcgtgtccagaagcagctcgaggtgataaatgctatcgtggaccccagtggctccctcgacctgctgacagggaatcggtctctcgcatctagcgcccagccagggcttggcaagggacgtgtggctgcccagtctccaccaagcccagcctccgcagaggcgttgctccctgctctacctctgagaaactttccgcagcgcgcatcgtgcggtccaccatctctgccagaccctacattcctacccgatgccgaacggttccttatctag

SEQ ID NO: 17131 - DNA, 1452 bp, synthetic construct
  source 1..1452: mol_type = other DNA; note = Synthetic coding sequence
atgtccggcggaggtcccagcggcggcggcccgggaggctccggacgggcaagaaccagtagttttgccgagcctggtgggggaggaggtggagggggaggaggccctgggggcagcgccagcggccccggaggcacagggggcgggaaagcctctgtaggcgctatgggaggaggagtaggggcatccagtagcggtggcggtcctggtggctccggcggtggtggctccggcggtcccggggccggtacatcctttcctccccctggtgtgaagctcggcagggactccggtaaagtcaccacggtggtggcgactctaggacagggcccagagcgatctcaggaggtggcctacactgacatcaaagtgataggcaacgggtctttcggtgtagtgtatcaggcgagattagctgagacgcgggagctcgtcgcaatcaaaaaggtgctgcaagacaaacggtttaaaaatagagaactccagattatgaggaagctggatcattgcaacatcgtacgcttgaggtactttttctatagcagtggcgagaaaaaggatgaactctatctaaacctcgtgttggaatacgtccccgaaacagtttaccgagtggcacgtcatttcacgaaagccaagttaactatacccattctctatgtgaaggtttacatgtaccagctattccgaagcctagcctacatccacagccagggagtgtgtcatagagacatcaaaccccagaatctactggtcgatcccgacaccgcagttctgaagctttgcgacttcggatctgcaaagcagctggtccggggagaaccaaatgtaagttatatttgcagccgttactacagagcacccgaactaatctttggggcgaccgactatacttctagtatcgatgtgtggtcggccggatgcgtgctggcggaactgttgctggggcagcctatctttccgggcgatagcggggtcgaccagctcgtcgaaattatcaaagtactgggaacacctacgagagaacagatcagggagatgaatcctaactacactgagtttaagtttcctcagatcaaagctcatccctggactaaagtcttcaagtcccgaaccccacctgaagccattgccttatgttcctccctgctggaatatacgccgtcaagcaggttgagccctttggaggcttgcgcccattccttctttgatgagttgcgctgtctgggaacgcagctccccaataacaggcccctgccacctctgttcaatttcagtgctggagaactgtccatccaacctagcctaaatgccatactcattccccctcacttgcgctcccctgccggcaccaccacactcaccccaagttcacaagccctcacagagacacccacaagcagcgattggcaatctaccgatgcaacacctactctaactaacagttcctag

SEQ ID NO: 17132 - DNA, 1389 bp, synthetic construct
  source 1..1389: mol_type = other DNA; note = Synthetic coding sequence
atgggaggcgcagaagcagaaccgtgggggcgcgctcctggacccgcaataggaggtcggagggcaggggacagctgtcctggttggaggagacggtctaggtcaagagggcgaggtcagagactatcccacgggccacggcggcgccctcagttactgaccgctgcccccccccttcaagcacggggcgccttccggagtttcccccacagctggggcgaagacttcctggccagcctcatgttcaagattcagcttgagccactcaaactacgcgcctggacactgaatggatttgtgaaattccggaacaaagaaacttcggctgggcccgtcgcagtgatgggcaaggattactacaagatcctgggtatcccctccggcgctaacgaggacgaaatcaagaaagcctatagaaagatggcattgaagtatcacccagataaaaacaaggagccaaacgcggaggagaaattcaaggagatagcagaggcatatgacgtgctctctgatccaaaaaagagagggctgtacgatcagtacggcgaagaaggtctgaagaccggagggggcactagtggcgggtcatctggctcgttccattatacattccacggagatcctcacgctacctttgcctcattctttggcggctccaaccccttcgatatcttttttgcctcctctagaagcacgagaccgtttagcggatttgaccccgatgatatggatgtagatgaggacgaggatccattcggtgcatttggccgttttggttttaatggcctgagtagaggaccacggcgcgcccctgaaccattgtacccccgtaggaaagtacaggatccaccagtagtccacgaactaagggtctccctcgaggagatctaccatggctccaccaagaggatgaagataactaggagacgcctcaatcctgatggacgaacagtcagaactgaggataagattctgcacattgttattaagaggggctggaaggagggcaccaagattactttccccaaagagggagacgcaacgcccgacaacatacccgcagatattgttttcgtattaaaggacaaaccccatgctcacttccgtagggatggcactaatgtgctgtactcagcacttatatctcttaaggaagccctgtgtgggtgcaccgtcaacatcccgacaatcgacggaagagtcattcccttaccctgcaatgatgtcatcaagcctgggacagtaaaacggttgcgtggagagggcctaccgttccccaaagttccaacacagagaggggacctaatagtagaattcaaagtgcgctttccagacaggttgactccccaaacaagacagattctaaagcagcacctgccttgctcgtag

SEQ ID NO: 17133 - DNA, 279 bp, synthetic construct
  source 1..279: mol_type = other DNA; note = Synthetic coding sequence
gtgtacggagccaaagacattgagttgtctcccgaggcacaggctaagatcgacaggtatacacagcagggatttggcaacctgcctatctgcatggccaagacccatctaagtctgtcacaccaacctgacaaaaaaggagtgccccgagactttatcctccccatttccgatgtgcgcgcttccattggcgcaggcttcatttaccccctggtgggcactcggagctcccccctggctctcgtgggtgagtcacagccaaagcaagtccacccctag

SEQ ID NO: 17134 - DNA, 468 bp, synthetic construct
  source 1..468: mol_type = other DNA; note = Synthetic coding sequence
atgagcgtcacctacgatgacagtgtcggggtggaggtatctagtgatagcttctgggaagtagggaattataagcggaccgtgaagcggattgacgacggccacaggctctgctctgacttgatgaactgcttacacgaaagagccagaatcgagaaagcctacgcacagcaactgaccgagtgggccaggcgctggcgccaactggtcgagaaaggtccccagtatgggactgtggaaaaggcttggatggcctttatgtccgaagcagagagggtctcagaattgcacctggaggtgaaggcgtctctcatgaacgacgactttgagaaaattaaaaattggcagaaagaagcatttcacaagcagatgatgggcggttttaaggagaccaaggaggctgaggacgggttccggaaggctcagaagccctgggcaaagaaattgaaggaagttcacttatcctag

SEQ ID NO: 17135 - DNA, 483 bp, synthetic construct
  source 1..483: mol_type = other DNA; note = Synthetic coding sequence
atggaggccgaaaggccccaggaggaggaagacggggaacaagggccacctcaggatgaagagggttggccccctccgaattcaaccacccgaccatggcgcagcgctcctccctcccccccacccccggggacgagacacaccgcgctcggcccccgctctgcatccctgctgtctttgcagacggaattgctgcttgatctggtggcggaggcccaatctcgccgcctcgaggagcaaagggcgacattttatacgcctcaaaatccaagctccctagcaccggcccccctgcggcctctggaggacagggagcagctgtattcgacaatccttagtcaccagtgtcagaggatggaagcacagcggagcgaacccccactgccaccaggaggacaagaactgctggagctgctgctgcgggtgcaaggcggcggaagaatggaggaacaacggtcacgacctcctactcacacttgctag

SEQ ID NO: 17136 - DNA, 660 bp, synthetic construct
  source 1..660: mol_type = other DNA; note = Synthetic coding sequence
atggaaccctcggcacagcagctccaactcgccgcatctctgccggcgaatctatctaatttctgccagggaagcgagatgcccactacaagccgcccagcactagacgtgaagggcggcacatccccagccaaagaggacgcaaatcaggaaatgtcgtcagtagcctactccaacctcgctgtgaaggatcgaaaggctgtggcaatactccactatccaggcgtcgcgtccaatggcacgaaagccagtggcgcccctactagcagctcaggcagcccaataggctcacctacgactacacccccaaccaagccccccagtttcaacctgcatccagccccacacctacttgcaagcatgcatttacagaagctgaacagtcagtatcagggaatggctgctgccaccccaggccagccgggggaagcggggcctttacaaaattgggactttggcgctcaggcaggtggtgctgagagcctctcccccagtgccggggcccagagccctgccatcatcgatagcgaccctgtggatgaggaagtgttaatgtctctcgttgttgagctgggattggatagggcaaacgaactccccgaactgtggcttgggcaaaatgaattcgactttactgcagactttcccagtagctgctag

SEQ ID NO: 17137 - DNA, 318 bp, synthetic construct
  source 1..318: mol_type = other DNA; note = Synthetic coding sequence
atgaacatgatttggagaaactccatttcgtgtcttcggctgggcaaggtgccccacaggtatcagtccggttatcatcccgtggcaccacttggcagcagaatcctgacagatcctgcgaaagttttcgagcataatatgtgggatcatatgcagtggtctaaggaagaagaagccgcagctcggaagaaggtcaaagagaattcagctgtacgagtcttgctggaagagcaggtcaagtatgagcgcgaagcctccaagtactgggacactttctacaagatccataagaacaagttctttaaggacagaaattag

SEQ ID NO: 17138 - DNA, 366 bp, synthetic construct
  source 1..366: mol_type = other DNA; note = Synthetic coding sequence
taagagggggagagtccaacggcgagcccacacagttccgcaacagacgatctgcatcatagcgaccgctaccagacattcctgcgcgtgcgtgccaacaggcagaccaggctgaatgcccggatcggcaagatgaagcggcggaagcaggatgagggccaggtctgccccctctgtaatagacccctcgcgggcagtgagcaggaaatgtccagacatgtggaacattgcctgtcaaagagagaggggtcctgcatggcagaagatgacgcagtggacattgagcacgagaacaataatcgctttgaggagtacgagtggtgtggccagaagaggatacgtgcaacaaccttgctggagggatag

SEQ ID NO: 17139 - DNA, 1701 bp, synthetic construct
  source 1..1701: mol_type = other DNA; note = Synthetic coding sequence
atggatcttcatcgtgcagctttcaagatggagaattcctcctacttgcctaaccccctggcttctcccgcgctgatggtgctcgcatcgactgcggaagcatcccgagatgcatcgatcccatgccagcagccccggcctttcggggtgcccgtctctgttgacaaggatgtgcacattccattcaccaacggcagttacacgttcgcctcgatgtaccacagacagggcggcgtccctggaacttttgcaaatagggatttccctccatccttgttacacctccatccgcagtttgcgcctcccaaccttgactgtacccccatatctatgctgaaccactccggggtaggtgccttccgccccttcgcctctaccgaagatagagagagctaccagagtgcatttactcctgctaagcgactaaagaattgccacgacacagagtcccctcatctgagattctccgacgccgatggaaaggagtacgatttcggaacacagctgccctcctccagcccaggttctctgaaggtcgatgacactggaaagaaaatattcgctgtttccgggctcattagcgaccgggaagctagctcctctccagaagaccgcaacgaccggtgcaagaagaaggccgccgccctcttcgatagtcaggcacctatatgtcctatttgccaggtgttgctaaggccgagcgagctgcaagaacatatggaacaggaattagagcagctggcacagctgccgagtagcaagaatagcctgctgaaggacgctatggctccgggaacccctaagtcacttcttctgagcgcatccattaaacgtgaaggagagtctcccacagcaagccctcatagtagcgccacagacgacctgcaccactcagatcgctatcagaccttcctgcgggtccgagcaaataggcagacccgactcaacgcccgcatcggtaagatgaaacgccggaagcaggatgaaggccagcgagaagggagctgcatggcagaagatgacgcagtcgatatagagcatgagaataacaacagattcgaagaatatgaatggtgtggccagaagagaatccgtgctaccacgctgctggagggaggtttcaggggcagtggattcataatgtgtagcggaaaagagaaccctgactcagatgccgatcttgatgttgacggcgacgatactctcgagtatggcaaacctcagtacacagaggcggatgttatcccttgtacaggcgaggaacctggagaggctaaggaacgagaagccctacggggggctgtgctgaatggcggacccccctccacacgcatcacccctgaattcagcaagtgggcctccgacgagatgccctcgacgtctaatggggagtctagcaaacaggaggccatgcaaaaaacatgtaaaaactctgatatcgagaaaataaccgaggactctgcagtgaccacattcgaggccctcaaagcacgcgtgcgcgagctggaacgtcaacttagtagaggcgatagatacaagtgcctcatctgcatggactcctacagcatgcccctcacctccattcagtgctggcacgtgcactgtgaggagtgttggctccgtacgctcggtgccaagaaactgtgtccgcagtgtaacacaattactgccccaggagaccttcgaagaatttacctttag

SEQ ID NO: 17140 - DNA, 4719 bp, synthetic construct
  source 1..4719: mol_type = other DNA; note = Synthetic coding sequence
atgttactgcatctgtgcagcgtcaaaaacttataccagaatagatttctcggcctggccgctatggcttccccgtctagaaattctcagtctcgacgccggtgtaaagaaccactccgctactcttacaacccagaccaatttcacaatatggacctccgaggtggaccccatgatggagttacaatcccacggagtacatcagatactgacctggtcacaagcgactcccggagcactctgatggtgtcatccagctactattcaattgggcactctcaggacttggtgatccattgggatattaaagaggaagtggacgcaggggattggatcggaatgtatcttattgacgaggtcctcagtgagaacttcctggactataaaaacaggggtgtaaacggaagtcaccggggccaaatcatttggaagatcgatgcgagcagctattttgttgaacctgagacaaagatatgttttaagtattaccacggcgtgagcggagccctgcgggccacaaccccatcagttaccgttaaaaattctgctgccccaattttcaaatcaatcggggccgacgagacagtgcaaggacaggggtcacgccggctgatctcttttagtctgagtgatttccaggctatgggactaaaaaagggcatgttttttaatccagatccttatcttaagatatctattcaacccggcaagcactccattttccccgcgctccctcaccatgggcaggaacgtagatccaagatcattgggaacaccgttaatcctatatggcaagcggagcagttctccttcgtaagtctacccacggatgtactggagatcgaagtcaaggataagttcgccaagagccgcccaatcataaagaggttcctgggcaaattgtcaatgcccgtgcaacgcttactggaaaggcacgctatcggtgatcgggtggtgtcatatacccttggcaggaggctgccaacagaccatgtctcaggtcagctgcagttccggtttgaaataacctcatctatacatccagacgatgaagagatttcattgtccacagagcccgagagcgctcaaatccaggacagccccatgaacaatttgatggaaagcggtagcggcgagccaagaagtgaggcccccgagtcgtccgaatcctggaagcctgaacagttgggagaaggatccgtccccgatggacccgggaatcagagtatcgagctgtctagacccgctgaggaggctgccgtcatcacagaggctggagaccaaggaatggtttccgtgggacccgagggcgcaggcgagctgcttgcccaggttcagaaagatatccagcccgcaccttctgccgaggaactggctgagcagctggacctgggtgaggaagcctccgcactcctgcttgaggacggagaggctccagccagcaccaaagaggagccacttgaagaagaggccacaacacagtccagagctggacgcgaggaagaggaaaaggaacaggaggaagaaggcgacgtaagcacactggagcaaggggagggtagactccagctccgagccagtgttaagcggaagtctcgcccatgtagtctcccagtcagcgaacttgaaaccgtgatcgcttccgcctgtggggaccccgagacaccacgaacccactacatccgcatccataccctcctgcactccatgcccagcgcccagggtggatcagccgccgaggaagaggatggggcagaggaggagtcaacccttaaagacagctccgagaaggatggactgtcagaagtggataccgttgctgctgatccttctgccctggaggaggacagggaagaaccagagggagccaccccaggcaccgctcaccctggtcacagcggagggcatttccccagtttggcaaacggcgcggcccaggatggcgatacacacccgagcacagggagcgagtccgatagctcaccccgacagggaggtgaccatagttgtgagggctgtgatgcatcctgctgctctccctcgtgttatagtagctcctgctacagtacgtcgtgttattcatccagctgttattctgcctcttgttatagcccgagttgctataacggaaatagattcgcttctcataccagatttagttcagtggattctgcaaagatctcagaatcgaccgtattctctagccaggatgatgaggaagaagaaaattctgctttcgaaagcgtgcctgattctatgcagtcccccgagctagatccggagtctactaatggggcaggcccctggcaggacgagctggctgctccttccggtcacgtggagcgatctcctgaaggtctcgaatcgccggtcgcagggccctccaataggagagaggattgggaagcacggatcgactcccatggcagggtcttttatgtggaccacgtcaaccgcacaaccacatggcagagaccaacagccgccgctacacccgatgggatgagacggtcaggctcaatccagcagatggaacaattaaatagaagataccagaacatacaacgcacgattgcgaccgagcggtccgaggaggattcggggagtcagtcatgtgagcaggcaccagccgggggaggaggaggcggtggcagtgattccgaggccgagagttctcagtcttcattggatttacgcagggaagggtccctgtccccagtgaatagtcagaaaattactcttctgctgcaatcaccagccgtaaaatttatcaccaatccggaattcttcactgttctgcatgccaattactctgcttaccgagtgtttaccagctcgacctgcctcaaacatatgattctcaaagttcgcagggatgccaggaatttcgaacgctaccaacataatcgagacctggtcaacttcattaacatgttcgcggacaccaggcttgagttgccacgaggttgggaaatcaagacagaccagcaaggaaagtccttcttcgtcgaccataatagcagagctaccacctttattgaccctaggatcccacttcagaacggtcgcctgccgaatcatttgactcatcgacaacacctccaacgtctccggtcctactcagctggagaagcctccgaagtgtcacgtaacagaggggcctctctgctggcacggcccggccacagtctggtagctgccatccgttcccaacaccagcacgaatcattgcccctggcttacaatgacaagatcgtcgcgttcctacgccaaccgaacatctttgaaatgctgcaagagcggcagccctcccttgccagaaaccacactctgcgcgaaaagatccactacatccgcaccgaaggcaaccatggcttggaaaaacttagttgtgacgccgacctcgtaatcctgctgtccctgttcgaggaggagattatgagctacgtgccacttcaggctgcatttcaccccgggtactcttttagccccaggtgtagcccgtgtagcagcccccagaactcccccggtttgcagcgtgcttccgcccgggcgccaagcccctatcgcagggacttcgaggcgaaacttcgcaacttctaccgtaagttggaagcaaaaggcttcgggcaaggtcctggcaagattaaacttattatcagacgagatcatctgctggagggcacctttaaccaggtgatggcatactccagaaaggagctccagagaaacaagttgtacgtgacatttgtgggggaggagggccttgactacagcgggccctcacgggagttcttctttctcctgagccaggagctgtttaatccttactacggtctcttcgagtatagtgcaaatgatacctatacggttcagatatcaccaatgtctgccttcgtggaaaaccacctggagtggttccgcttttcaggtagaatactgggactggcgctgatccatcaatacctgcttgatgccttctttactaggccgttctacaaagcactcctacgccttccctgcgacctgtcggacctggaataccttgacgaagagttccaccagagtctccagtggatgaaggataacaatatcactgacattctggatctcacttttactgtcaatgaggaagttttcggacaggtgactgagcgtgagcttaagagcggaggcgctaacacgcaggtaacggagaagaataagaaggagtacatcgaaaggatggtgaagtggcgggtggagcgtggagtggtacagcagaccgaagccctggtaagaggcttctacgaggtagtcgatagcagactggtgtctgtgtttgacgccagggagttggagttggtgatagccggaacggctgaaatcgacttgaatgactggagaaataacaccgaatatagaggagggtaccatgacggacacttggttattcggtggttctgggcagccgtcgagcgattcaataacgaacagaggcttcgactgctgcaattcgtcaccggtacctcctcagttccatatgaaggcttcgctgccctgagaggctccaacggtctgcggagattctgcatagaaaaatgggggaaaatcacttctctgcctagggcgcatacttgtttcaacagactagacctgcccccatatccaagctactctatgttgtacgagaagctgctcacagcagtggaagaaacatctacctttggtcttgagtag

SEQ ID NO: 17141 - DNA, 1629 bp, synthetic construct
  source 1..1629: mol_type = other DNA; note = Synthetic coding sequence
atgagtgggttggtgctgggacagagagacgagcccgctgggcaccgcctctctcaagaagagatactgggcagtaccaggctcgtgtctcagggcctcgaggcactgcgctctgagcaccaagccgtgctccagtccctgtcacagaccatagaatgcctgcagcaaggggggcatgaagagggccttgtccacgagaaggcaaggcagctaagacgaagtatggagaacatagagctcggattgtctgaagcccaggaagagaaggaaggtgacgcaaccaaagatagcctcgacgatttgtttcccaacgaggaggaggaagatccttccaatggtctgagccggggccaaggagcaacagcggcccagcagggtggctatgagatccccgcccggttgcgcaccctgcacaatctggtgatacagtatgccgcacagggtcggtacgaagttgccgtccctctatgtaagcaggccctggaggatctggagcggacgtctggtagaggacatcctgacgtggcgacaatgttgaacatcctggctcttgtgtatagagaccagaacaaatataaggaggcggcacacctgcttaacgatgcattaagcataagggaaagtaccttaggacccgatcaccccgctgtggctgctacactgaacaatttagccgttctttacggaaaaagaggtaagtacaaggaagcggaaccactatgccagcgagcactggagattagggaaaaagtacttggaaccaaccacccagatgtagcgaaacagctgaacaacctagctctgttgtgccagaaccagggaaaatatgaggcggttgagaggtactaccagagggcgctcgccatctatgaaggacagctgggtcccgataacccaaacgtcgctagaacgaaaaacaaccttgcctcttgttacctaaaacagggcaagtacgccgaggccgagacactgtacaaggaaattctgacaagggcccacgtccaggagtttggtagtgtggacgacgaccacaagcctatttggatgcatgccgaggagcgtgaagagatgagcaagagcagacaccacgaaggcggcactccatatgccgaatacggagggtggtataaagcctgcaaggtgtcatctcccactgtaaacaccactcttcgcaatctgggagcactgtacagaagacaagggaagttagaagctgcagaaacccttgaggagtgcgctctgaggtcgcgacggcaaggaactgacccgattagccagaccaaggtcgctgagttactcggggagtccgatgggcgtcgcacctcccaggagggcccaggtgattccgttaaatttgaaggcggggaagatgcctcagtagcagtggagtggagcggggacggctctgggaccctgcagaggtctgggagcctgggcaaaattagagatgtcttaaggagaagctccgagctgctcgtacgtaagctgcagggcactgagccccgacctagttcctccaacatgaagcgagcagctagcctcaattacctgaaccagccgagcgctgctccgctgcaagtatcccgcggcttgagtgcctcgacgatggacctgtcctcttcgagttag

SEQ ID NO: 17142 - DNA, 1548 bp, synthetic construct
  source 1..1548: mol_type = other DNA; note = Synthetic coding sequence
atgtgccaggtgggtgaagactatggtgaacccgccccagaggaaccccctcctgccccccggcctagtagggaacagaaatgcgtgaagtgtaaggaggctcagcccgtggtggtcatcagagcgggagatgccttttgtagagactgttttaaggctttctacgtacacaagttcagggctatgcttggcaagaaccgactgatcttccccggagagaaagttctcctggcttggagtggcggcccgtcctcctcctcaatggtatggcaggtactggaggggctgtcacaggattcagctaaacggctgaggttcgtggctggggttatattcgtcgatgagggagcggcatgtggacaaagccttgaagagcggtccaagacactggctgaggtaaaacccattttacaggccacaggctttccatggcacgtagtggccttggaggaagtgttcagcctcccgccatccgtgctctggtgctccgctcaggaattagttgggtcagaaggcgcatataaagccgcggtggattcgttccttcagcagcagcacgtactcggtgccgggggaggcccgggccctacacagggggaggagcagccgccccagcctccactcgacccacagaatctggctcggcctcctgcccctgctcagactgaggctcttagccaactgttttgctctgtccggacactgacagccaaagaggagcttcttcaaaccctccggactcatctcattttgcatatggcgcgcgctcatggctattctaaagtgatgacgggtgatagctgtacacgcttggctatcaaacttatgactaatctggccctcggcaggggggcattcttagcttgggacacaggattctcagacgagcggcacggcgacgtcgttgttgtgcggcctatgagagaccacaccttaaaggaggtggccttctacaaccgcttgtttagtgtgccatcagtcttcacaccagcagtcgataccaaagcccccgagaaggctagcatccacagactcatggaagccttcatcctccgcctccagactcagttccccagtacagtttctactgtttaccgaacatctgaaaagctggtgaaggggccccgcgatgggcccgccgccggagacagcggaccccgctgtctactgtgcatgtgtgccctggacgtggacgcagcagattctgctactgctttcggtgcgcagacctcctcccgactgtctcaaatgcaatcacctatcccactgactgagacccgaacaccaccagggccatgctgttctcccggagtggggtgggcccagcggtgcggtcagggcgcctgtaggcgcgaggatccccaggcctgcattgaggaacaactgtgttactcttgccgcgtcaacatgaaagatctccctagtctcgatccacttcctccttacatcctggcagaggctcagctgaggacacaacgcgcctggggattacaagagattcgggattgtctcatcgaagatagtgacgacgaggccggccagtcctag

SEQ ID NO: 17143 - DNA, 1263 bp, synthetic construct
  source 1..1263: mol_type = other DNA; note = Synthetic coding sequence
atgtttaaaaggaccgtgctgtcctgccctccccccgccgctccgcccctccaagccaggggagccttcaggagcttccctcacagctggggcgaggattttctggcttccctgatgttcaagattcagctggagcccctcaagctgagagcatggacgctaaacgggttcgtgaaattcagaaacaaggagaccagtgcggggccagtcgcagttatgggaaaagactattacaagatcctgggcatcccttccggtgcgaacgaagatgagattaagaaagcctaccggaagatggcacttaagtaccaccccgataagaacaaagaacccaacgccgaagagaagtttaaggaaattgccgaggcatacgatgtcctatcggatcctaaaaaacgcggcctgtacgatcaatatggagaggaaggactcaaaactggcgggggaacaagcggcggcagtagtggatccttccactatacctttcatggggatcctcacgccactttcgcatcattcttcggcggcagtaacccattcgacatcttttttgccagctctcgttccacaaggcccttttccgggttcgaccccgacgacatggacgttgacgaagatgaagatcctttcggcgcatttggacgattcggatttaacggactttctagagggcccagaagagccccagagccactgtacccacgccgaaaggttcaagaccctcctgtggtccatgagttgagggtcagccttgaagagatttaccatggctcaaccaagcggatgaagataaccaggagacggctgaaccccgatggcaggaccgtaaggaccgaggacaagatcttacatattgtgatcaaacgaggctggaaggaaggcactaaaattacattccccaaggagggcgacgccacacccgacaatatccccgcagatatcgtgttcgttctgaaggacaaaccacacgctcactttcgccgcgatggaaccaatgtgttgtactctgctctcatttcactgaaggaggccctctgtgggtgtactgtcaatattccgactattgacggaagagtgatccctctcccatgcaatgacgtgatcaaacccgggacggttaagcggctgcgaggcgagggcctccccttccccaaagtgccgacccagcggggcgatctgattgttgagttcaaagtccggttcccagaccgtttgaccccacaaacgaggcagattctgaagcagcacctcccatgttcctag

SEQ ID NO: 17144 - DNA, 2979 bp, synthetic construct
  source 1..2979: mol_type = other DNA; note = Synthetic coding sequence
atgtatggatcagcccgatctgtcggcaaggtggaacccagtagtcagtcccccggcagatctcctcgactccctagatcaccccgactcggccaccgccggacaaatagtacagggggctcctcgggaagctccgtgggcggagggagtggcaaaaccctctctatggagaacatccagagcctgaacgcagcatacgcaacttcgggccctatgtacctctctgaccacgagaacgtgggttcggaaaccccaaagtcaactatgacactgggtcggtcgggagggagacttccttatggggtgaggatgaccgctatgggaagcagtccgaacattgccagttcaggtgtggcctctgacacaattgccttcggggagcaccacctgcccccagtttcaatggcttcgacagtcccccattcgctgaggcaggcacgggacaacacaataatggatctgcagacacagctcaaagaggtactccgtgaaaacgatctcctcagaaaggacgttgaggtgaaagagtctaagctgagctctagcatgaacagtattaaaactttttggagtccggaactcaaaaaagaacgcgcactacggaaagacgaagcctctaaaatcacaatttggaaagagcagtatcgcgtcgtacaggaggagaatcagcatatgcagatgacgattcaggccctgcaagatgaactgcgcatccagagggatctgaaccagctatttcagcaggattcctcaagccgaacaggagagccttgcgtcgctgagctgactgaggagaactttcagcgattgcacgcggaacacgaaagacaggcaaaggagttgttccttttacggaaaactctcgaggagatggagctgcgcattgaaacacaaaaacagacactcaatgcccgagacgaatctatcaagaaattactcgagatgttgcagtccaaggggctctccgccaaggccaccgaagaggatcacgagcgcacaagacgacttgcagaagccgagatgcacgttcaccacctggagagcctgctggagcagaaagagaaggagaactcgatgctgcgagaggagatgcatcgccggtttgagaatgcacctgattcggccaaaacgaaagcactgcaaaccgtcatagaaatgaaagactcaaagatctcaagtatggaacggggcctgcgggatttggaagaggaaattcagatgttaaaaagcaacggcgcgctctccactgaggaacgcgaggaagaaatgaagcaaatggaggtgtaccgttctcattccaagtttatgaaaaacaaaattggccaggtgaaacaggagctgtccaggaaggacacggagcttctcgcactacagacgaagctggagactttaacaaatcagttcagcgactcaaagcagcatattgaggtgctcaaagagtcattgactgccaaggagcaacgcgccgcgatcctacagactgaggtagatgccctaagactgaggttagaagagaaagagacaatgttgaataagaagacaaagcagatacaggatatggctgaggaaaagggaacccaggcaggtgaaattcacgacttaaaagacatgctagatgtaaaggaaagaaaggttaacgtgctgcagaagaagattgagaacttacaggagcagcttcgtgacaaagagaagcagatgagctcccttaaagaacgcgtgaaatccttacaagccgacactaccaacactgatactgcgctcactaccctggaagaagctcttgccgagaaagagagaactatcgagagacttaaagagcagcgggatagagatgagcgcgagaaacaggaagagattgacaactacaagaaggacttgaaggatctcaaggagaaggtgtctctgctgcagggggaccttagcgaaaaggaggcctcccttcttgacctaaaggaacatgcctcgagtctagcgtctagtggcctgaagaaggattcaagacttaagaccctagagatcgctcttgagcagaaaaaggaggaatgtctgaaaatggaatcacagctgaaaaaggcccatgaggcggctctagaggcacgggctagtcctgagatgtctgatcgaatccagcacctggaacgcgagattacccgctataaggatgagtcatctaaagcccaggctgaggtcgacaggctattagaaattctcaaggaagtagaaaatgagaagaatgataaagacaagaaaatcgccgaactagaaagcctgttttctagacaggtgaaggatcagaataagaaggtggctaacctgaaacacaaagaacaagtcgaaaagaagaagagcgcccagatgttagaagaagcccgcaggagggaggataatctgaatgacagtagtcaacagctccaggactctctgcgcaaaaaggacgatcgcatcgaggaacttgaagaggctctgagggagtcagttcagataaccgcagagcgagaaatggtacttgcgcaggaggagtcagcacgcaccaacgctgaaaaacaagtcgaagagctgttgatggcaatggaaaaagtgaagcaggagctggagtcaatgaaggccaagctttcgagcacccaacagagtctggccgagaaggaaactcatcttactaacctgcgtgccgaaagaaggaaacaccttgaggaagtcttagagatgaaacaagaggcattacttgctgccatcagtgagaaagacgctaacatagcactactcgagctgtcctccagcaagaaaaagacccaggaagaagtggcagctctgaagagggagaaagaccggctagtgcagcagctgaaacagcagacccaaaatcgcatgaaactgatggcagataattatgaggacgaccattttaagtccagccatagtaaccaaacaaatcacaagccatccccagatcaagatgaagaagaggggatctgggcatag

SEQ ID NO: 17145 - DNA, 180 bp, synthetic construct
  source 1..180: mol_type = other DNA; note = Synthetic coding sequence
atggagccgagcgctcagcagctgcagttagctgcttccttgcccgctaacctaagcaacttctgccagggaagtgagatgcccacaaccagtcgaccagctcttgatgttaagggaggtacctccccagcaaaggaagatgctaatcaggagatgtcatccgtagcttacagcaactag

SEQ ID NO: 17146 - DNA, 6978 bp, synthetic construct
  source 1..6978: mol_type = other DNA; note = Synthetic coding sequence
atgaagaagggctcgcagcagaagatcttctccaaagcgaagattcccagctccagtcatagccccatcccttcaagtatgtcaaacatgaggagtaggagtctgagccctctgataggcagtgagacgcttcccttccattccggagggcagtggtgtgaacaagtcgagatcgccgatgagaataatatgctgctggattaccaggatcataaaggcgcggactctcatgcaggcgttaggtatattaccgaggcactgattaagaaactcaccaaacaggacaatctagcccttataaaatcgttgaacctttctctcagcaaagacggcggaaagaaatttaaatacatcgagaatcttgagaagtgcgtgaaactggaggttctaaacctgagttacaaccttattggcaaaatagagaagcttgataagctgttgaaacttcgtgaattaaatctttcctacaataaaatatccaaaatcgaaggcatcgagaatatgtgtaatctgcagaaactcaacctggccggcaacgaaattgaacatatacccgtctggctgggcaagaaactgaaatccttacgagtgcttaatctgaaaggcaataaaatctcatccctgcaggatataagcaagctgaaacccctgcaggatctcataagcctcatcttagtggaaaatccagtggtcactctgccccactacctgcagttcaccatattccatctacgaagtttagaaagtctcgaaggccagccagtaactacacaggatcgccaggaagcgtttgagcgcttcagtctcgaggaagttgaacggctcgagcgcgatctggagaaaaagatgattgaaactgaagaactgaaaagtaaacagacccgtttcctcgaggaaattaaaaatcaggacaagctcaacaagtctctgaaggaagaagcaatgctgcagaaacagtcctgtgaggagttgaaatctgacctgaacacaaaaaacgagttactgaaacagaagaccatcgaactaacacgggcctgtcaaaaacaatacgaattggagcaagagctggccttttataagatcgatgccaagttcgagcccttgaactattaccccagtgagtatgctgaaatcgataaggcacccgacgaaagtccatacatcggcaagtctcgctacaagagaaatatgtttgctaccgaaagttacattatcgactctgcccaggccgtgcagatcaaaaaaatggagcctgacgaacagctccgaaatgaccacatgaaccttagggggcataccccccttgatacccagttggaagataaggagaagaaaattagcgcagcccagacaagactctcagaacttcacgacgaaatcgagaaagccgaacagcagatcctccgcgcgaccgaggagttcaaacagctggaggaggccatccaactcaagaagatcagtgaggcaggaaaggacctgctctataaacagctatcagggaggctccagctggtgaataagttgcggcaggaagccttagatctggagctgcaaatggaaaaacagaagcaggagatcgccggtaagcagaaagaaattaaggatttacagattgcaatcgactcattggactccaaggatccaaagcatagccacatgaaagctcaaaagagcggcaaggaacaacaattggatattatgaataaacagtatcaacagttggagtccagactcgatgagatcctcagtagaatcgctaaagagaccgaagaaatcaaagacttagaagaacaattgactgagggacagatagccgctaatgaagccctgaagaaagatttggagggggtgatttctggtttacaggaatacctcggtacgatcaagggtcaggcaactcaggcccagaatgagtgccgaaaactacgggacgagaaggagacgctcctgcagcgccttaccgaggtggaacaagagcgcgaccagctcgaaatcgtggcaatggacgcggaaaacatgcgaaaagaactcgcggagctagagtcggctcttcaggaacagcacgaggttaatgccagcctgcaacagacacagggagacttatcagcctatgaagctgagcttgaggcacgactgaacctcagggacgccgaggcaaatcagctgaaggaggagctggaaaaggtcacgaggctgacacagctggagcaatctgccctccaggctgagctcgaaaaggagcgtcaggctctgaagaacgccctgggcaaagcgcaattctcagaggaaaaagaacaagaaaactcagaacttcacgctaagctgaaacacttgcaagatgacaataacctactgaaacaacaactgaaggacttccagaaccatctgaatcacgtcgtggacggcctggtgaggcccgaggaggtcgcagccagggtggatgaattacgtcggaagcttaagttgggcaccggagagatgaatatacatagtcccagcgatgtcctcggcaagtcccttgcggatctgcagaagcagttctccgagatcctagccaggtcaaagtgggaacgagacgaagcacaggtacgcgagcggaagctgcaagaggagatggccctgcagcaggaaaaactggcaacaggccaggaggaatttcgtcaggcctgcgagagggcgttggaagccaggatgaactttgacaaacgccaacacgaagctaggattcaacaaatggagaatgaaatccactacctgcaggagaacctcaaatctatggaagagatacaaggtttaacagacctgcaactgcaggaggctgacgaggagaaggagcgcatcctagctcagctccgcgaattggagaaaaagaagaaactggaagacgcaaagtcacaggagcaggtattcggcctggataaggaactgaaaaagttgaaaaaagcagttgcaaccagcgacaaactcgccaccgcggagctcacaattgccaaggatcagctgaaatctctccacgggacagtgatgaagatcaaccaagaaagggccgaagagctccaagaagccgaaaggtttagccggaaagctgctcaggctgcacgggatctgactcgggccgaggcagaaatagagttgctgcagaacctgctgagacagaaaggagagcagtttaggctggaaatggagaagacgggcgtggggaccggcgcaaattctcaggttttggaaatcgagaaactcaacgagactatggaaaggcagaggactgagattgctagattacaaaacgtcttggatcttacaggttccgacaacaagggcggattcgagaatgtattggaagaaatagccgagctgcgccgggaggtgtcttaccagaacgattatatctcctctatggcagatcccttcaagaggcgaggttactggtattttatgccaccccccccctcctcaaaggttagctcacactccagccaggctacaaaggactctggggtcggcttaaaatacagtgccagcaccccagttcggaaacccaggcccggccagcaggacgggaaggagggaagtcagccaccacctgcctcgggttattgggtttactccccaatcaggagtggactccataagcttttccctagtcgcgacgccgattctggaggcgattctcaggaagaatccgagctcgacgaccaggaagagcccccgttcgtgccaccccctggctacatgatgtatactgttcttcccgatggctcacctgtgccacagggtatggctctgtacgcccctcctcccccactccctaataacagccggccattgacacctggtaccgttgtatatgggccaccgccagcaggagctcccatggtgtacggacctccacctcctaacttttccattcccttcattcccatgggcgtgctccattgcaatgtgcctgagcaccataacttagaaaatgaggtaagtagactcgaggatatcatgcagcatctgaaatcgaagaagcgcgaggaacgctggatgcgagcttccaagcggcaaagcgaaaaggagatggaggagctccaccacaatatcgatgacctactccaggaaaagaagagcctggaatgcgaggtggaggagctccacagaactgttcagaagagacagcagcaaaaagatttcatcgatggtaacgttgagagcctgatgacggagttggagatagagaagtccctcaaacaccatgaggacattgtggacgagattgagtgtatcgaaaagactctactaaagcggcgatctgaacttcgagaggccgaccgcctacttgctgaggcagagagcgagttgtcatgcaccaaggaaaagacgaagaacgctgttgaaaaatttaccgacgccaagaggtctctgctgcagacggaaagcgacgccgaggagctcgagcgtcgagcgcaggagacggccgtgaacctggtgaaggccgatcaacagctcagatccctccaggctgacgcaaaagacctggagcagcacaagatcaagcaggaagagatcctcaaagaaattaacaaaattgtggctgctaaggattccgacttccagtgcctgtcgaagaaaaaggagaagctcacagaagagctccaaaagctccagaaagatattgaaatggcagaaaggaacgaagaccatcacctgcaagtattgaaagagtctgaagtccttttacaggctaaacgcgccgagttggagaagttgaaatcccaagtcacttcgcagcagcaggagatggccgtgctggaccgacaactcggacacaagaaagaggagctccacctcctccagggatccatggtccaggccaaggccgatctgcaggaagccttgaggttgggtgaaacagaagtgacagaaaagtgcaaccatatcagagaggttaagtcccttcttgaagagctctcatttcagaagggcgaattgaatgtgcagatctcagagaggaagacgcagctaaccctcatcaagcaagagattgaaaaggaggaggaaaatctacaggtggtattaagacagatgtctaaacataagaccgagctgaagaacatactggacatgctgcagctcgagaaccacgagttgcagggccttaagctccaacatgatcaaagggttagcgaactcgaaaaaacccaggtggctgttttggaggagaaactggaattggagaacttgcagcagatctcccagcagcagaaaggagagattgagtggcagaaacaactgctcgaacgggacaaacgcgaaatcgagcgcatgacagccgagagtagggcactgcagagctgtgtggagtgcttgagcaaagaaaaagaagacctacaagagaagtgtgacatatgggaaaagaagctggcccagaccaagagggtcctcgcagccgctgaggagaactccaagatggaacagagcaacttggaaaagctggagctcaatgtgcggaaactccaacaagaactggaccaactgaaccgagacaaactgtcactccacaacgacatttccgcaatgcaacagcagttgcaggagaagcgggaggccgtcaacagcctacaggaggaactggcaaacgtgcaggatcacctgaatctagcaaagcaggatctgcttcacacaactaaacatcaggatgtccttctctctgaacagacgcgcctgcagaaagatataagtgagtgggccaaccgattcgaggattgtcagaaggaggaagaaacaaagcagcagcaacttcaggtgctacagaatgaaattgaggagaacaagctgaagctggtgcagcaggaaatgatgttccagaggctccaaaaggaacgcgagagcgaggagtctaagttggaaactagcaaggtgacgttgaaggaacagcaacaccaactcgaaaaggaactaaccgaccagaaatctaaactggaccaggtactctccaaggtactcgccgcagaggagcgcgtccgcactctccaggaggaagagcggtggtgtgaatccctggagaaaaccttgagccagactaagcggcaactttccgagcgggagcagcaacttgtggaaaaatctggcgaactgctcgctctgcagaaagaagccgactcaatgcgggcggatttcagcctcctgcgcaatcaatttctgacagagcggaagaaagctgagaagcaagtggctagcctgaaagaggctcttaaaatacagaggagccaactggaaaagaatctgctggagcaaaaacaggaaaattcctgtattcaaaaagaaatggcgacgattgaactggtcgcgcaggataaccacgaacgggcacggcgactaatgaaggagcttaatcagatgcagtatgagtacaccgaacttaaaaagcaaatggcaaaccagaaggatctggagcggcggcagatggagatcagcgacgccatgcggacgctcaaaagcgaggtgaaggacgaaatcaggaccagtttgaaaaaccttaaccaatttctgcctgagttgccagccgacctagaggcaattctggagaggaatgaaaatctggaaggtgagctggaatcacttaaggagaatctccctttcaccatgaatgaggggccattcgaggagaagctcaattttagccaggttcacatcatggatgaacattggcgtggagaagctctaagagagaaactgagacacagggaggacagattaaaagcccagttgcggcactgtatgagcaagcaagcagaggtgttgatcaagggtaagagacagaccgaaggaacattgcactccctacgtcgccaggttgacgctctaggagagctggtaaccagcacctcggctgattcagccagctcaccttccctgtcccagcttgagtcttctctgactgaagacagtcagttaggtcagaatcagaagcagaataattctctgagatag

SEQ ID NO: 17147 - DNA, 657 bp, synthetic construct
  source 1..657: mol_type = other DNA; note = Synthetic coding sequence
atggacgaactcgtgactcttgaagaagctgatggaggaagcgacatcctgcttgtggtccctaaggctactgtgttgcagaaccaactggacgaaagtcagcaggaacgtaatgacctgatgcagcttaaactccaactggaggggcaggtgactgaactccgctcccgcgtccaggagctcgagcgggccttggccactgcccgccaagagcataccgaactcatggagcagtataaaggtatctctagaagccacggggagatcactgaggaacgggacatcctaagccggcagcaaggagatcacgttgcccggatactcgaactcgaggatgacattcagaccatctcagaaaaggtcctcaccaaggaagttgaattggacagactccgtgacacagtgaaagcccttactagggagcaggaaaaattgctggggcagctaaaggaagtccaggccgacaaggagcaatcggaagccgaacttcaggtcgctcaacaagagaaccatcacctcaatttggatctcaaggaggccaagtcttggcaggaggagcagtcagcgcaagcccagcggttaaaggacaaggttgcacagatgaaggataccctgggccaggctcagcagcgggtgaggccgagctggtctccttag

SEQ ID NO: 17148 - DNA, 693 bp, synthetic construct
  source 1..693: mol_type = other DNA; note = Synthetic coding sequence
atgaaaaagccaagacccgcagctgcggcgcccagtcccaggcctccagcctgcagccggggtgctcacccggggacagcttccgagttgagggtccccgctctccggagaggcggctgcggggatcgtcggcttagagaggaagccgctcccgagcaagccgctgctgggcctaggcgatctacagttggggctctgctggcatccgaactcggctggaagttttacgatgccgacgattatcatccagaggaaaatagaaggaaaatggggaaaggcatcccactgaatgatcaggatcgcatcccctggctgtgtaatctccacgatatccttctgagagacgtggccagtggacagagagtggttctggcatgtagcgcactgaagaaaacttaccgcgacattttgacccagggcaaggatggcgtggcattgaaatgtgaagaatctggcaaagaagccaaacaggcagagatgcagttactggtcgtccacttgagtggctcatttgaggttatctcgggacgactgctcaagagggagggtcactttatgccccccgaactcctccagtcccaatttgaaaccctggagccacctgcggcaccggaaaactttatccagatttcagtagataaaaatgtaagcgagataattgctactatcatggaaacgctgaaaatgaagtag

SEQ ID NO: 17149 - DNA, 957 bp, synthetic construct
  source 1..957: mol_type = other DNA; note = Synthetic coding sequence
atgtgtaggacggccttaggcgtaaccactttgcaggaccttggggtgtgttggaggaaggagcatgatccggccgagatgctacgtgtaggacgggccgagctgggcggctggaaaccttcctgggaggctattgtgaaggaggttgccgcggcaaccggccataccgttgtgctggtcgatcagaccgaagacatcctggccaagagcaagaaaggcattgaagaatctcttcgcaaagtggcaaaaaagaaatttgcagaaaacctaaaggcaggagacgagtttgtcgagaagactctgagcactattgcaacttcaactgacgccgcaagcgtcgtgcattctaccgacctagtggttgaggccattgttgagaatttgaaggtcaaaaatgagctgtttaaaagactggataaatttgccgctgagcataccatctttgcaagcaacacctcttcgcttcaaatcaccagcattgctaacgcaaccacccggcaggacagattcgctgggctgcacttctttaacccggtcccagttatgaaacttgtagaagtcatcaaaacacctatgacctcgcagaagactttcgagtctctggtcgatttctctaaagcccttgggaaacaccccgtctcatgtaaggatacccccggcttcattgttaaccggctgcttgtcccctacctgatggaggcaataagactctatgaacgcggagacgcatcaaaggaagatatagacacagccatgaagttgggggccggctatccaatggggccattcgaacttctggactacgtcggcctggacactacaaaattcatcgtggacggatggcacgaaatggacgcagaaaaccccctgcaccagccgtcgcctagcctaaacaagctggtggcagagaacaaattcgggaagaagaccggcgaagggttctataagtacaaatag

SEQ ID NO: 17150 - DNA, 666 bp, synthetic construct
  source 1..666: mol_type = other DNA; note = Synthetic coding sequence
atggccatagtccagactttgcctgtgcctctcgaacctgcgccagaggccgcaaccgctccccaggcgcccgtaatgggcagtgtctcctcactcatttcaggccgcccttgccctggaggacccgccccccctaggcatcacggccccccaggacccacgttttttcgccagcaggatggcctgttgcgaggaggatatgaagctcaagagcctctctgtcccgccgtgcccccccggaaagccgtgcccgtgactagcttcacctacatcaacgaggacttcagaaccgagtcaccccccagcccaagttctgatgtggaagacgccagggagcaaagggctcacaatgcccatctgcgggggccacctcctaagttgattcccgtatccgggaaactggaaaagaacatggagaaaatccttattagacccaccgcatttaaaccagtgctgcccaagcccaggggggctccttctctaccttccttcatggggcctagagccactggtctctcaggcagccaaggatcgctaacccagctgtttggcgggcccgccagcagttcaagctcaagctcttccagtagcgctgccgataaaccgctggcatttagcggctgggcctccggatgtccatccggtacactgagtgattctggttag

SEQ ID NO: 17151 - DNA, 585 bp, synthetic construct
  source 1..585: mol_type = other DNA; note = Synthetic coding sequence
atgagagagctggccgctgtggttagccgggatatataccttcataaccctaacatcaagtggaacgacattatcgggctcgacgccgcgaagcaactggtgaaggaggcagtggtgtatcccattaggtacccacagctgttcaccggaatcctttctccttggaaggggctcttgctttatgggcccccaggtaccgggaaaacacttctcgccaaagcggtggcgactgagtgcaagactactttttttaatatatctgcctcaacaatcgttagcaagtggcgcggcgacagcgagaagctggtgcgagtcttgtttgagctggcaaggtatcacgcccctagtacaattttcctggatgagctggaaagcgtgatgagtcagcggggaaccgcaagtggcggcgaacacgaaggaagtctgcgaatgaaaaccgagctgctggttcaaatggacgggcttgcacggtccgaggatctggttttcgtgctggcggcatctaacctcccctgtctgaaggctatcgcactgcagccgggggatagagcaaggttgaggttgaaaaagaaaaagtgtacatag

SEQ ID NO: 17152 - DNA, 555 bp, synthetic construct
  source 1..555: mol_type = other DNA; note = Synthetic coding sequence
atgaccttccagtttaattttacaattgaggaccatcttgagaacgaattaacacctattcgggatggggctctgaccctcgattcttccaaagagctctctgtgagtgaatcacagaaaggggaggaacgcgatcggaaatgcagcgccgagcagttcgacctgcctcaagaccacctgtgggagcataagtccatggagaacgcagcccccagccaggacaccgattctcccctgtccgcagcttctagcagccgcaacttggaaccccacggcaagcagccttctctccgcgctgcaaaggaacacgccatgcccaaagacttgaagaaaatgttggagaacaaggtaatcgagaccttgccaggatttcaacatgtgaagctgtcagtggtcaagaccatcttgctgaaagagaattttcctggggaaaacatcgtgagcaaaagctttagctcccattcagacctcatcactggcgtgtacgaaggaggccttaaaatctgggagtgtacctttgatttgctggcctattttacaaaagccaaggtctag

SEQ ID NO: 17153 - DNA, 354 bp, synthetic construct
  source 1..354: mol_type = other DNA; note = Synthetic coding sequence
atggtgctgattctgggccgaaggctgaacagagaggatctgggcgtaagggactctcccgctacaaaacgcaaggtgttcgaaatggacccgaagtctctgaccggacatgaatttttcgatttctccagcgggtccagccatgcagagaatatactgcagattttcaacgagtttcgcgatagccggttgtttactgacgtgataatctgcgttgaaggcaaagagtttccgtgtcatagggctgtcttatccgcgtgttcatcatattttcgcgccatgttttgcaacgaccatcgtgagagtagggagatgctggtggagatcaacggcatcctggccgaagctatgtag

SEQ ID NO: 17154 - DNA, 498 bp, synthetic construct
  source 1..498: mol_type = other DNA; note = Synthetic coding sequence
atgattttgaatgtgctcgaatacggctcacagcaggtagcagacctgaccttgaatctcgacgattacatagatgcggaacatcttggcgattttcacaggacatataagaattctgaagaactgcgaagccggattgtctccggcattatcactcctatccacgagcaatgggagaaggccaatgtatcaagtccccatagagagtttcctccggccaccgcgcgagaggttgatccactccgcatcccaccgcaccacccccacacgagtcgccagccgccttggccacgacgcggcggcatgatcgtagatccactgaggagcggctttcctcgcgccctcatcgacccttctagcggcctgccaaacaggctcccccctggggcagtgccacccggcgcacggtttgatccattcggccctatcggtacatctcctccaggtcctaaccctgaccatctgccacctcccggttatgatgatatgtatctgtag

SEQ ID NO: 17155 - DNA, 369 bp, synthetic construct
  source 1..369: mol_type = other DNA; note = Synthetic coding sequence
gccctgacgttctccctgcgcgcaggtgcagcatccgcgcaagacggacggtgcccatgcggcgctaggcggcccgactcacgccttctgcagcttcacataacaatgcctttctctagtcccatggaggcagaactggttcgaaggatactctctagagacgccgccccactgccaagaccaggcgccgttctcaaggactttactgtgagcggcaacttgctgttcatccggttaactgccgcagatcaccggcaactccagctgtccatttcttcctgtcttcagcagctgagcctgctaatgtggattactcagtgtttcctgccagtgtttctggcccaggcccctagcgggcagcggaggtag

SEQ ID NO: 17156 - DNA, 2415 bp, synthetic construct
  source 1..2415: mol_type = other DNA; note = Synthetic coding sequence
atgaaaagtatcggtgtcaagaccgtgaaagtgtgtggcagcaagagctctgtgaggattgagggtcagccttgcagtctggggcaaagtcggcgcaaagtgaagctgatgggcgaaaggagttataccctctcaattggaaacggcgattacttttgggccaacaaggagatgctgtgggactacgtgcagacactgtcagatcaaggagctgaaaaacatgagggaaccgggcaatcctccggtatcactgatcaagagaaagagttgtccaccaatgcattccaagccttcaccagtgggaattacgacgcctgcctccagcacctggcttgcctacaggacataaataaagatgactacaaaattatattgaacactgccgtagccgagtttttcaaaagcaaccagaccactaccgataacctgcggcagactcttaatcaactgaagaaccaagtacactctgcagtggaggaaatggacgggttagatgacgtggagaactccatgttgtactacaaccaggccgtcattctctatcacctgagacagtatacagaggctatttcagtcggggagaaactctaccagtttatcgagccatttgaagagaagttcgcccaggccgtatgctttctgctcgttgatctctacatcctcacttatcaggcagaaaaggcactccatctcctagccgtactcgagaagatgatctcgcaagggaacaacaacaaaaacggcaagaacgaaacgggtaataataataacaaagatgggtcaaaccacaaggccgagtccggagcactgattgaggccgctaagagcaagatccatcagtacaaggtgagggcgtatatccagatgaagagtctcaaagcctgtaagcgggagataaaatctgtgatgaacaccgccgggaactccgcaccaagtttgttccttaagtctaatttcgagtatcttcgtggaaactatcggaaagctgttaaacttctgaactcatcaaacatcgcagagcatcccggctttatgaaaacaggcgaatgcctaaggtgcatgttttggaacaacctgggctgcatacactttgctatgagtaagcacaatctgggcatcttttatttcaaaaaggctctacaagagaatgacaatgtttgtgctcagctgtccgcaggaagcactgaccctggaaaaaaatttagcggccgtcccatgtgcacgctgttaactaacaaaaggtatgagttattgtataactgcggcatccagctgttgcacattggaagacccctggcagccttcgaatgtctgatcgaggccgtgcaggtgtatcatgccaacccccgcctctggctgagacttgcagaatgttgcatcgccgctaacaagggcacatccgaacaggagactaaaggtcttccatccaagaaggggatcgttcaaagcattgtgggacagggctaccaccggaagattgtgttggcaagccagtccattcagaacaccgtgtataatgacggccagagttccgcaatacctgtggcttctatggagtttgcagctatctgcctgaggaacgcgttactactcctgccggaggaacagcaggacccaaaacaggagaatggtgccaaaaatagcaatcaacttggcggcaacaccgagtcttctgagtctagcgaaacatgttcatccaagagccatgatggcgataaatttatccccgctccaccttcttcaccactacggaaacaggagctcgaaaacctcaagtgctccatcttagcctgctccgcctatgtcgctctggctttgggtgataatcttatggccctgaatcatgcggataagctcctgcagcaacccaagctgtccggaagtctcaagttcctcggacacttatacgccgccgaggcgttaatcagcctggaccggattagcgacgccatcacccaccttaacccagagaacgtcactgatgtgtcactcggcatatcatcaaatgagcaagatcaagggtcggacaagggggagaatgaagcgatggagagttccggaaagcgggctccacagtgttacccatcctcggtcaactctgcccgcacagtgatgcttttcaacttaggctccgcatactgcctgcggtcggagtatgacaaggcgagaaaatgtctgcaccaggctgcatcaatgatccaccctaaggaagttccgccagaggcaatcctgcttgctgtgtatctcgaacttcagaacggcaatacccagcttgctttgcagatcatcaaaagaaaccagctcctgcccgcagttaaaactcatagtgaagtccgtaaaaaacccgttttccagcccgtgcaccccatccagcctatccaaatgccagcattcacaacagtacagcgcaagtag

SEQ ID NO: 17157 - DNA, 1899 bp, synthetic construct
  source 1..1899: mol_type = other DNA; note = Synthetic coding sequence
atggatactatgatgctcaacgtgcgtaacctgttcgagcagctggtgcgtcgggtggagattctgtccgaagggaatgaagttcagtttattcagttagctaaagatttcgaggacttccggaagaagtggcagagaaccgatcatgagctgggcaagtataaggatctgctgatgaaagcagaaaccgagaggtcggccttagacgtcaaactgaaacacgcaagaaaccaagtggatgtggagataaaacgccgccagagggctgaagcggactgtgagaagcttgagagacagattcagctgatcagggaaatgctgatgtgcgatacatccggatccattcagctgtctgaggagcagaagtctgccctggctttcttaaacaggggacaaccaagctcaagtaacgccgggaataagagactaagcaccattgacgaaagtggttcaatcctgtcagacattagcttcgataaaaccgacgaatcactggactgggattcgagtctggtgaagactttcaagcttaagaagagggaaaagcggagatcaacaagccgccagttcgtggacggccctcctgggcctgtgaaaaagacaaggtcgatcggctccgcggtggaccagggtaatgaatccattgtagccaagacaaccgtaaccgtgccgaacgatgggggacccatcgaagccgtgtccactattgaaaccgtgccctattggaccaggtcccgacgcaagactgggacgctgcagccctggaattctgattcaaccctgaattctcgacagcttgagccaaggactgagacagattctgtcgggaccccacagtccaatggaggaatgcgtctgcatgactttgtgtcaaaaacagttatcaaaccagaaagttgcgtgccttgtggcaaacgaatcaagtttggcaaacttagccttaaatgtcgcgactgcagagtggtgtcccacccagagtgtcgcgaccggtgtccactcccctgcattcctactttgattgggacccccgtcaaaattggggaaggcatgctcgccgattttgtgagccagacatccccaatgattccgagtatcgtcgttcattgtgtcaatgagatcgagcagagaggattgactgagacggggctgtatcgcatatctggttgtgatcgaacggtaaaggagctcaaggaaaaatttctcagagtcaagacagtccccctgctaagcaaagttgatgacatccacgccatttgtagcttgctgaaagactttctccgaaatctgaaagaacctctactgactttccgtctgaacagagcgtttatggaagctgccgagattacagacgaggataacagcatcgctgccatgtatcaggccgtgggagaattgccgcaggccaaccgcgatacgctcgccttcctcatgatccacctacagagggtcgcccagagtccacacaccaagatggatgtcgccaatttagctaaggttttcggacctactatcgtcgcacatgccgtgccaaaccctgatcccgtgaccatgctgcaggatatcaaacgccagcctaaggtggtggagcgacttctttctttgcctctcgaatactggagccagtttatgatggtggaacaggagaatatcgaccccttgcatgtgatagaaaactcaaatgccttctcgaccccacagactcctgacatcaaagtatccctgctcggcccagtgacgacacctgaacatcagttgctgaagaccccttcttcttcttcactgtctcagagagtgcgtagcaccctgacaaagaatactcccagatttgggagcaaatctaagtccgcgaccaacctcgggagacaggggaatttctttgcatcccctatgctgaagtag

SEQ ID NO: 17158 - DNA, 585 bp, synthetic construct
  source 1..585: mol_type = other DNA; note = Synthetic coding sequence
atggaggacttgttcgaaacattccaggacgagatgggtttctcaaatatggaagacgatgggcctgaagaagaggagcgcgtagccgagccccaagcaaatttcaacacgccccaggcgcttagattcgaggagttgctggccaatctccttaatgagcaacaccagatcgccaaagagctgtttgagcagcttaaaatgaagaagccttccgccaaacagcagaaggaggtggagaaggtcaagccgcagtgtaaggaggtgcaccaaaccctgattctcgaccccgcacagcggaaacgtttacagcagcagatgcagcaacacgttcagctgttgactcagatccacctccttgctacctgtaacccaaacctgaatcccgaggcatcttccacccgcatttgtctaaaggaactgggcactttcgcccagagcagcatcgcgctacaccatcagtataaccctaaatttcagacactgtttcagccatgcaacctgatgggagctatgcagttgatcgaggacttctcaactcacgtttcgatagattgttcaccccataagactgtcaaaaagacatag

SEQ ID NO: 17159 - DNA, 1803 bp, synthetic construct
  source 1..1803: mol_type = other DNA; note = Synthetic coding sequence
atggtccttatcctcggcaggaggctgaatcgtgaggatctgggagtgcgtgatagcccagctacgaagcggaaggtctttgaaatggaccccaaaagcttgacaggccacgagttctttgacttcagttccggaagctcccatgccgagaacattctgcagatatttaacgagttccgagattcccggctttttactgacgtgatcatatgcgtggagggcaaagagtttccatgtcaccgcgctgtgctctcagcttgtagctcttatttcagggccatgttctgcaatgatcaccgggagtccagggaaatgctggtggagattaatggtatcttagccgaagcgatggaatgtttcctgcagtacgtgtacacaggtaaggtgaagatcactactgagaatgtacagtacctgttcgagacatcttcactctttcaaatctccgtattgagggacgcttgcgcaaagtttctggaggagcagctggacccgtgtaattgcttaggtatacagagattcgctgatacccattctcttaagacgctgtttacaaaatgtaagaatttcgcgctgcagactttcgaggacgtgtcacaacacgaagagtttctagagctcgataaagatgagctcattgattacatttgcagtgatgagctggtgattggtaaggaggaaatggttttcgaagcggtgatgagatgggtgtatcgggccgtggacctgcgccgacccctgctgcacgaactacttacccacgtgagattaccgcttcttcatcctaattattttgtccaaactgtcgaggtagatcagttgattcagaattccccagaatgctatcagttgcttcatgaggctagacgatatcacattcttggcaatgagatgatgtccccaaggacccggccgcggagaagcactggttacagtgaggtgatagttgttgtggggggttgtgagagggtgggaggtttcaatctcccttacactgagtgctacgaccctgtgacgggcgagtggaaatctctcgccaagctgcctgaattcacgaaatctgaatatgccgtgtgtgccttgaggaatgatatcttggtctcaggcgggagaatcaactcccgtgatgtgtggatatacaatagtcagctgaatatttggattcgtgtcgcgtctctgaataaaggcaggtggcgtcataaaatggctgtgctgctgggcaaggtttatgttgtcggcggctacgacggccaaaaccgtctgagttccgtggagtgctacgatagcttctccaaccgatggaccgaagttgctcctttaaaagaggcagtctcctcccctgcagtgacatcatgcgtggggaaattgttcgtaataggcggtggcccagatgataacacctgctcagacaaggttcagtcttacgatccagagacgaactcatggcttcttcgggcagcgatccccatcgctaagagatgtatcactgcagttagccttaacaatctcatctacgttgctggcggtctaaccaaggcgatatattgttacgaccccgttgaggattactggatgcatgtgcagaacaccttcagtcggcaggaaaattgcggtatgagcgtgtgcaacggaaaaatatacattttgggtggacgcagggagaatggggaagcgaccgataccattctttgttacgatccggcgacctcaatcatcactggggtcgccgctatgccaagacctgtttcttaccacggttgtgtcaccattcatagatacaacgagaaatgttttaaactgtag

SEQ ID NO: 17160 - DNA, 1620 bp, synthetic construct
  source 1..1620: mol_type = other DNA; note = Synthetic coding sequence
atggctacttcagcacctctccggtccctggaagaggaagtaacctgctcaatctgtcttgactaccttcgggaccccgtaacgattgactgtgggcacgtgttctgccggagctgtaccaccgatgtgaggcccatctccggcagccgcccggtgtgtccactatgtaagaagcccttcaagaaggagaatatccgtccagtatggcagttagccagcctcgtcgagaatatcgagaggctgaaggtggataagggcagacagcccggcgaggtgactcgcgaacaacaggacgcaaaattatgcgagcggcacagagaaaagctccactactactgcgaggacgacggaaagctgctctgcgtcatgtgccgagaatcacgcgaacaccgcccccacaccgcagtgcttatggaaaaggctgcacagcctcaccgcgaaaagattctcaaccacctgtccacattgcgcagagatagagataaaatccagggcttccaggccaaaggagaggccgacattcttgctgccctgaagaaactccaagaccagaggcaatatattgtagccgaattcgagcaagggcaccagtttttacgtgagagagaggagcacttgcttgagcagcttgcaaaactggaacaggagctaactgaggggcgcgaaaaattcaaaagtcgaggcgttggtgaattggcgcgtttagcactggtcatctctgagctggaaggaaaagctcagcagccggctgccgagctgatgcaggacacgcgcgacttcttaaatcgctacccgaggaagaaattctgggtcggaaaacctatcgctagggtcgtcaagaagaaaaccggcgagtttagcgataaacttctaagtttgcagagggggctgagggaattccagggaaagcttctgagagatctggagtacaaaaccgtgtcggtcactctggacccccaaagtgcatctggctatcttcagctgtccgaggattggaaatgtgtaacctacactagtctttataaaagcgcgtacctgcatccgcagcagttcgactgtgagccgggcgtcttgggctctaaggggttcacttggggcaaggtttattgggaagtggaagttgaaagagagggatggtctgaagacgaggaagagggagatgaagaggaggagggtgaagaggaggaggaggaggaagaagctggttatggtgacggatacgatgactgggaaacagacgaagacgaggagtctcttggagacgaagaagaggaagaggaagaggaggaggaggaggtgctggagagttgcatggtcggagttgcacgcgacagtgtcaagcggaagggcgatctgtccctgaggccagaggacggcgtctgggccctgcgactgagctccagtggaatttgggccaacacctcacctgaagcagaactgtttcccgccctgcggcctcggagggtgggaatcgcattggattacgaaggtggcactgttactttcaccaacgccgagtcgcaggagctcatttacacatttaccgcgaccttcactcggaggctggtcccattcctgtggctgaagtggccgggcacccgtctcctcttgcgaccatag

SEQ ID NO: 17161 - DNA, 567 bp, synthetic construct
  source 1..567: mol_type = other DNA; note = Synthetic coding sequence
tgatatgtcaacgctgtggactctagatggtcaagctacggaaacgaagccacttcttctgcccattacgtcgaacgcgaccggtttatcgtgaccgatctgagcggccatcgtaagcactcctccactggcgacctgctgtcattggagctgcagcaagctaaaagcaactctctgttgctccagagggaagcaaacgcactggcaatgcagcagaagtggaatagcctcgacgagggacggcatttgacactgaaccttcttagcaaggaaatcgaattaagaaacggcgagctgcagtccgattataccgaagatgctactgacacaaagccagacagggatattgagctggaactgtcagctctcgacactgatgagcctgatgggcagtcagagccgatcgaagaaatccttgatatacagctgggaattagcagccagaacgaccagctgctgaacgggatggcagtagaaaatggccaccccgtgcaacaacatcagaaggagccccccaagcagaagaagcagtctcttggcaggagtaagaagcagttctgtaggtag

SEQ ID NO: 17162 - DNA, 1806 bp, synthetic construct
  source 1..1806: mol_type = other DNA; note = Synthetic coding sequence
atggaggaaacgatgaagctcgctactatggaggatactgtcgaatactgtttgttcttgattcccgatgagagtcgagattcagataagcacaaagagatcctccaaaagtatattgagcgcatcatcacccggttcgctcctatgctcgttccatacatttggcaaaatcaacctttcaatcttaagtataaacctggcaaaggtggcgtaccagcacatatgttcggggtaacaaagtttggtgataacatcgaggatgagtggtttatagtctacgtcattaaacagatcactaaagagttccccgagctcgtggctaggatcgaagacaatgatggcgaattcctcttgattgaggcagctgatttcttacccaagtggctggaccccgaaaactctaccaaccgagttttcttctgtcatggagagttgtgtatcatacccgccccccgaaaaagtggagccgaatcttggctccccacaacaccacctactatccctcaagctctgaacattattacagcacacagcgagaaaatacttgcatccgagtccatcagggccgcggtgaacaggcgcattcgcggctacccagagaagattcaggcttctctccaccgtgcccattgcttccttccagccggaatagttgctgtgctgaagcagagaccaagactggtggctgctgcggtgcaggcgttctacctgcgggatccaatcgacctaagggcttgccgcgtgtttaagacttttttgccggaaaccagaatcatgacctccgcccacgggtttgaaatcctatgcagtaaatgttccccccatttctccgattgcaaaaagtccctggttacggcatcccctttatgggccagcttcttagagagcctgaaaaagaatgactacttcaagggactgatagaggggagcgcacagtacagagagcgtttggaaatggccgagaattatttccagctgtccgtggactggccagagagttcactggcaatgtccccgggggaagaaattctgacgttgctgcagacgataccattcgacattgaagatctgaaaaaggaggctgctaacctgccccccgaggatgacgaccagtggctggacctgtcacccgaccagttggaccaactcttgcaggaagcagtgggaaaaaaagaaagtgaaagcgtctccaaggaagagaaggaacagaattacgacctgaccgaggtgagcgagtccatgaaggcattcattagtaaagtcagcacccacaagggtgcggaactcccaagggagccttcagaggccccaattaccttcgatgcggactcatttctgaactattttgacaaaattctggggcccagacccaacgaatccgattctgacgatcttgatgatgaagactttgagtgcctggacagtgatgacgacctggacttcgagactcacgagcccggagaagaggcatcgttgaagggaactctagataatttaaaatcatatatggcccagatggatcaggagctagcccatacctgcatctctaagtctttcactacccgaaatcaggtcgagccagtgtcccagaccaccgataacaatagcgatgaagaggatagcggaactggggaaagcgttatggcgccagtggacgttgacctgaaccttgtgtccaatatcctggagtcctactctagtcaagcggggctggccggaccagctagtaacctcctgcagtctatgggcgtgcagctgccggataataccgaccataggcccactagtaagcctactaagaactag

SEQ ID NO: 17163 - DNA, 405 bp, synthetic construct
  source 1..405: mol_type = other DNA; note = Synthetic coding sequence
atgaaaaagaagcatgatggtattgtatacgagactaaggaggtattgaacccgagcccgaaagtgacacattgctgcaaaagtctctggctgaaatacagcttccaaaaggcctatatgacccagctcgtgtctagccaacccgtgcctgcaatgtcccgaaatcctgaccataacttactgagtcagcctaaggagcactcgatcgtgcagaaacatcatcaggaagagatcattcataaactggctatgcagctgaggcatatcggcgataatattgatcatcgtatggtccgtgaggatcttcaacaagacggtcgggatgcgctcgatcactttgtgttttttttctttcgcagagtgcaagttctcttgcacttcttttggaacaatcacctactctag

SEQ ID NO: 17164 - DNA, 1791 bp, synthetic construct
  source 1..1791: mol_type = other DNA; note = Synthetic coding sequence
atggaggatgctccccagcgccttagatggcaggcccatctggagttcacacataatcatgacgtgggggacctgacctgggacaagatcgctgtgagtcttcctaggtccgagaagctccggtcactggtgctcgcgggcattccgcatgggatgcgcccccaattatggatgagactttccggcgccctacaaaaaaaacgaaactccgagctctcataccgagagatcgtgaaaaactctagtaacgacgagaccattgcagctaagcagatcgaaaaagacctgttgcggaccatgccctccaatgcatgttttgcatccatgggatctattggggtgccaaggttaaggcgcgtgctacgagctctggcctggctttacccagaaatagggtactgtcaaggaaccggaatggttgcggcttgtctgttattatttctggaggaggaggacgctttctggatgatgtcggcgatcattgaggacctgctaccagcgtcctacttctctacaactctgctcggagttcagactgaccaacgggtactccggcatttaatcgtccagtacctgccccgattggacaagctgttacaggagcacgacatcgagcttagtcttatcaccttgcattggttcctcacagccttcgcctccgttgtagacattaagctcttgctccgcatttgggacctcttcttttatgagggatcccgagtgctgtttcaactgaccctcgggatgttgcacctgaaggaggaagaactgattcagagtgaaaacagtgccagtatatttaacactctttccgacatcccgtcgcagatggaagacgctgaattactgctcggggttgctatgaggctggcaggctcgctgacagatgtggcagtcgagacacaacgcaggaaacacttagcctatctgattgcggatcaaggccagctccttggcgccggtacactaaccaacctgagtcaggtggtcaggcgccgaacacaacggagaaagagcaccatcaccgccctgttgttcggggaagatgacctagaggccctcaaagccaagaatatcaagcaaacagagttagtagccgaccttcgcgaagcaatacttagggtggccagacacttccagtgcactgatcccaagaactgcagcgtcgagctgactcccgactattccatggagagtcaccagagggaccacgagaattatgtcgcctgcagccgcagtcacaggcgccgtgctaaagcgctgctggactttgagcgacacgacgacgatgaactgggatttcggaaaaacgacatcataaccattgtctcccagaaggacgaacactgctgggtcggtgagttaaatggcctccgcggatggttcccagccaaatttgtagaggtcttggacgaacggtcaaaggagtattcaatcgctggggatgactcggtgaccgaaggcgtcacagacctggtgaggggcacgttgtgccccgccctgaaggctctattcgagcacgggctaaaaaaacctagccttctaggaggtgcttgccatccatggctttttatcgaagaggcggcgggtcgggaagtagagcgggacttcgcaagcgtgtactcacgactggtgctttgcaagaccttccggttagatgaggacggaaaggtgctgacccctgaagagcttctctacagggccgtacagagcgtgaacgtcacccatgatgccgtccatgcccagatggacgtgaaactaaggtcgcttatttgtgtaggcctcaaatag

SEQ ID NO: 17165 - DNA, 399 bp, synthetic construct
  source 1..399: mol_type = other DNA; note = Synthetic coding sequence
atggagtctcgggttgctgatgccggaacaggcgagactgcacgcgctgctggcggatccccagccgtagggtgcaccactcggggccctgtggtatcagctcctctgggtgccgcccgctggaaactactgcggcaggtgctgaagcagaagcacctggacgattgtctgagacacgtgtccgtgcgccgctttgaaagttttaatcttttcagcgtgacggaaggcaaagaacgcgagacggaagaggaagtgggagcatgggtacagtacacctcgatcttctgtccagaatattctatatccctccggcacaacagcgggtctttgaatgtggaagatgtgcttacatccttcgacaatacgggaaatgtctggtctttttcgcgaggcaagtag

SEQ ID NO: 17166 - DNA, 1620 bp, synthetic construct
  source 1..1620: mol_type = other DNA; note = Synthetic coding sequence
atggcaaccagtgctccactccgatcgttggaggaggaagtgacgtgcagcatatgtctagattacctacgggatcccgtgacaatcgactgtggacacgtgttctgcagatcctgtactacggatgtcagacccatcagcggcagtagaccggtgtgtccactgtgcaagaaacccttcaaaaaggagaacatccgccccgtgtggcaacttgcttcacttgtggaaaacatcgagcgtctgaaggttgataaaggtagacagcctggagaggtgacacgcgagcaacaagatgccaaactttgcgagcgccaccgagagaaactgcactattactgcgaagacgatgggaaactgctgtgtgtgatgtgccgggaatcacgtgagcatcggccgcacactgccgtcttaatggaaaaagccgctcagccccatagggagaaaatactcaaccacctgagtacgttgagaagagatcgggacaaaatccagggatttcaggccaagggggaagccgacattctggccgcgctgaaaaaattacaggatcaacggcaatatatcgtcgcagaattcgaacaaggccatcagttcttgagggaaagagaggagcacctgcttgagcagctggccaagctcgagcaagaactgactgagggcagggaaaagttcaaatctcggggggttggggaattagcaagacttgcgcttgtcatcagcgaattagagggcaaggcccagcagccagctgccgaactgatgcaggataccagagactttctgaaccgttacccccgtaaaaagttctgggtggggaagcccattgccagggtcgtgaagaaaaagacaggtgagttctccgacaaactgctgagcctgcagcgtggtctcagggaattccagggtaaacttcttagagaccttgaatataagaccgtctctgttacactcgatccacaaagcgcttccggatatctccaactgagtgaagactggaagtgcgtgacctacacttctctgtacaagagcgcatatcttcatccccagcagttcgactgtgaaccaggagtcctgggaagtaagggttttacatggggaaaagtgtactgggaggtagaggtggaaagggaagggtggagcgaagacgaggaagagggagatgaagaggaggagggtgaagaagaagaggaggaagaggaagcaggatacggagatggatatgatgattgggagacggacgaagacgaggagagcctgggcgatgaggaggaggaggaagaagaagaagaggaggaggtgttagagtcttgtatggttggtgtggcaagggatagcgtcaagcgtaaaggagatttaagtctgcgccccgaggacggggtgtgggctctgcgactgagcagttccggcatctgggcgaacacctcccctgaagctgaactctttcccgccctgaggcctaggcgcgtgggcattgctctagactacgaaggtggcaccgtgacctttactaatgccgaatcccaggagctgatatacacattcacagcaacattcacccgacgcttggtgccatttctgtggctgaaatggccaggtacccgtctcttgctaagaccatag

SEQ ID NO: 17167 - DNA, 2193 bp, synthetic construct
  source 1..2193: mol_type = other DNA; note = Synthetic coding sequence
atgaacaacagtagttccgagacccgcggtcatcctcacagtgcgtcttctccatcagaacgggtgttccccatgccactacctcgcaaagcaccattaaacataccaggtactcccgtgttggaggactttccccagaacgacgacgaaaaggagcggctgcagaggcgccgctccagagtgttcgacctacagttctctaccgatagtccgcgacttttggcttccccgagctcaagatcgattgacatcagcgcgactatacccaagttcaccaatacccagataaccgagcactacagcacttgcatcaagctctctaccgagaataaaataactaccaagaacgccttcggactgcatctaattgactttatgagtgaaattctaaagcagaaggacaccgagcccaccaattttaaagtggcagcaggcacactggatgcatcaactaagatatacgcagttagagtcgacgctgtccacgctgatgtgtaccgtgttctaggcgggctaggaaaagacgccccgtccctggaagaggtggagggtcacgtcgctgacgggtccgctaccgagatgggaactaccaagaaggctgtgaagcctaagaaaaaacatcttcaccggaccattgagcagaatattaataatctgaacgtcagcgaagctgaccgcaagtgcgagattgatcctatgttccaaaagaccgccgcgtcttttgacgagtgctccacagccggcgtcttcctttctactttacactgccaggactatcgatcagagttactgttcccctccgacgtacagactctaagcacgggcgagcctctggagttgccagaactcggttgtgtggaaatgaccgacttaaaggccccccttcagcagtgtgccgaggaccggcaaatttgccccagcctagccggatttcagtttacccagtgggactctgaaacccacaacgaatccgtctcagccctcgtggacaagtttaagaagaatgaccaagttttcgatattaacgccgaagtggacgaaagtgactgcggtgacttccctgatgggtccctgggcgacgattttgatgccaacgatgagccagaccacaccgcggtgggggatcatgaggagtttcgatcttggaaagaaccctgccaggtgcaaagctgtcaagaggaaatgatctccctcggggacggtgatatcagaaccatgtgccccctgctcagtatgaaacccggcgaatacagttacttttctccgaggacaatgtctatgtgggctgggcctgatcactggcgctttcgcccaagaaggaagcaggacgcaccgagtcagtctgagaacaagaaaaagagtaccaaaaaggactttgaaatcgatttcgaagacgacatcgatttcgatgtctacttccggaagacgaaagctgcaacgatattgaccaagtcaacgttggagaatcagaactggagggccactacacttccaaccgattttaactataacgtggatacacttgttcagttgcatttgaaacccggtacaaggctgctgaaaatggcacaaggtcatcgcgtagagactgagcactacgaagagatagaagattacgattataacaatcccaatgacacgtctaatttctgtcctgggttacaggctgccgactccgacgacgaggatctagatgatctctttgtggggcccgtggggaactccgacctgtctccctatccctgtcatccccccaaaacagcgcagcagaatggggatacgcccgaggcacaagggctcgacatcacgacttatggggaatcaaatctagtggcagaacctcaaaaggtgaacaaaatcgaaatacattatgcaaaaacagccaagaagatggacatgaagaagctgaaacagagcatgtggagtttgttaaccgctttgagcgggaaagaggcagacgcagaagcaaatcatagagaggccggtaaggaagcagctctggccgaggttgccgatgaaaaaatgctcagtggcctgactaaagatctgcagcgctccctgccccctgtaatggcccagaacttaagtatccctctcgcctttgcatgcctactacatctggctaatgaaaaaaaccttaagcttgagggaactgaggatttgtctgacgtcttagtacggcagggggattag

SEQ ID NO: 17168 - DNA, 900 bp, synthetic construct
  source 1..900: mol_type = other DNA; note = Synthetic coding sequence
atggaaacgcagttccctgtgtcagaaggaaaagtcgacccataccggagctgcggtttctcgtacgaacaggacccaactcttcgggaccctgaggcagtggctaggagatggccctggatggtaagcgtgagggccaacggtacccacatttgcgccggcacaattattgcgagccagtgggtgctcacggtcgcacattgcctgatttggcgcgacgtcatttactcggtccgggtgggttctccctggatcgatcagatgacacagaccgcctcagatgtccccgttctgcaagttatcatgcattcccgctacagagctcagaggttttggagctgggtgggacaggcaaatgatatcggcctgctcaaactcaagcaggagcttaagtattcgaactatgtgagaccaatttgtctccccggcaccgactacgtgctcaaagatcacagcagatgcacagttactggatggggcctaagcaaggccgacggcatgtggccccaattccggactattcaagagaaagaagtgattattctgaacaacaaggagtgcgacaatttttatcataatttcaccaagatccccacacttgtgcagatcattaaatcccaaatgatgtgtgccgaggacacacatagggagaagttttgctatgaattaacaggtgagcctttagtgtgttcaatggagggaacttggtacttagtagggctcgtctcttggggagctggctgtcaaaagagcgaggctccaccaatttatcttcaggtgagctcctatcagcattggatttgggactgcctaaacgggcaggcactggccctgcctgcccccagccggaccctgcttcttgcgctgcctctaccacttagcttactcgccgctctatag

SEQ ID NO: 17169 - DNA, 1089 bp, synthetic construct
  source 1..1089: mol_type = other DNA; note = Synthetic coding sequence
atgctggtgcctggatccacgcgaccctatagcaagaaacgccagaacagtaaatccgcgcagggcctggccggactacggaacctgggcaatacttgttttatgaatagcattctccaatgcctctccaatacaagagaactgcgagattattgcctccagcggctctatatgagggacctgcaccatggttcaaacgctcatacagccttggtcgaggaatttgccaagttaatccagactatctggacctctagcccaaatgatgtggtcagcccctccgagtttaaaacacagattcagagatacgcaccacgcttcgtaggttataaccaacaagacgcacaagaattcctgaggtttctcctcgacggcctccacaatgaagtgaaccgggtgaccctgagaccaaaatcaaacccggagaatttagaccaccttcccgatgatgaaaaaggtcgacagatgtggcgtaaatatcttgaacgcgaggactcccggatcggcgacctgtttgtcggacagctgaaatctagcctgacttgcacagattgtgggtactgcagtacagtgttcgatccattttgggacctatccctgccaatcgctaagcgtgggtatccggaggtgaccttgatggattgcatgaggctcttcactaaggaggacgtactggatggcgacgaaaagcccacatgttgtcggtgcagaggacgaaaaagatgtatcaaaaaattttccatccaacgctttccaaagattctggttttgcatctgaaacgattttccgaaagccgaataagaacctcaaagctaaccactttcgtgaatttcccactgcgggatctcgatctccgggagtttgccagtgagaatactaatcatgctgtatacaatctctatgccgtttccaatcacagcggcaccactatggggggccactatacggcctactgtcgcagtccagggacaggcgagtggcatacctttaacgacagctccgtgacaccaatgtcctcttcccaagtgcggacttcggacgcctacttactgttttatgaattggcctctcctcctagcaggatgtag

SEQ ID NO: 17170 - DNA, 1800 bp, synthetic construct
  source 1..1800: mol_type = other DNA; note = Synthetic coding sequence
atggatcccggcgacgctgcaatcctggagtccagcctgagaatactgtatcgcttgtttgaaagtgtgcttccaccactgcccgccgcactgcagtctcgaatgaatgttattgaccatgtgcgcgatatggccgctgccgggcttcactccaatgttaggctcctgtcatccctgctgctgaccatgtctaacaacaacccagagctgttctcaccccctcagaaataccagctgttggtgtaccatgcagacagcctgtttcatgataaagaatacaggaatgctgttagcaaatataccatggctttacagcagaaaaaggcgttatccaagacatctaaggtgcggcctagtactggcaactccgcatctacaccccagtcacaatgcctccccagtgagatcgaagtaaagtacaaaatggccgagtgctacaccatgctgaaacaggataaggatgcaattgcaatcctggatggcattcccagtcggcagagaacccccaagatcaatatgatgctcgccaacctgtataagaaagccgggcaggagcgtccatccgtgaccagttacaaggaggtgctgcggcagtgtcccctagccctggacgcaatattagggctgctaagtctgagcgttaaaggggctgaagttgcatctatgaccatgaatgtgattcagaccgttcctaacctggactggctgtcagtttggataaaagcatacgcattcgttcacacaggtgataactctcgggcaatttcaacgatctgttcactagaaaagaagtccttactgcgagacaacgtggacctgctgggctccctggctgacctgtacttcagggcgggtgataataaaaatagcgtgctcaaattcgaacaggcccaaatgctcgatccatacctcattaagggaatggacgtctatggttacctcctagcacgcgaaggccggctggaagatgtcgagaacttgggttgtcgtctgttcaacataagcgaccaacatgcggagccgtgggtggtgtctggctgtcattctttctacagcaagcgatacagccgggctctttacctaggcgccaaggccattcagctgaatagtaattcagtgcaagccctcctgttgaagggggccgccctaagaaatatggggcgggtgcaggaggccataatccacttccgagaggcgatccgtctggccccttgccggcttgattgttacgaagggttgatagagtgctacctggcatcaaatagcatcagagaagctatggtcatggccaataacgtgtacaaaacactgggggccaacgcacaaaccctcacccttctggctactgtgtgtctcgaagaccctgtgactcaagagaaggcaaagacgcttcttgacaaggctctgacccagcgacccgactatataaaagccgtcgtgaagaaagccgagctcctgtcacgggaacagaagtacgaggacggtatcgcattgctgcgcaatgcacttgccaatcagtccgattgcgttctacatcgcattcttggtgacttcctggtggccgtgaacgaatatcaagaggcaatggaccaatactctattgcactgagcctggaccctaatgatcagaaaagtctggagggcatgcagaaaatggagaaagaggagtctcctacggatgctacccaggaagaggatgtggacgatatggagggaagtggagaagagggagacctcgaggggtcagattccgaagccgcacagtgggccgaccaagaacagtggttcggtatgcagtag

SEQ ID NO: 17171 - DNA, 507 bp, synthetic construct
  source 1..507: mol_type = other DNA; note = Synthetic coding sequence
atgcccgcgacgagaaagcctatgcgctacggacacaccgagggccatacagaagtgtgttttgacgacagtggcagcttcatcgtcacctgcggttccgacggcgatgtcaggatctgggaagatctggacgacgatgatccaaaatttattaatgtgggagaaaaagcgtacagctgcgcacttaaatccggcaaactggtgactgctgtgtcaaataatactatacaggtccacacatttcccgagggggtgccggatggtatcctgactaggttcaccacaaacgctaaccatgttgtatttaatggcgacgggacaaagatagcagcaggatcttccgattttctcgtaaaaattgtcgacgtaatggattcttctcagcagaagaccttccgggggcatgacgcccccgtgctgtctctgtccttcgaccccaaagacatatttctggcatcggcgagctgtgacgggtctgttcgcgtttggcagattagtgaccagtag

SEQ ID NO: 17172 - DNA, 141 bp, synthetic construct
  source 1..141: mol_type = other DNA; note = Synthetic coding sequence
atggtgaactcctgctgcggttccgtgtgctcagatcaagggtgcgggttggaaaactgctgccgcccttcttgttgtcaaacaacctgttgtagaactacgtgttgtaggcctctctgctgcgcaagctcctgttgttag

SEQ ID NO: 17173 - DNA, 669 bp, synthetic construct
  source 1..669: mol_type = other DNA; note = Synthetic coding sequence
atggcatccgtggttgagtataaaggcttgcgtgccggctaccattgcgggtattgcgatagcaaggagggcaaagcatcatgtggaatgtgggcccactccatgaccgtgcaggactaccaggatctgatcgatcgtgggtggaggagatcaggtaaatacgtatataagccagtcatgaatcaaacttgttgccctcagtacacaatcaggtgccggcccctccagttccagccttctaagagccacaagaaggtgcttaagaaaatgctgaaatttctagccaaaggcgaggtgcctaagggatcctgcgaggatgagcccatggacagcactatggatgatgcggtggctggtgattttgccctgataaacaagctggacatacagtgtgacttgaaaacactgtccgacgacattaaggagagtctggaatccgagggaaagaatagcaaaaaggaagagccccaggaactgctgcagtctcaggattttgtgggtgaaaaactgggctccggggagcccagtcacagtgtgaaggtgcacacagtgcctaaaccaggcaaaggcgccgatctctccaagccgccatgccgcaaggctaaggaaataaggaaggagcggaagcgcctgaaactgatgcaacaaaacccggctggcgagctgtag

SEQ ID NO: 17174 - DNA, 495 bp, synthetic construct
  source 1..495: mol_type = other DNA; note = Synthetic coding sequence
atgctcaaagccgtcattctgattggcggaccacaaaaaggaacacgattccggccattgtcattcgaagtacccaaacccctcttccctgtcgccggggtgcctatgatacagcatcacatcgaggcctgtgcccaggttccagggatgcaggaaatactgctgattggcttttaccagcccgacgaaccactgacacaattcctggaagccgctcagcaggaattcaacctgcccgtgcgctacctacaggagttcgctcccctgggcaccggtggcggcctgtatcatttccgcgatcagattctcgcggggtcgccagaggccttctttgtacttaacgctgatgtttgctcagattttccgttgtcggcaatgctggaggctcacagacggcagagacatccatttctattattgggtaccactgccaatcggacccagtcattgaattacggctgtatcgtcgaaaacccccagacccatgaggtttag

SEQ ID NO: 17175 - DNA, 339 bp, synthetic construct
  source 1..339: mol_type = other DNA; note = Synthetic coding sequence
atgttcgtgtctgattttcggaaagagttttacgaggtagtacaaagccagcgggtcctcctctttgttgctagcgatgtggacgccctttgcgcctgcaaaattctgcaagctttgttccagtgcgatcatgtccagtacacgctcgtgcctgtgtcaggctggcaggaactagagacggctttcctggagcataaggagcagtttcattattttattctcatcaactgcggagccaacgtcgaccttttagacatactacagccagatgaggacacaatattcttcgtttgtgacactcacagacccgtcaacgtggtcaacgtgtataatgactag

SEQ ID NO: 17176 - DNA, 942 bp, synthetic construct
  source 1..942: mol_type = other DNA; note = Synthetic coding sequence
accctggtggtctcaggtcgggatgatccaccaacacacagtcagcccgactcggatgacgaggctgaagagatccagtggagcgatgacgaaaatacagccactctaaccgctcctgagttcccggaattcgccacaaaggtgcaggaggcaattaactccctcggggggtcggtgttccccaaacttaactggtcagctccacgggacgcatactggatcgcaatgaactccagtctgaagtgtaagactttatcagatatctttctgctgtttaaatccagtgatttcatcactcgagattttacccagccctttatccattgtactgacgacagccccgatccttgcatcgaatacgagttagttctgagaaagtggtgcgagttgatccccggagctgagttcagatgcttcgtcaaggagaacaaattgattggtatatcccagcgcgattatacacagtactacgatcatatctccaagcaaaaggaagaaattcggcgctgcattcaggacttctttaaaaaacatattcagtataagtttctcgacgaggatttcgtctttgatatctatagagacagccgcgactctcccgcattccgctgcacaaattctgaagttaccgtgcagccctcaccttacctctcctatcgcctgcctaaggactttgtcgatctgtcaaccggggaggatgcgcataagttgattgataagtccgcgggcgggcgtctgatgagtgtcctggagctcgaaaaacggagacctcgtcccacagcgccaggagcagcccaccagccgcagttacctgctgatcccgatgccggcggtccatcttccgttgacatctcccactttctttactcctgcacattcacctggggaaagaagaggcgtgacttcgccacatgcaagaataacatcataaatcgtagttag

SEQ ID NO: 17177 - DNA, 1017 bp, synthetic construct
  source 1..1017: mol_type = other DNA; note = Synthetic coding sequence
atggaactgtggggaagaatgttgtgggctctgctgtccggccctggccgacgcggctcgacaaggggttgggcattctcatcctggcagcctcagccgccactggctggcctcagctccgccattgagctagtctctcactggacgggtgttttcgaaaaaagaggcatcccagaggccagggaatcatccgaatacatagttgcccacgtgttgggggctaagacatttcagtcactgcgccctgccctatggactcaacccctgacttctcagcaactccaatgcataagagagctaagttctcgacgtctgcagagaatgcctgtccaatacatattgggcgagtgggacttccaggggctgtcactgcgcatggtgcctcccgtgttcattccacggcccgagacagaggaactagttgagtgggtgctggaggaggtggcacagcggagccacgcagtgggatcacccggttctccgttgatcctggaggtgggatgtgggagtggggccatatccctttccctgctttctcagctgcctcaatctcgcgtcatcgccgtcgataagcgcgaagcggccatcagcctcacccatgaaaatgcccagcggcttcgactgcaagacaggatttggatcatccatcttgacatgacaagcgaacgcagttggactcatctgccctgggggccaatggatctcattgtgtctaacccaccttatgtctttcatcaggacatggagcagttagctcccgagattagatcttacgaggacccagccgctctggatggaggggaagagggaatggacataatcacccatatcttggcattagctccaaggctgctaaaggatagtggatccatcttcttagaggttgacccgagacaccccgagctcgtgagtagctggttgcagtcgcgaccagacctctacctgaatttagttgcagtaagacgggatttctgtggacggccccgcttcctgcacatccggaggtcaggaccctag

SEQ ID NO: 17178 - DNA, 1119 bp, synthetic construct
  source 1..1119: mol_type = other DNA; note = Synthetic coding sequence
atgaagcgcagaactgaccccgaatgtactgcccccatcaaaaaacagaaaaagcgcgtggcagagctggctctgagcctgtcgtctacctctgatgatgagcccccatctagcgtcagtcacggcgctaaagcctcaacgacctccctgtctggcagtgatagtgagacggagggcaaacaacacagcagtgactcattcgacgacgcctttaaggccgattctctggtggaaggcacctcaagtaggtattctatgtacaattccgtttcacagaagctgatggccaagatgggatttcgtgaaggcgagggcctgggcaaatatagccagggccggaaggacatcgtcgaagcatcaagccagaagggccggaggggactggggcttaccctaagggggtttgatcaggagttaaatgttgactggcgcgacgagcctgaaccctccgcctgtgagcaggtttcttggttccctgagtgtaccactgaaattcctgacacacaggaaatgtctgactggatggtggtcgggaaacgcaagatgataatcgaagatgagacagagttttgcggcgaagagctcctgcattccgtactccagtgcaaaaagccactggtcaaggaccgtgaagccgagctcctgtactttgccgatgtttgcgccgggccagggggcttctctgaatatgtgctgtggcggaaaaagtggcatgcaaaagggtttggaatgacacttaagggtccaaacgacttcaaactggaggatttttacagcgcctcatccgagctgtttgagccctattacggagagggggggattgacggagatggggatattaccaggccggagaacatcagcgcattccgcaatttcgtactcgacaatacagacaggaaaggcgttcactttcttatggctgatggtggcttctcggtggagggacaagagaacctgcaggagatattatccaagcagctcctgctatgccagttcttaatggccttgtcaatcgtaaggaccggaggccactttatctgcaaaaccttcgaccttttcacccccttcagcgttggcctggtttacctgttgtattgctgctttgaaagggtgtgctag

SEQ ID NO: 17179 - DNA, 408 bp, synthetic construct
  source 1..408: mol_type = other DNA; note = Synthetic coding sequence
tagcagctggcaagcatggtatggaataacccaagtcagcagcaatttatgcagttcggcgggagcagtggctcacaactgccccagatccagactgatgtggtgctccctagttgtaagaaaaaagcccctgccgaaactccagtgaaggagcggctcttcattgtctttaacccccaccctctgccccttgatgtcttggaggatatcttttgtaggttcgggaatctcatcgaagtgtacctcgtctcgggtaagaatgtcggctatgcaaaatacgctgacaggatcagcgctaatgacgcgatcgctacactccatggtaagatactgaatggcgtcagattaaaggtgatgctggcagactcccctcgggaagagagcaacaaaaggcagaggacatattag

SEQ ID NO: 17180 - DNA, 1764 bp, synthetic construct
  source 1..1764: mol_type = other DNA; note = Synthetic coding sequence
atggcgtctgaggacatcgcgaagttggctgaaacacttgcaaaaacccaggtcgccggagggcagctgtccttcaaagggaagtcccttaaacttaataccgctgaggatgccaaggatgtgataaaggagatagaagatttcgactccttagaagccttgaggctcgaggggaatacggtaggagtggaggccgctagggtgatcgccaaggccctcgagaagaaaagcgagctgaaaagatgtcattggtctgatatgttcaccggcaggcttaggaccgaaatcccaccagccctcattagcctgggggagggcctgattacagccggggcccaattagtagagctcgacctgtctgacaacgcttttggtcccgatggtgtgcaaggattcgaggctctcctgaaatcctcagcctgtttcactctgcaggaactcaaactgaacaattgcggaatgggcatcggtgggggcaagatcttggccgctgcactgactgagtgccataggaaatcatccgctcagggcaagcccctagcattgaaggtgttcgtcgccggcaggaaccgactcgagaatgacggcgccacagcattagctgaggcctttagggttattggcacccttgaagaggttcacatgcctcagaatgggatcaatcatcccggcattaccgctctggcccaagcatttgccgttaatccacttctgagagtcatcaatctgaacgataatacatttaccgagaaaggcgccgtggcaatggctgagaccctcaagaccctgcgtcaggtggaggtcatcaacttcggggactgtttagtgcgatcaaaaggggcagtggctattgcggacgccatccgtggggggctgcccaaattaaaggaactaaacctctccttttgtgaaataaagagagacgccgcccttgctgtggctgaagcgatggctgataaagccgagctcgagaagctggaccttaatggcaatactctcggtgaggagggatgcgagcagctccaggaagtcttggaagggttcaatatggctaaagtgttggcaagcttgtcagacgacgaagacgaggaggaagaagaggagggcgaggaggaggaagaagaggccgaggaggaggaggaggaggacgaagaagaggaggaggaagaggaggaagaggaggaggaggagcctcagcagcgtgggcagggagagaagagcgccaccccaagcagaaaaatcctcgaccctaatactggcgaacccgccccagttctttcaagcccacctcctgctgacgtcagtactttcctcgcttttccttcccctgagaaactgctccgactcggtcctaaaagctctgtgctgatcgcgcagcaaactgacacctctgaccctgaaaaggtagtgtccgctttcctgaaggtgtcaagcgtcttcaaggacgaggcgaccgtgcgaatggccgtccaggatgccgtcgacgctttaatgcagaaggcctttaactcctcttcctttaattcaaatacattcctgacacgcttgttggtgcatatggggctgctgaaaagcgaggacaaggtcaaagctattgctaacctctacggcccactgatggcacttaaccacatggtgcaacaggactacttccccaaagccctagccccactgctgttggccttcgttactaagcctaacagcgcactggaatcgtgttcctttgctaggcactctctcctccaaacactgtacaaggtgtag

SEQ ID NO: 17181 - DNA, 1842 bp, synthetic construct
  source 1..1842: mol_type = other DNA; note = Synthetic coding sequence
atggccactataccggactggaagctgcagttactcgctcggcgccggcaagaagaagcatctgttagaggcagggagaaggcagaaagagagaggttgtcccagatgcctgcttggaaacgcggcctgctcgaacgccgacgggccaagctcgggttatccccgggggaacccagtcccgtgctgggaactgtggaggctggacctcccgacccggacgagtctgccgtgctattggaggcgattgggccggtgcaccaaaaccgctttattcggcaggaaagacaacagcaacaacagcagcagcaacgctccgaggaactcctggcggagcggaaacctgggcctctggaggcacgagagcgaaggcccagccccggagaaatgcgagatcagtcacctaaaggaagggagagccgagaggaaaggctgtctccccgagagactcgggagagaagattagggattgggggcgctcaggagcttagtctgcggcctctagaggcacgagattggaggcagagccccggcgaagttggagatcggagtagccggctttcagaggcgtggaaatggaggctatctccaggtgaaactcctgaaagaagcctgcgcctggcagaaagcagggagcaatctcccaggcgcaaggaggtggagagtagactaagtcctggtgagtcggcctatcagaaacttgggctcaccgaggcacacaagtggagaccagacagtagggaatcccaggagcagtcccttgttcaactagaggccacagagtggagattgcgtagcggcgaagagaggcaggattattctgaggagtgcggcaggaaggaggagtggcctgtgccgggagtggcacccaaagagactgcggagctctccgaaacactaactcgtgaagcccagggcaactcgtccgctggtgtggaagccgccgaacagcgacccgtggaggacggggaaagggggatgaaaccgactgagggctggaagtggacactgaactccggaaaggctcgcgagtggacacccagagacattgaagctcagactcagaagcctgagcccccggaaagtgccgagaaattgttggagagtccaggagtggaagcgggcgagggcgaagctgagaaggaagaagcaggcgcccagggtaggcccttgcgtgccctgcaaaattgttgctctgtcccttctccactgccacccgaggacgccggaacaggaggccttcgtcagcaggaagaggaagctgtcgaactacaaccaccccccccagcccctctgtcgcccccaccgcctgcaccaactgccccccagcctcctggagacccattgatgtccagacttttctatggggtgaaagcaggtcccggggtcggagctccccggcggagcggccataccttcaccgtgaaccctagaaggagtgtgcctcccgctacccccgccaccccaaccagtccagctactgttgatgctgccgtgccaggcgctggcaaaaaacgataccctactgcagaagaaatcctagtccttggggggtacctgcggttgtccaggtcatgcctggccaaaggatctcctgagagacaccataagcaacttaagatcagcttttcggagaccgctctcgaaacaacataccagtacccttctgagtcatcagtgctggaagagttgggaccggaacccgaagtgccgagcgcgccgaacccgcccgctgctcagcccgatgatgaggaggatgaggaggagttgctgctattgcagccggaactgcagggcggtctgcggactaaagctctgatagttgatgaatcttgtaggcggtag

SEQ ID NO: 17182 - DNA, 477 bp, synthetic construct
  source 1..477: mol_type = other DNA; note = Synthetic coding sequence
atgacccactgctgcagtccctgttgtcaaccaacttgctgcagaaccacatgctgtcgcactacctgctggaaaccgaccaccgtcaccacctgctcttccaccccatgttgccaacccgcttgttgtgtgtcctcttgttgtcagccttgctgcagacccacatgctgccagaatacctgttgtaggacaacatgctgccaacccacttgtcccacctgttgcggttcctcatgctgcggacagacatcatgtggctctagctgcgggcaaagttccagttgcgcgccagtctactgccgacggacctgctattaccccacaacggtatgccttcctgggtgtcttaatcagtcatgcgggagcaactgctgccagccttgctgtaggcccgcttgctgtgaaactacctgctgccgaaccacttgtttccaacccacctgcgtgtctagctgctgtcagcctagttgttgctag

SEQ ID NO: 17183 - DNA, 1620 bp, synthetic construct
  source 1..1620: mol_type = other DNA; note = Synthetic coding sequence
atggccacctccgcccccctacgttccttggaggaagaggtgacatgctcaatttgcctagattacctacgcgatcctgtaacaattgattgtggccacgtgttctgtaggtcctgcacaaccgatgtccggccaatatctgggagccgaccagtctgcccgttgtgcaaaaaacccttcaagaaggagaatatacgccccgtttggcagctggcaagtcttgtggagaacatcgagagactgaaggtcgataaagggcgtcagcctggagaggtcacaagagagcagcaggacgcaaaactatgtgagcggcacagagagaaactccattattactgcgaggacgacggcaagcttctgtgcgttatgtgtagagaatcacgtgagcatcggcctcatacggccgtcttaatggagaaggctgctcaaccacatcgagagaaaatcctcaatcacctgagcaccctccgaagggatcgcgataagatccaggggtttcaggccaagggcgaggccgacatcctagccgcactgaaaaagctgcaagaccagcgtcagtatatcgtggccgagttcgaacagggccatcaattcctaagggagagagaggaacatcttcttgagcaactcgccaaacttgagcaggaactgacagaggggcgggagaaattcaagagccgcggcgtgggcgagctcgcacgtctcgctcttgtaatatctgaactcgagggaaaggctcagcagccagctgcagagctgatgcaggacacacgggatttcctcaatcgttacccccgcaaaaaattctgggtgggtaaacccatagcccgcgttgtgaagaaaaagacaggagagttcagcgataaactactgtctctccagaggggattgagagaattccaaggaaaactcctgcgtgatttggagtacaaaaccgtgtcggtgactttggacccccagagcgcatcaggttacttgcaactctctgaggattggaagtgtgtgacatatacatcattatataagagcgcctaccttcaccctcaacaattcgattgcgaaccgggagttttgggatctaagggatttacgtggggcaaagtgtactgggaagtggaggtggagcgtgagggctggagtgaagacgaggaggagggcgatgaagaagaggagggcgaagaagaagaggaggaggaagaagccggctacggcgacgggtatgacgattgggagacggacgaagatgaagagagcctaggcgacgaggaggaggaggaggaggaagaggaagaagaggtcttggagtcctgtatggtcggtgttgcccgggacagtgtaaaacgaaagggagacctttcccttcgacccgaagatggcgtgtgggccctgcgattgtccagcagcggcatttgggcaaatacatcccccgaggccgagttgtttcctgctctgcgcccccggagagtgggtatcgccctggactacgaaggcgggactgttacattcacaaatgccgaaagtcaagagctgatttatacctttacggctacctttactaggcgattggtgcctttcctgtggctgaagtggcccgggactcggttgctgttgagaccctag

SEQ ID NO: 17184 - DNA, 2511 bp, synthetic construct
  source 1..2511: mol_type = other DNA; note = Synthetic coding sequence
atggcagctgccctgggcccgcctgaagtaatagcccagctcgagaacgccgcgaaagttttaatgcagactttggcatgttccatcctgaccgccctgttgtccgaattctctagctcttcaaaaacctccaatattggactgtcaatggagttccatggaaattgcaaacgggtcttccaggaagaagatttgcggcagattttcatgctgaccgttgaagtgctgcaggagttcagccgaagggagaacttgaatgctcaaatgtcttccgtgttccaaagatacctggccctggcaaatcaggtgctaagctggaatttcctcccccctaaactcggcaggcattacattgcaatgttcgagagcagccagaatgtgctcttaaagccgactgaatcctggcgtgaaaccctgcttgattctagagttatggagctgtttttcactgtgcatagaaaaattcgggaggattctgatatggcccaggatagtttgcagtgcctcgcccagctcgctagtttacatggccctatctttccggacgaaggtagccaggtggactatctggctcactttatcgaaggccttctcaatacaattaacggaattgaaattgaggacagcgaggctgtgggtatctcttcgattatttcaaatctgattaccgtcttcccccgtaatgtattaacggccatcccttctgaactgttctctagttttgtgaactgtttaacccacctaacatgtagcttcggacgatcagcagccctcgaagaggttctggataaggacgacatggtgtacatggaggcttacgataagttattggaaagctggctgactctggtgcaagacgacaagcattttcataaagggttcttcacccagcatgccgtccaggtttttaactcctatattcagtgtcacctcgccgccccggacgggacgcgaaacctaaccgctaacggcgttgcttcgcgggaggaggaagagatttcggaattgcaagaagacgacagggaccagttcagcgatcagttagcctcagttggtatgttagggcgcatcgccgcagaacactgcattccccttctgactagcctcctcgaggagagggtaactagactacacgggcaactccaacggcatcaacagcagcttctggcatccccgggcagttccactgtagacaacaagatgctggatgacctttacgaggatatccactggctgatcctcgtcacaggttatctactggccgacgacacccagggtgagacacctctaattccccctgagatcatggagtatagcataaaacactcttctgaagtggatatcaatacaactttgcaaattttgggaagtcccggtgaaaaggcctcctctatccctggctacaacaggactgacagtgtgatcaggctcctgtcggcaatcttacgcgtgtcagaagttgagagccgcgccataagagcggatctgacccacctgctgtccccccagatggggaaggacatagtgtggttcctcaagcgctgggccaagacatatctcctcgtggatgaaaagctgtacgatcagataagcttgccgttctccactgccttcggcgctgataccgaggggtcccaatggattatcggctacctgctgcagaaagttatctcaaacctctcagtgtggagctctgagcaggacttggcaaacgacaccgttcagcttcttgtgacactggttgagagaagggagcgcgccaatcttgtcattcaatgtgagaattggtggaacttagctaagcagtttgcctccagaagtccacctctaaatttcctctcctcacccgtgcagagaacactaatgaaggctctggtcctgggcgggttcgcccacatggacaccgagaccaagcagcagtattggacggaagttcttcaaccactccaacagagatttctgagggtcattaatcaggaaaactttcaacagatgtgtcaacaggaggaagtgaaacaggagatcactgctacactggaagccctgtgtggtatcgctgaagccacccaaatcgataatgtggccatcttgtttaatttcctgatggactttctgaccaactgcatcggattaatggaagtatacaaaaacacccccgagactgtcaacctgatcatagaggtctttgttgaagtggcccacaaacaaatctgctatctgggcgaatctaaggcgatgaacctgtacgaggcttgtctgacactactccaagtctactctaaaaacaatttaggccgccaacgcatcgatgtgaccgcagaagaggagcagtaccaagacctgctgttgatcatggagctactgacaaatcttctgtcaaaggaattcatcgattttagtgataccgatgaggtgtttcgggggcacgaacccggacaggcggccaatcgttctgttagtgcagctgacgttgtactctatggagtgaaccttatcttgccactaatgtag

SEQ ID NO: 17185 - DNA, 1008 bp, synthetic construct
  source 1..1008: mol_type = other DNA; note = Synthetic coding sequence
atggacttcttgttgggcaatccgtttagcagccccgtcgggcagcgcatagaaaaagctaccgacggcagcctccagtcagaggactgggccctcaacatggagatctgtgatatcataaacgaaactgaagaagggcccaaagacgctcttagggccgtcaaaaaacgaattgtgggtaacaagaacttccacgaggttttggaaacctgtgtgaaaaactgcggacataggttccatgtcctggtggcttcccaagacttcgtggaatccgttctggtgagaacaatactgcctaagaataatccacctaccattgtgcacgataaagtccttaacctcatacagtcctgggccgacgcttttagatcatcacccgatctcactggcgttgttacgatttatgaggatctaaggagaaagggcttagaattccccatgaccgacctcgatatgctatcgcctatccataccccacaaagaaccgtctttaactcggagacacagtctgggcaagactcagtgggcactgacagttctcagcaggaagacagcggtcagcatgccgcacctctgcccgctccacccatcctctctggtgatactcccatcgcccccactcctgagcagatcggcaagctacgctctgaactggagatggtgtctgggaacgtgcgtgtgatgtcagagatgctgactgaactcgtgcctacgcaggctgagcccgctgacttagagctattacaggagttaaaccgaacatgcagagcaatgcaacagcgcgtactagagctgattccacagatcgctaatgaacagctcacggaggagctgctaatcgtgaatgacaatttgaacaacgtgtttcttcggcatgaacgcttcgaacggttccgcactgggcagaccacgaaagcacccagtgaagccgagcccgccgccgatctgattgacatgggcccagatcctgccgctacgggaaatctgtcaagtcagcttgccggatag

SEQ ID NO: 17186 - DNA, 5193 bp, synthetic construct
  source 1..5193: mol_type = other DNA; note = Synthetic coding sequence
atgggcaactctgactctcagtatactctgcagggatccaagaatcacagtaatactatcaccggggcaaagcagattccctgctctctgaaaataagggggattcatgcaaaagaagaaaaatcactccacggttggggacatggatctaatggcgcgggctacaaaagtcgttccctggctcgatcatgcctgtctcacttcaagtcgaaccagccctatgctagtcgactggggggacccacctgtaaagtgtctagaggagtagcttattccacacatagaacaaatgcaccagggaaagactttcagggcatctcagcggcgttttcaacagagaacggtttccactcggtcgggcacgagctcgctgataaccacatcacttcacgagactgcaatggccacctactcaactgttatggtagaaatgagtccatagcaagtaccccccccggtgaagacagaaagtccccccgagtcctgattaaaacgctgggtaagctggacgggtgcttaagggtggagtttcacaatggcgggaatccctccaaggtgcccgccgaggattgcagcgaacccgtccagctcctgaggtactcccctacactagcttctgagacgtctcccgtgccggaggctaggaggggctccagcgcggattcgctgcccagtcataggcctagtcccacggactcgagactcagatccagtaagggcagttctctgtcaagtgagagtagttggtatgacagtccctggggtaacgccggcgagctctcagaggccgaaggcagctttctcgcacctggcatgcctgacccaagcctccacgcctcattccctccgggtgacgcaaaaaagccgttcaatcagagttcttctttgagttccctgcgcgaactttacaaggatgccaacctcggctctctctcgcctagcggcattcgattatccgacgagtatatgggcacacacgcctcactctccaatcgcgttagcttcgcttcagacattgatgtgccttcaagagtcgcccatggcgatcctatccaatattctagtttcactctcccttgcaggaagccaaaggcctttgtagaagacacagccaagaaggactctttaaaagcaagaatgaggcggattagcgactggacaggcagtctgtccaggaagaagaggaaactccaggaacccagaagcaaagaaggcagtgattacttcgacagccgctctgacggcctgaatacagatgtgcaaggcagctcacaagcttctgccttcctgtggtctggtggaagtacgcagattctgtctcagagatcagaaagtacccatgccatcggatcagatccactgcggcagaacatatatgagaactttatgcgggaactcgaaatgtcccgtacaaacactgaaaatattgagacaagtacagagactgccgagtcctctagcgagagtctatccagcctggaacagctggacttactgtttgagaaagaacagggcgttgtccgcaaggccggatggttgttctttaagccactcgttaccgtgcagaaagagcgcaaattagaactggttgcgcggcgaaagtggaagcagtactgggtgaccttaaagggatgtactctgcttttttacgagacctacggtaaaaactctatggaccagtctagtgcaccacgatgcgccctttttgccgaagactccattgtgcagagtgtgcccgagcaccccaagaaagagaacgtgttttgtcttagtaactctttcggtgatgtgtacctctttcaagcaacgtctcagactgacttggaaaattgggttacggccgttcatagcgcctgtgcaagtttattcgcgaaaaaacatggaaaagaggatactctgcggttgctcaaaaatcaaactaagaacctgttgcagaagatagacatggatagtaagatgaaaaaaatggctgaactgcagctcagtgtggtgtcagatccaaagaatagaaaggcaatcgaaaaccaaatacagcagtgggaacaaaatctcgaaaagttccatatggaccttttccgcatgcgctgctatctcgcctcactgcagggcggcgaactcccaaaccccaaaagcctgctggcagcagcctcacggccgtcaaagttagcacttgggagactggggatcctctcagtcagcagtttccacgctctggtgtgttcgcgcgatgattcggcccttcggaaaaggacgttatcactcactcagagaggtcggaacaagaaaggaatcttctcatccctgaagggtctcgacactctggctcggaaggggaaagagaaacgaccatcaattacacaggtggacgaactgctgcacatatacggtagcacagtcgatggcgtcccccgagacaacgcttgggagattcaaacttatgtccatttccaggacaaccacggggtcactgtggggatcaagcccgagcatcgggtagaggacattctgaccctggcctgcaagatgagacagctggagccatctcactatggccttcagctccggaagctcgtcgacgacaacgttgagtactgcatccctgctccatatgagtacatgcagcaacaggtgtacgatgaaattgaggtgttcccactaaacgtgtacgatgtgcagctgactaagaccggatctgtgtgtgactttggattcgctgttaccgcacaggtggatgaaagacagcatctgtccaggatctttatctcagacgtgctgccagatggcttagcatatggcgaaggcttacgaaagggcaacgaaatcatgacccttaacggggaagctgtaagcgacctcgacttaaaacagatggaagctcttttttcagagaagagtgtgggactcaccttaattgcgcggccaccagacactaaggccaccctctgcaccagctggagtgattccgacctgttctcccgcgatcagaagtctttgctcccaccaccgaatcagtcacagctactggaagaattccttgacaacttcaagaagaataccgcgaacgattttagcaatgtgcccgacatcacaacaggtctcaagagaagccaaacggatggtacactagatcaggtgagccatagagagaaaatggagcagacatttaggagcgccgagcaaatcaccgcactgtgcagaagcttcaacgactcacaggccaacggcatggagggcccaagagagaatcaggatccccctccccggtcccttgctagacatctcagtgacgctgatagactgcgtaaagtaatccaagaattagtggacacagagaaaagctacgtgaaggacttgtcgtgtctgttcgagctataccttgaacctcttcaaaatgaaacttttctgacgcaggatgagatggaaagcctattcggatcactgccagaaatgctggaattccagaaagtcttcttagagacgctggaggacggcatctcagctagctctgacttcaacacactcgagacaccatcccagttccgaaagctccttttctctctcgggggctcttttctttattatgcagaccacttcaagctgtactccggattttgcgccaaccacatcaaagttcagaaggtgttggagagggcaaagaccgacaaggcgtttaaggcgtttctcgatgcacgtaatcctacgaagcagcatagcagtactctcgagagttatctgatcaagccagtgcaacgggtcctcaaatacccccttctcctgaaggaattagtctcactgacagaccaggagagcgaggaacactaccatctgactgaagccttgaaggccatggagaaggtggcatcccacattaacgaaatgcagaagatttacgaggactatggaaccgtgttcgatcagctggtagccgagcagtctggtaccgaaaaggagcaaccagagtggtcttctgaagtcatggatgtgttagacccccgtggtaaactgaccaaaggaactctggaggaaccgagaacactggtgacagagctctcaatgggcgagctgctgatgcatagtaccgtaagctggctcaaccctttcctctcgttaggaaaggccagaaaagacctggagcttacagttttcgtgtttaaacgggccgtcatcctggtgtacaaagagaactgcaagttgaagaagaaactgccctccaattcccggccagcccacaacagcacagatctggacccattcaaatttaggtggttgattccgatctccgcacttcaggtgagactgggtaacccggcgggaactgaaaacaattcaatctgggagctcatccataccaaatctgaaatcgagggccgtccagagaccatcttccaactgtgctgcagcgacagcgaaagtaagacaaatattgtgaaagtgattagatcaatccttagggaaaatttcaggcgacacataaaatgtgaactgcccctggagaaaacttgcaaagacagactggttcccctgaaaaatagagtccccgttagcgctaagcttgccagcagtcgctccctgaaagtgttaaagaatagcagctctaacgagtggaccggagagaccgggaaggggacgctcctggattccgacgaaggatctctctcctctggaacccagagctccggctgtcccacggctgaggggagacaggacagtaagagcacatcacctggtaaatacccccacccaggattagccgattttgcggataatcttattaaagagtccgacatcctgtctgacgaagacgatgaccacagacagacggtcaagcaggggtccccaactaaagacatcgagattcaattccagcgcttacgcatttcggaggaccctgatgtccaccctgaagctgaacaacagcccggcccagagtccggggaggggcagaagggaggggaacaacctaagttggttcggggtcacttctgtccaatcaagcgcaaggcaaattcaactaagagagatagaggcactctgctgaaagctcagatccgacaccaatcactcgactctcaatcagaaaacgcgactatagacctaaatagcgtgctggaacgggaattttccgtacagagcctcacgtctgtggtcagcgaagagtgtttctatgagaccgaaagtcacggcaaaagctag

SEQ ID NO: 17187 - DNA, 348 bp, synthetic construct
  source 1..348: mol_type = other DNA; note = Synthetic coding sequence
atggccccagctaagaagggtggagagaagaagaagggccgtagcgccattaacgaagtagtcaccagagaatataccatcaatatacataagcggatacacggagttgggtttaagaagagggccccgcgtgcactcaaagagatacgcaagttcgctatgaaggagatgggcactcccgatgtgcggatagacactagactcaataaagctgtttgggctaaaggtatccgaaacgttccctaccgcattagagtgcggttgtccagaaaacgaaatgaagatgaggactcacccaacaagctgtacactctcgttacctatgtccctgtgacaacatttaagtag

SEQ ID NO: 17188 - DNA, 747 bp, synthetic construct
  source 1..747: mol_type = other DNA; note = Synthetic coding sequence
atggcattagaggtcggcgatatggaggatggacaactgtccgactctgacagtgacatgaccgttgcaccctcagacaggccgttgcagctgcctaaagtgctcggtggcgactctgcaatgcgagctttccaaaatactgctacagcctgtgcccctgtctcccactacagggccgtcgagagtgtggattccagtgaggaatccttcagtgacagtgacgatgactcgtgcttgtggaagaggaaaagacagaaatgctttaatccacctcccaagccggaaccttttcagtttgggcagagttcccagaagccacctgtagctggcgggaagaagataaacaacatttggggggctgtgctgcagaagcttcgaaaagaaagccaggagcacacaaaagacctggataaggaattggatgagtacatgcatggaggcaagaagatgggcagtaaggaggaggagaacggccagggtcacctgaagaggaaacggcccgtgaaggatcggctgggcaaccgtccagaaatgaattacaaggggcgctacgaaatcacagctgaagactcccaagaaaaggtagcagatgaaattagcttcaggctgcaggaacctaagaaagacctgattgcacgagtggtccgcaacaagctccgtactttctccactctcaaaaccaagcgaaatatgaaaataaaaaagttactggggcgaggcgagcacaaatgctgggggaagaggtag

SEQ ID NO: 17189 - DNA, 78 bp, synthetic construct
  source 1..78: mol_type = other DNA; note = Synthetic coding sequence
atggccatggctccttcacccagtctagtgcaggtgtatacttcaccagccgctgtcgccgtgtgggaatggcagtag

SEQ ID NO: 17190 - DNA, 171 bp, synthetic construct
  source 1..171: mol_type = other DNA; note = Synthetic coding sequence
atgagctattatcagaggccgttttctcccagcgcttacagtctgcctgcaagcctgaattcttctatcgtcatgcagcacggaacttccctggacagtaccgatacatacccccaacacgcccagagcctggatgggactacctcttcctctatccccctgtacaggtag

SEQ ID NO: 17191 - DNA, 450 bp, synthetic construct
  source 1..450: mol_type = other DNA; note = Synthetic coding sequence
gtcagggaactggaagcggaactggacgccgaacagaagaagcacgccgaagctctgaagggcgtcaggaagcacgaacgccgcgtgaaggaactggcatatcaagccgaagaggataggaagaacctggctagaatgcaggacttggtcgacaaattgcaatctaaggtgaaaagttataaaaggcagtttgaggaagctgaacaacaagctaatactaatctagctaaatatcggaaggcccagcacgagctggatgatgccgaggaacgggcagatatggctgaaactcaagcgaataaactgcgcgcccggaccagggacgctctcgggcccaaggtgcgaagtggccggggtatcgctctatgtgcgggggggctgtggggactcacaggatctaccgctcactcagccattcccttctccagcgcgcaaggtgtgactgcatag

SEQ ID NO: 17192 - DNA, 468 bp, synthetic construct
  source 1..468: mol_type = other DNA; note = Synthetic coding sequence
tccaacgtgatggaagcgaacgctgccagacaagcaactccagctgaatggagccaggacgactcaaatgatatgtgggaggaccaggaagaggaagaggaagaagaggaggatggtttggctgggcagctcctctcagatatactcgcaactagcaaatacgaggaggactactacgaagacgatgaggaggatgatcccgatgcgttaaaagaccccctttaccaaattgatctgcaggcaaccctcatgaccatgcggggtgagttctacagaccttctgcaagtaaaaagggcagtctgagtacttttgccccttctggacccgcggcgaatcattttgcggccctaacagggctagagatgcatttccttctcaacctcaaatggcatctggatccctggcctctggcttccgccgtaactctgatgacaatccagactcggcttacaggggcggtgacgtag

SEQ ID NO: 17193 - DNA, 1620 bp, synthetic construct
  source 1..1620: mol_type = other DNA; note = Synthetic coding sequence
atggcaacatcagctcccctccgctccttagaggaggaggtgacatgctccatttgtcttgactacttacgggaccctgtgacaattgattgcggacatgtattctgtcgtagttgtactactgatgttcgtcccatatccggcagtcgccccgtttgtcccctctgcaagaaacccttcaaaaaagagaatatccgtcccgtgtggcagctagcgagcctggtcgagaacatagagcggctgaaggtggacaagggcaggcagcctggtgaggtcaccagagagcagcaagatgcaaaactctgcgagcggcatagggaaaaactccactattattgcgaggacgacggtaaactgctctgcgtgatgtgcagagaatcaagagaacacaggccgcatacagcggtgctcatggagaaagcagcacagccacatagggaaaagattttaaatcatctgagtaccctcagacgggatcgggacaagatccaaggcttccaagcgaaaggagaggccgatattcttgcagcactgaagaagcttcaggatcaacggcaatacatagttgcagaatttgagcagggtcatcagtttcttcgggagcgcgaggaacatttgcttgagcagctggcgaagctcgagcaggagcttacagaggggagggagaagtttaagtcacgcggagtaggcgagctggctcggctggctctcgtgatttcggagctggaaggaaaggcccagcagcccgctgctgagctgatgcaggatactcgtgactttttgaatcgatatccgaggaagaagttttgggtggggaaacctattgcccgggtggttaagaagaagaccggtgagttctccgacaaactcctgtcactccaacgggggctgagagaattccagggtaagcttttaagagacctcgagtacaagacagtgtctgtgactctggatccacagtccgcgagcggctacctgcagctcagtgaagactggaagtgcgtgacttacacctcgctctataaaagtgcttacctgcatccacagcagtttgattgcgagcctggcgtgctgggaagcaaaggcttcacctgggggaaggtgtattgggaagtcgaggttgagcgggaaggatggtccgaagatgaggaagagggtgatgaagaggaagaaggagaagaggaagaggaggaggaggaagcaggatacggcgacggatatgacgactgggaaacagacgaggatgaagagagcctgggagatgaagaggaagaggaagaagaggaggaggaagaggtgctggagtcatgtatggttggggtagcccgagatagcgtaaagcgtaagggggatcttagcctgcggccagaagacggggtatgggccctcagactttcttcttcaggcatttgggctaacacaagtcccgaagccgagttgttccccgccctcagaccgcggagagtgggaatcgccttagactacgaagggggaacagtcacgttcactaatgcagagtctcaggaacttatttataccttcacggcaactttcactaggcgtttagtgcctttcctctggctgaagtggcccggaactcggcttcttctgagaccctag

SEQ ID NO: 17194 - DNA, 645 bp, synthetic construct
  source 1..645: mol_type = other DNA; note = Synthetic coding sequence
atgccttcaccctgggggtggttcgccgtaactgcgtgtggtgctcagcggaacaattttgaagagcctgtagctctgcaggaaatggacacttctaatggagtgctattgcctttctacgatcccgactctagtatcgtatacctgtgtggaaagggcgactcctccattcgttatttcgaaataaccgatgaacccccattcgtacattatcttaacacattctctagcaaagaacctcaacggggaatgggattcatgcccaaacgagggttggacgtctcaaagtgtgaaatcgcacgtttttacaagctgcatgagcgtaagtgtgaacccatcattatgaccgtgcctcggaaaagtgatctgttccaggacgccgagcctgtgctcatctcattaagagacgggtatgtccctcctaagcatagagagctccgggttacgaaacgcaatatactggacgtgcggcccccatcgggaccccgtcgatcacaatccgctagcgacgctccgctgtcacagcacacattagaaaccctgctagaggaaatcaaggcgcttagagaaagagtgcaggcacaggagcagagaattactgctctggaaaacatgctgtgtgagctggttgatggcactgattag

SEQ ID NO: 17195 - DNA, 690 bp, synthetic construct
  source 1..690: mol_type = other DNA; note = Synthetic coding sequence
atgctgcagctgcgcgattccgtcgactccgcgggaacatcacctactgcagtgctggccgccggagaggagcccggaagcatcgaacaagctgttgaagaaataagggttgtagttcgacctgtggaggacggggagatacagggcgtatggctgctaaccgaggtggaccattggaacaacgaaaaagagcggctggtcttagtcaccgagcagtcgttgctgatatgtaaatacgattttatttcactacagtgccaacaagtggtacgtattgccctgaacgcagtcgacactatctcctatggcgaatttcagttcccacctaagagcttgaacaagagagagggattcggcatcagaattcagtgggataaacagagtcgaccatccttcatcaataggtggaacccttggagtaccaatgttccatacgcaacatttacagaacaccccatggccggcgccgacgagaaaacagctagcctgtgccagctcgagtccttcaaggcgctgcttatccaggccgtcaagaaggctcagaaagagagcccactcccgggacaggctaatggagttctcatcttggaacggcctctgttaatcgaaacctacgtggggctgatgagctttatcaacaacgaggccaagcttggttactcgatgaccaggggtaagataggtttttag

SEQ ID NO: 17196 - DNA, 390 bp, synthetic construct
  source 1..390: mol_type = other DNA; note = Synthetic coding sequence
atgtgcgaagtctcacgcggctggaaaccatgcacagaaggtattctaaaagtgcgtccaacacggaagatctcttacgaagggaatattacccccaccgtggagctaaatgccctttgcatgaagctggggaaaaaacctatgtacaaacctgttgatccctattctaggatgcagtccacctacaattacaatatgaggggaggggcctacccgcctcgctacttttacccttttcccgtccctcccctgctgtaccaggtggagctgagcgtggggggacaacagtttaatggtaagggtaagacgcgacaggctgccaaacatgacgccgctgccaaagctctccgcatccttcaaaacgaacctttacctgagcgcctcgaatag

SEQ ID NO: 17197 - DNA, 3042 bp, synthetic construct
  source 1..3042: mol_type = other DNA; note = Synthetic coding sequence
atggacctctttaggatgcggtgctaccttgcctccttacaggggggggagctcccaaacccgaaatcattgctggccgccgcctcccgccccagtaagctggcactgggcaggctgggcatacttagtgtgtctagttttcatgctcttgtttgctctcgggatgattcagcattacgtaagcgaacactgtccttgacacagcgaggtaggaataaaaagggcatcttttcttccttgaagggacttgatacgctggccaggaagggaaaagaaaagagaccaagtatcacccaggtggacgagctgctccacatttatggatcaacagttgacggggtgccgcgagataacgcatgggaaatccagacttacgttcacttccaggacaatcacggcgtgactgttggaatcaagcctgagcaccgcgtcgaggatatactaacactggcttgtaaaatgcgccagctcgagccttcacactacggcctccaattgcgtaagctggttgatgacaacgttgaatactgcatccccgccccgtacgagtatatgcagcagcaagtttatgatgagatcgaggtgtttcccttaaacgtgtacgacgtccagttaaccaagacaggatcagtgtgcgatttcggattcgccgtaactgcccaagtcgatgagcggcagcacctcagtagaatctttatctccgatgttttgccagatggtctggcttacggcgaaggtctgagaaaaggcaatgaaatcatgacacttaacggcgaggcagtatccgatctggacctgaagcagatggaggcactattctcagagaaaagcgtggggttaacgctgattgcccgaccccccgatactaaagcaacactctgcacatcctggtctgacagtgatctcttctccagagaccagaagagcctgctgcctccacctaatcagtcccagttgctggaagaatttttagataatttcaaaaagaatactgccaacgactttagtaacgtgccagacattaccacaggccttaagcggtctcagaccgacgggacgctggaccaggtatctcaccgcgagaagatggaacagacctttcgcagcgcagagcaaatcacagctctttgtagatctttcaatgattcgcaagccaacggcatggaaggcccccgcgagaaccaggaccctccaccaaggtctctagccagacacctgtcagatgccgaccggttacgcaaggttatacaagaactggtggacactgagaagagctatgttaaggatctgtcatgtctgtttgagttgtatcttgaaccgttgcagaatgagaccttcctcacacaggatgaaatggagagtcttttcggtagcctccctgaaatgctggagttccagaaagtctttctcgaaaccctcgaggacggaattagtgcttcgtccgatttcaacacactggaaactccgtcacagtttaggaaattgttgttttcacttggaggctcctttctttactatgcagaccattttaaattatacagtggcttctgcgccaatcatatcaaggtgcagaaagtgctggagcgagcaaagaccgacaaagccttcaaagcatttctcgatgccaggaacccgactaaacagcacagcagcacccttgagagctacctgatcaagccagtccagcgggtcctgaagtaccctctgttgctgaaagagctagttagtctgaccgaccaggagtctgaagagcactaccacctgaccgaagcgctgaaagcaatggagaaggtcgcctctcatattaacgagatgcaaaaaatttatgaggactatggaaccgtgtttgaccagctggtggcagagcagagtgggacagaaaaggaagtaactgaactgtctatgggagaactgctcatgcattccactgtaagttggcttaacccattccttagtctggggaaagcccgcaaggacctggagcttaccgtatttgtgtttaagagagccgtaattcttgtctacaaggaaaattgcaaacttaaaaagaaactcccatcaaactcccgacctgcccacaattctaccgacctggacccttttaagtttcgctggttgattcctatatccgctcttcaagtaagactggggaaccctgccggcacagagaataacagcatctgggaacttatccatacgaaaagcgagatcgaagggcggccagagaccatctttcaactgtgctgttcagattctgaaagcaaaacaaacatagtgaaagtgatcagatcaattttgagagaaaacttccgtcgccatataaagtgtgaacttcctcttgagaagacctgtaaggaccggctggtgcccttaaaaaacagagtcccagtttccgctaaactcgcaagctcccgctctctcaaagtactgaaaaactcgtcgtccaatgaatggactggagaaaccggcaaggggacccttctggacagtgacgagggcagcctcagctctggcacacaaagttccgggtgtccgaccgccgaaggccggcaggacagtaagtccacatctcctgggaagtacccacaccccgggctcgccgatttcgcggataacctgatcaaagagtccgatatcctttctgatgaggacgacgaccaccggcagacagttaaacagggctcacccaccaaagacatagagatccagttccagagactgcgcattagcgaagacccagatgtgcatcccgaagctgaacagcagccaggacctgaatccggcgagggccagaagggcggtgagcaaccgaaactggtgagggggcatttttgccccatcaagcgaaaggcaaattcaaccaagagggacaggggcacactgctcaaggcacagattaggcatcagagtcttgattcccagagcgaaaatgctacgattgatctcaacagcgttctcgagagagaattctcagtgcaaagccttacatctgtggtgtcagaggaatgcttttacgaaacagagtcacacggaaaatcttag

SEQ ID NO: 17198 - DNA, 1149 bp, synthetic construct
  source 1..1149: mol_type = other DNA; note = Synthetic coding sequence
atggcggctaatctatcacggaatggccccgccctccaggaagcttacgtgcgggtagtgactgagaaatcccctacagactgggccctatttacgtacgaaggaaattcaaatgacataagagtggctggaactggtgagggtggcctagaggagatggtcgaggagctcaactcaggtaaagtgatgtatgcgttctgtcgggttaaagacccgaattccggtttgcctaagtttgtgctgattaactggacaggcgagggcgtcaatgacgtcagaaaaggcgcctgtgcttcccacgtgtccacgatggcatcttttttaaaggggagcgtgtaccagaagaccaatgctgttagcgagattaagcgggtaggcaaggacagtttctgggctaaagctgaaaaagaggaggagaaccgcagactggaggagaaaagaagagccgaagaggcccaacgccagctggagcaggagagacgggagcgggagctgagagaagccgctcggagggagcagcggtaccaagagcaagggggcgaagctagtcctcaatctcggacctgggagcagcagcaggaggtcgtgtctcggaatcggaatgagcaagagagtgctgtgcaccctcgtgagatttttaagcagaaagaacgggctatgtctacaacttctatttcgagccctcagccgggaaaactccggtcaccttttttgcagaaacagctgacacagccagagacccactttggtcgcgagccagcggctgccatatctcgccctcgcgccgacttaccagcagaagaacccgccccatccacgccgccttgtctggttcaggccgaagaagaggctgtatatgaagagccaccggagcaagagaccttctatgagcaaccacccttggtgcagcagcagggcgcagggtccgagcacatagaccatcatatccagggtcagggcttgtcggggcagggtctttgtgccagggcgctctacgactaccaggccgccgatgatacggagatttccttcgatcccgagaatctgatcacgggcattgaggttattgatgaggggtggtggcgcggatatggccctgatggacactttggcatgttccccgctaactacgtagagcttattgagtag

SEQ ID NO: 17199 - DNA, 660 bp, synthetic construct
  source 1..660: mol_type = other DNA; note = Synthetic coding sequence
atggtggtgttatctgtgcccgccgaggtgaccgtaattctgctggatatcgagggaactacaacgcccattgcatttgtaaaagacattcttttcccttatattgaagaaaatgtgaaggagtacctgcagacacactgggaggaggaagagtgccaacaggacgtatccctgctgcgtaagcaggctgaggaagatgctcacctcgacggcgctgtccccatccctgccgctagcggcaatggtgtcgacgaccttcagcagatgattcaggccgtggtcgacaatgtgtgctggcagatgagcctcgatcggaagaccacagctttgaagcagttgcagggacacatgtggagggcggccttcacggccggccgcatgaaggctgaatttttcgccgatgtcgttcccgccgttcgcaaatggcgagaagccgggatgaaagtgtatatatacagtagcgggagtgtagaggcccagaagctgctgttcgggcactcgactgaaggcgatatcctcgagctggtggacggccacttcgacactaaaattggacataaggtggaatctgagtcctacaaggattgtaggcagcactgggtcttgaaccagcagcacttcgtcagtgatagatgctattcacgcggacagtgctgctag

SEQ ID NO: 17200 - DNA, 1446 bp, synthetic construct
  source 1..1446: mol_type = other DNA; note = Synthetic coding sequence
atggcaagcgctgctagcgtcaccagcctagcagacgaggtgaactgccctatctgtcagggaaccctgcgggagccagtgactattgactgtgggcataacttttgtagggcttgccttacgcgctattgcgaaatccctggcccagatctggaagaaagcccgacgtgccctctctgtaaggaaccattccgtcccgggagtttcaggccaaactggcagcttgctaatgtcgtcgagaatattgaacggcttcagctcgtgagcactctgggactgggtgaggaggacgtgtgccaagaacacggtgagaaaatatactttttctgtgaggatgacgagatgcagttatgcgtggtatgtagggaggcgggtgaacacgccactcataccatgcgatttctggaagacgctgctgcaccataccgagagcaaattcataaatgcttgaagtgcctccgcaaggaacgtgaagaaattcaggagatacagtccagggagaataagaggatgcaagtgctgctgacccaggtttctacaaaaaggcaacaagttattagcgaattcgcccatcttagaaaatttctggaagaacagcagtcgatcctgctcgcccaactggagtcccaagacggcgatatcctgcgccagagagacgaattcgacctgctggtcgctggggagatctgccggttttctgccctcatcgaagaactggaagaaaagaatgagaggcctgctcgagagctcctgaccgatatccggtcaactctgatccgatgcgaaactaggaaatgccggaagcctgttgctgtctctcccgagctaggccagcgaatccgcgatttccctcaacaggcactgcctctgcagcgggagatgaagatgtttctggaaaagttatgttttgaattggattacgagccagctcacataagtctagaccctcaaacttcacaccctaagctgctgttaagtgaggatcatcagagagcccagttcagctataagtggcagaattcccctgacaacccgcagcgtttcgatcgtgcaacctgcgtgctcgcacatacgggcataactggtgggcgtcatacttgggtggtgtcaatcgatctggcccatgggggcagctgtacggtgggggtggtgagcgaagatgttcaaagaaagggtgaactacggcttcgccccgaggagggagtgtgggcagtcagactggcctgggggttcgttagtgctctaggctcattccccacccgcttgacactgaaagaacagccaagacaggtcagggtgtccctggactacgaggtgggatgggtgaccttcaccaatgctgtgaccagggagcccatatataccttcaccgcatcattcactcggaaggtaatccctttctttggtctgtgggggagaggtagtagcttctccctcagtagctag

SEQ ID NO: 17201 - DNA, 1644 bp, synthetic construct
  source 1..1644: mol_type = other DNA; note = Synthetic coding sequence
atggccggaactaagaataagacgcgggcacaggctaagacagagaagaaggcagccattcaagcaaaggctggcgccgagagagaagccaccggtgtggtgagacccgtcgccaaaacgagggcaaaagccaaggctaagactggctctaaaaccgatgcggtggccgagatgaaggcagtgtcaaaaaacaaagttgtagccgagacaaaagaaggcgccctgtccgagcctaagactcttggcaaggccatgggcgacttcactcctaaagccggcaatgaaagtacctcgtctacatgtaaaaacgaggctggaaccgatgcctggttttgggctggtgaggaggcaactatcaactcctggttctggaacggcgaagaggcgggcaactctttcagcaccaagaacgataaacccgagattggcgcgcaggtctgtgcagaagagttggagccagccgccggcgccgattgtaaacctcgctccggcgccgaggaggaggaagaagagaatgtgattggaaattggttttgggagggcgatgatacgtcgttcgatccaaacccaaaacctgtctcacgtatcgtgaaacctcagcctgtttacgagattaacgagaaaaaccggcctaaagattggagtgaagtgaccatctggcctaatgctccagccgttactccggctgtgcttggctttcggtcccaggcaccatcagaagcctccccgccctcttacatcgtgctggcctccgctgaggaaaacgcttgcagtttgccggtggccactgcatgcagacctagcaggaatacccgttcctgtagtcagccaatccccgagtgtcgcttcgactctgatccctgcattcagacgattgatgaaatcagacggcagatccggattcgggaggtgaatggaatcaagcctttcgcctgtccttgcaaaatggagtgctacatggacagtgaagaattcgagaaattagtgagtttgttaaagagcactactgatcctctgattcacaagatcgctagaatcgccatgggggtgcataatgttcaccccttcgcacaggagtttataaacgaggtcggggtggtcaccctgattgagagtttgctgtcctttccctctcctgagatgcgaaagaaaacagttatcacactgaacccacctagcggggatgaacgtcagcgtaaaatagagctgcacgttaagcacatgtgcaaagagactatgtccttcccccttaactctcctgggcagcagagtggactgaaaattctaggccagctgacgactgacttcgtgcatcactacatcgttgccaactatttcagtgaactgtttcacctcctgagctctggcaactgcaagaccaggaacttagtgctgaagctgctgttgaatatgtccgaaaaccctaccgctgctcgtgatatgatcaacatgaaagctttggcggctcttaagctgatatttaaccaaaaggaagcaaaggcaaatctggtaagcggagtcgctattttcatcaatattaaagaacatatccgcaaaggctcaattgtggtggtggatcacctctcatataacacacttatggccatattccgagaggtcaaggaaataatagaaacaatgtag

SEQ ID NO: 17202 - DNA, 1887 bp, synthetic construct
  source 1..1887: mol_type = other DNA; note = Synthetic coding sequence
atgagcgacaaatcagacctgaaagctgagttagaaagaaaaaaacagcggctggctcagataagggaggagaagaagcgaaaggaggaagagagaaaaaaaaaggaagctgacatgcagcagaagaaggagcctgtccaggatgacagcgacctggatcggaaaaggagggaaaccgaggctctgctccagagcattggcatctcccccgagccacctttggtccctacacctatgtctccaagttccaaaagcgtgagcacaccgagtgaggccggctctcaggacagcggtgatcttggccctctgacacgcacccttcagtgggacacagacccatcggttcttcagctgcagagtgactcggagctaggcagacgcctccataagttgggcgtgagtaaagtgacccaggtggacttcctgcctagagaagtcgtgtcctactctaaggaaacacagacgccacttgcaactcatcagagtgaagaagacgaggaagatgaggaaatggtggaaagcaaggtcggacaagattccgagctggagaatcaagacaaaaaacaggaagttaaagaagctcctcccagagaactgacagaggaggagaagcagcagattctacactctgaggaattcctgattttctttgacaggaccattcgcgtgatcgaacgcgccttagctgaagactcggacattttctttgattacagtggccgagaactggaagagaaggatggtgatgtgcaggctggagcgaatctgagcttcaatcggcagttctatgatgagcactggagtaaacacagagtggtgacctgcatggattggagcctgcagtaccctgaactaatggtcgccagctataacaacaatgaggacgccccccatgagcccgatggcgtggcactcgtttggaacatgaagtttaagaagacgacccctgagtacgtctttcactgccaatctagtgtgatgtctgtgtgttttgctcggtttcatcccaatctcgtggtgggggggacctacagcggccagatcgtcctgtgggacaataggagtcacagaaggaccccagtgcagaggacaccactgagcgccgccgcccatacccaccccgtctactgtgtgaacgtggtgggaactcagaatgcccacaatctgattaccgtgtccaccgacggaaagatgtgtagctggagtctggatatgctgagtacaccccaggagtccatggagctggtgtacaataagagcaaacccgtggccgtaacgggcatggcctttcccaccggagacgtaaacaatttcgtcgtcggctccgaggaggggactgtatatacggcttgtaggcatgggtcaaaagctggaatcggagaagtcttcgagggtcaccagggccccgtgacaggcatcaattgccacatggcagtggggcctatagatttctcccatctgttcgttactagttccttcgactggacagtaaagttgtggacaaccaaacacaataagcctctgtacagcttcgaggataatgccgattacgtctatgacgtgatgtggagccccgtgcaccccgccctcttcgcatgtgtcgacggtatgggcaggctggacctctggaacctgaacaacgacaccgaagtgccaaccgccagcgtggcaattgagggcgcttcagcattaaaccgagtccgctgggcgcaggcgggcaaggaagtggcagtaggagatagtgagggacgtatctgggtatacgatgttggagagttggctgtccctcataacgacgagtggacccggttcgccagaaccttagtggagatccgtgcgaatagagcagatagcgaggaggaaggcactgtggagctatccgcttag

SEQ ID NO: 17203 - DNA, 474 bp, synthetic construct
  source 1..474: mol_type = other DNA; note = Synthetic coding sequence
atgaggagtgggtttagatgcgatgaaccagccgaggccgtggccccagaaagacagacagtttccggagccgtcgccttggcttcttttacatctccccacactcaccccgtcgatgacggggggcgtcactatagttgggggagtcctaagaggatccttggccttggtcccggggacgctgctaaagaggccggtttggtgagaccccttcaggggcagagtgagaagattctgctacgcacacgcaatagacagccaatggaaccaccaatggagccgagcggaggcgagcaagaacccggtgccgtgcgattcctggatctcccatgggaggatgtgctgctgccccatgtgctgaatagggtgccactaaggcaactcttgcggctgcagagagtctcacgcgctttccggtccctggtgcagctccacctggccgggctgcggaggttcgacgcagcgcaggtgtag

SEQ ID NO: 17204 - DNA, 483 bp, synthetic construct
  source 1..483: mol_type = other DNA; note = Synthetic coding sequence
atggaagccgagagaccacaggaggaagaagacggggagcaaggccccccccaagacgaagaggggtggccaccccctaactctacaacccgaccttggcgctctgctcctccaagccctccacctccgggtactcgccacactgcgttgggtcctagatccgctagccttctgtccctgcagacggagctcttacttgacttggtcgccgaagcccagtctcgaagactggaggaacagagggcaaccttttacacacctcaaaatccttcctctctggccccagcccctctcaggcccctcgaagatagggaacagctttattcaaccatcctttctcaccagtgtcagagaatggaggcccagaggagcgagcctcccctccctccggggggacaggagttgttagaacttctgcttagagttcaaggtgggggcaggatggaggagcagcgatcaaggccacccactcatacgtgttag

SEQ ID NO: 17205 - DNA, 402 bp, synthetic construct
  source 1..402: mol_type = other DNA; note = Synthetic coding sequence
atggctgccctgcgtccattggtcaagccaaaaattgtcaagaaaaggaccaaaaagttcataaggcaccaatccgatcgttatgtgaagataaaacgaaattggcggaaaccgaggggaattgacaatcgagttcgccggcggtttaaggggcaaatcctgatgcctaacatcggctatggctccaacaaaaagactaaacacatgctaccaagcggctttcggaagtttctggtccataacgtgaaagaactcgaggtactgctcatgtgcaataagtcttattgcgccgaaatcgcccataatgtgtcttcaaaaaacagaaaggcaatcgtcgagcgtgctgctcaactggcaattcgcgtcaccaacccaaatgcaagactgaggagcgaagaatag

SEQ ID NO: 17206 - DNA, 639 bp, synthetic construct
  source 1..639: mol_type = other DNA; note = Synthetic coding sequence
atggacttgtttggagacttgccagaacccgagcggagtcctagaccagccgccggcaaagaagcacaaaaaggtccacttctgttcgacgacctacctcccgccagcagcacagattccggatccgggggccccctcttgtttgatgacctccctccggcgagttcgggagacagtggatctttagctaccagtatctcccagatggtaaagacggagggtaagggggctaaaagaaaaacctcggaagaggagaaaaacggttccgaggagctggtcgaaaaaaaagtgtcaagcagcgtcatcttcgggctgaaaggttacgtggccgagcgtaaaggcgaacgtgaagaaatgcaggatgctcatgtgatcctcaatgacattacagaggaatgtagacctccttcgtccctgatcactcgggtgagttactttgccgtcttcgacggccacggtggcatcagagcctctaaatttgcagcacagaacttgcaccagaacctgattcgcaaattccctaaaggagatgtgatctctgtggagaagaccgtgaaaagatgtctgctggatacatttaagcatacagatgaggaatttttgaaacaggccagctctcaaaagcctgcatggaagtag

SEQ ID NO: 17207 - DNA, 1131 bp, synthetic construct
  source 1..1131: mol_type = other DNA; note = Synthetic coding sequence
atgcccttacaggtcagcgactactcatggcaacaaaccaagaccgcggtgttcctctcactccctctcaaaggggtgtgtgtacgggataccgacgtattttgtacagagaactacctcaaggtgaactttcctcctttcctgttcgaggcgttcctttacgccccaatcgatgacgagtccagcaaagctaagatcgggaatgacactattgtgtttacactgtacaagaaggaggctgcaatgtgggaaacacttagcgtgaccggtgtggacaaggagatgatgcagaggattagggagaaatccattctgcaagctcaggaacgagcaaaggaagcaaccgaggctaaggctgctgccaagcgtgaggaccagaaatatgcactgtctgttatgatgaagatcgaggaggaggagcgcaagaagattgaagatatgaaggaaaatgagaggattaaggcaacgaaggcattggaagcatggaaggagtaccagagaaaggctgaggaacagaagaagattcagagggaggagaaactctgtcagaaagagaagcagattaaggaagagcgcaagaagattaaatataaatccctgaccaggaacctcgcctcgcggaatctcgctcccaaaggaaggaactcagagaatatcttcactgaaaaacttaaagaggactccattcccgctccaagaagcgtgggcagcataaaaattaatttcaccccacgtgtgtttcccacggccctgcgggagtctcaggtagccgaggaagaagagtggctccataagcaagccgaagcccgccgcgccatgaacacagatattgcagaactttgcgacttgaaagaggaggaaaaaaaccctgaatggttaaaagataagggaaacaagctgtttgcaaccgaaaattaccttgcggctatcaatgcatataaccttgctatcagactgaataataagatgccgcttctgtacttgaatagggccgcgtgccacttgaagttaaagaatctgcacaaagcaatcgaggatagctccaaggcgtacagaattatgaagagacatctgaggctaatacacccaaccaagctgtataagctaatgttgaggcggtttggaatgtag

SEQ ID NO: 17208 - DNA, 1485 bp, synthetic construct
  source 1..1485: mol_type = other DNA; note = Synthetic coding sequence
atggccgctgccgccgagtgcgacgtggtgatggcggcaactgaaccagagctgctcgacgatcaagaggcgaaacgggaagccgagacttttaaggagcaggggaacgcgtattatgctaaaaaagattataacgaggcctataactattacacaaaggccattgatatgtgcccaaagaacgctagttactacggcaaccgggccgcgaccctcatgatgctaggccggttcagggaggcacttggagacgcccagcaatccgtgagactggacgactctttcgttcggggacacctaagagaaggtaagtgtcatttgtcactgggcaacgcgatggctgcgtgtcggtctttccaaagagcactcgaacttgaccataaaaacgctcaggcacagcaagaatttaaaaacgccaacgctgtgatggaatatgaaaaaatagcagagacagactttgagaagcgggattttaggaaggttgttttctgcatggatcgtgctttggagttcgcgcctgcatgtcaccgctttaagatcttgaaggccgagtgccttgccatgcttggtaggtacccagaggcgcagtcagtggctagcgacatcctacggatggacagcacaaacgcagatgcactctacgttcggggcttatgtctgtattacgaggattgtattgaaaaggccgtccagttctttgtgcaggcactgcgtatggctcctgaccatgagaaggcctgcattgcctgtcggaatgccaaggctctgaaggcaaagaaggaggatgggaataaggccttcaaggaggggaactataagttggcctacgaactgtacacagaagcattaggtattgaccccaataacataaagaccaatgccaaactctattgcaacaggggaacagtgaattctaagttgaggaagttagatgacgctatcgaggactgtactaacgccgtcaaactggacgacacttacattaaagcttacctaaggcgcgcccaatgttacatggataccgagcagtatgaagaggcggtgagggactacgaaaaggtgtaccagacagagaaaacaaaagagcataagcagctgctgaagaacgcccaactggagttaaaaaaatccaaaaggaaggactattataagatcttgggggtggataagaacgcaagtgaggacgagattaaaaaggcctataggaagagagccttaatgcaccatcctgatagacactccggcgccagcgccgaggtccagaaggaagaggaaaagaagttcaaggaggtcggggaagcctttaccattctgtcggatcccaaaaaaaagacaagatacgattctggtcaagacctagacgaggaaggaatgaatatgggcgactttgatcccaacaacatcttcaaggcttttttcggaggtcctggcggatttagtttcgaggcttccgggcctggcaacttcttcttccagtttggatag

SEQ ID NO: 17209 - DNA, 1329 bp, synthetic construct
  source 1..1329: mol_type = other DNA; note = Synthetic coding sequence
aacgaagtgtacaatctcacccaggaattctttcggcacgacaagcccgtaaatgcggagagtcaaaatagcgttggcgtgttcactagagaagaggtccgcaatcgcatcagaaacgatcctgatgacccagaggcgactaaacgtttgaagctcgccatgatccagcagtacctgaaagtagaaagctgtgaatcgtcatcacacagtatggatgaggtgtctctgtccgcattcggggagtggacagaaatacccggggcccaccatatcatcccatctgggttcatgagggtcgtggagctgctggccgagggcatccccgcccatgtgattcagctgggtaaaccagttcgatgcatccactgggaccaggcttcggcccggccaagggggcctgaaattgaaccgcgaggagaaggtgaccacaatcacgatacaggtgagggagggcagggaggtgaagaaccccggggcggaagatgggacgaggatgaacaatggtcggtcgttgtcgagtgtgaggactgtgagttaatcccagctgatcacgttatagtgactgtgtccctgggcgtgctgaaaagacaatacacatccttttttcgccctggcttgcctactgagaaggtcgcagctatccatcggctggggatcgggacaacagataagatcttcctcgagttcgaagagcctttctgggggccagagtgcaacagcctgcagttcgtctgggaggatgaggctgaatcccatacgctcacataccccccagaactgtggtaccgtaagatctgcggttttgacgtgttataccctcccgagcgatatgggcatgtgctgtccgggtggatatgtggcgaggaggccctcgttatggagaaatgcgacgatgaagccgtagcagagatctgcactgagatgctgagacaattcacaggtaatccaaatatccccaagccacggcggatacttcggtcagcatggggttccaacccttattttaggggatcctatagctatactcaggtgggctcttctggagctgacgttgaaaagctggccaaaccattgccctataccgaatcttctaagaccgcccacgggagttctacaaaacagcagcccggacacctcttttcgtcaaagtgccctgagcagcctcttgacgcaaatcgaggagccgtcaagccaatgcaagttctgttctccggggaagccactcacagaaagtattactctaccacacacggcgcgctgctttccgggcagcgagaggccgcaagactcatcgaaatgtaccgagacttgtttcaacagggcacttag

SEQ ID NO: 17210 - DNA, 180 bp, synthetic construct
  source 1..180: mol_type = other DNA; note = Synthetic coding sequence
atgagttactaccagcgaccgttctcgccttccgcctattccctgccagcatccttaaactccagcatcgtgatgcagcatggaacctcattggatagcactgatacgtacccccagcacgcgcaaagcttggatggaaccacgtccagctccatcccactctaccgctcaagtgagtag

SEQ ID NO: 17211 - DNA, 837 bp, synthetic construct
  source 1..837: mol_type = other DNA; note = Synthetic coding sequence
atgaagtgcgaacattgcaccaggaaggagtgtagtaagaagacaaaaaccgacgatcaggagaacgtgagcgccgacgccccatctcctgcgcaagagaacggcgaaaagggcgaattccataagctagccgacgctaagatcttcctttcggactgcctggcgtgcgactcatgcatgacagccgaagaaggagtgcagttaagtcaacagaatgctaaagacttcttccgagtgctgaacctcaacaagaaatgtgataccagcaaacacaaagtgctggttgtgtccgtttgccctcagtctctgccttactttgcggccaaatttaatttgtcggtcacagacgcaagcagacgcctgtgtgggtttctcaaaagtttggggtgggtccgctacgccgagcgggtgttaggtcgacccatcactgcccacctgtgtaccgccaagtcgccgcagcaggtaatgggctccctcgtcaaagattacttcgccagacaacagaatctgagcccggaaaaaattttccacgttattgtggctccctgctatgacaaaaaactcgaggcactgcaggaaagcctgccacccgctcttcatgggtcccggggagccgactgtgtactaacttccggaacgggatcactttgggagtgtacccctgtgattacggctacacaggaagcggccgccagggagtctctcgagccaggtcggcagcggcttcaacgggataagatcgcccccctagattctagcttgggaggcggcggcgaaatcgcccaaatcatggagcagggggatctgtccgtccgcgatgcagcggtcgacacctag

SEQ ID NO: 17212 - DNA, 471 bp, synthetic construct
  source 1..471: mol_type = other DNA; note = Synthetic coding sequence
taagggaaagcacagcgcaagattagtgcaatccacatattggacgtgctggtgttgaacgggactgacgttcgcgagcagcacttcaatcagcgcatccagcttgccgagaaattcgtgaaggcagtgagcaaaccatctcgaccagacatgaatccaattagggtgaaggaggtgtacaggctcgaagaaatggagaagattttcgtcaggctcgaaatgaaaattatcaaaggctccagcggcacaccaaaactgagctacacaggccgcgacgacaggcacttcgttcctatgggtctgtatatcgtgcggaccgtcaacgaaccttggactatggggttctctaaatcttttaagaagaagtttttttacaacaagaagaccaaagacagcacattcgatctacctgcagactcaattgctccattccacctgccctctcttgcatgcctgagcaagatggattag

SEQ ID NO: 17213 - DNA, 1200 bp, synthetic construct
  source 1..1200: mol_type = other DNA; note = Synthetic coding sequence
atggcaaccggggacctgaagaggagtctgcgcaatctggagcaggtgctcagattactgaactaccctgaggaggtcgattgcgtggggctgataaagggtgaccccgctgccagtctcccgattatctcgtactcttttacctcttacagtccatacgtgaccgagctcattatggagagcaatgtggagttaattgccaagaacgacctgaggttcattgatgccgtgtacaagctgttacgggatcagtttaattataagcccatcttaaccaaaaagcagttcatacagtgtggcttcgcagaatggaaaattcaaattgtgtgtgatattctgaactgcgtgatgaagaaacacaaggagctctccagcctgcagaaaattccctctcagcagagaaagaaaattagttcaggcaaatccgaaccccccctggggaatgagaaaatcagcgcagaggccgtgggagttgatatttccggacgttttatgaccagcggaaaaaagaaagctgttgtgatccgtcatttgtacaacgaagataacgtggacatctccgaggacaccctcagtccgattacggatgtgaacgaggctgtagacgtttcagatctgaacgctaccgagattaagatgcccgaggtcaaggtgcctgagatcaaagccgagcagcaggacgtgaacgtgaatccagagatcaccgcactccagactatgctggctgagtgccaagagaacctgaagaagttgacatctattgagaaaagattggattgtctggagcaaaaaatgaaaggaaaggtcatggtggatgagaatacctggaccaacttgctctccagggtaactcttttggagactgaaatgctgctcagcaaaaagaatgatgagttcattgaatttaacgaggtcagcgaagactatgcgtcttgtagcgacatggatttgctgaatcctcacaggaagtccgaggtcgaacgcccggccagtattcccctttctagcggatactcaaccgcaagcagcgactccacaccccgggcttccacagtcaattattgtggcctgaacgaaataagcgaaaatttccctgcttggtctgccactagctcttgtagctcgctcagttggctcctgaggggccacacaagctaccttagcagtcagtcgtttgcgtggcctctttcctgcgtctag

SEQ ID NO: 17214 - DNA, 819 bp, synthetic construct
  source 1..819: mol_type = other DNA; note = Synthetic coding sequence
atggcaagtctgctccaggatcaactgaccaccgatcaagatctacttctgatgcaggagggtatgccaatgcgaaaggtgaggtcaaaaagctggaagaaactgagatacttccgccttcagaatgacggaatgaccgtttggcatgccagacaggctcgtggaagtgctaagccttctttctccatatccgacgtggagaccatcaggaatggacatgactctgagctactacgctctcttgctgaagagctccccttggagcagggctttaccattgtgtttcacggaagacgctccaacttggacctgatggcgaattcggtggaagaggcccagatctggatgaggggtctgcagctcttagtagacctggtcactagcatggaccaccaggaaagattggaccgctggctgtcggactggtttcagagaggtgacaagaatcaggacgggaagatgtcattccaggaggtgcaaaggctgttacatctcatgaatgtggaaatggatcaggaatacgcctttagtctctttcaagctgccgatacttcccaaagcggtaccctggagggcgaagaattcgtccagttttacaaagctcttaccaaaagggccgaagtccaggagctgtttgaatctttttctgccgatggccagaagttgacactgttagagtttcttgatttcctgcaggaggagcaaaaggagagggactgcacttcagaactggctctggaactgatcgacagatatgaaccctcggatagcggggcctcagaagaggatcctggggagggggaggaggtgaacacttag

SEQ ID NO: 17215 - DNA, 360 bp, synthetic construct
  source 1..360: mol_type = other DNA; note = Synthetic coding sequence
atggacaagaatataggcgagcaactgaataaagcctacgaggcgttcagacaggcttgtatggatcgtgacagcgctgtgaaagagctgcagcagaaaactgaaaactatgagcagagaataagggagcagcaagaacaactctctctgcagcagaccattattgataagctgaagtcccagctcctcctcgtgaacagtactcaggacaacaattacggttgcgtgcctctgcttgaggattcagagactcgcaaaaacaacttgacactggatcagccacaagataaagtgatctccggcatcgctagggaaaagttgccaaaagttgacatcgcaagtgccgaatcctctatttag

SEQ ID NO: 17216 - DNA, 1881 bp, synthetic construct
  source 1..1881: mol_type = other DNA; note = Synthetic coding sequence
atgtgcagcacccttaaaaagtgcggaacatacaggacagaagttgccgaatgtcatgaccacggctcaacatttcagggaagaaagaaaggcgggagctcctttcgcgacaacttcgacaaaaggagctgccattacgagcatggaggctatgagcgtccgccctcccattgccaggaaaacgacggctcagtcgagatgagagatgtgcacaaagaccagcagttgcggcatactccatacagcatcagatgcgagcggaggatgaaatggcattctgaggatgaaattcggattacaacgtggcgaaaccgcaagccgcccgaaagaaaaatgagccagaatactcaagacggctatacaaggaactggtttaaagttaccatcccttacggtatcaaatacgacaaagcttggctgatgaattcaatacagtctcattgcagcgacagattcacgcctgtggattttcattacgtcagaaaccgggcatgcttttttgtgcaagacgcgagtgcagccagcgccctcaaagacgtttcatataaaatttatgatgacgagaatcagaaaatttgtatcttcgtcaatcacagcacagccccttactcagtgaagaataagctaaaaccaggacagatggaaatgttgaagttgactatgaacaagcggtacaacgtcagccaacaagctctggatttgcaaaacctgcgatttgatccagatctcatgggtagagatattgacatcatcttgaatcgacggaactgcatggccgccacactgaagatcatagagaggaatttccccgagttgctgtcacttaacttatgtaacaacaagctgtaccaattagatggtctctccgatatcaccgagaaggccccgaaggttaagaccctgaatctgagcaaaaacaaattggaatctgcttgggaattaggcaaagtgaaggggctgaagctggaggaactgtggcttgagggcaatcccctatgtagcaccttctccgaccaaagtgcttacgtctcagcaattcgtgactgcttcccgaagctcctcaggctcgacgggcgggaactttctgcacccgttatcgtggacatcgactcatctgaaacgatgaaaccatgcaaagagaattttacaggttcagagactctgaagcacctcgttctgcagttcttacagcaatattacagcatctacgatagtggagatcgccagggcttgctcggcgcctaccatgacgaagcttgcttttccctggccatcccatttgaccctaaagattcagctccttctagcctctgtaagtattttgaggacagccgcaacatgaagaccctgaaagatccatatttaaagggggagttactcagaaggacaaagcgagatatcgttgatagcctgtcagctttgcctaaaacacaacacgatctatctagcatcctggttgatgtttggtgtcagacagaacgtatgctttgtttttctgtaaatggggtgtttaaggaagtcgaaggccaaagccagggtagtgtgcttgcattcacaagaacctttattgccacccctgggtcttcctcgtctctgtgcatagtgaatgatgaattgtttgtgagggacgccagcccacaggaaacgcagtccgcgttcagtataccggtctctacactgtcgtcctctagcgagccttcacttagtcaggaacagcaagaaatggtgcaggcatttagtgctcagagcggaatgaagctggaatggagtcaaaagtgtctgcaggacaacgaatggaattacacccgtgcaggtcaggcctttacgatgctccaaacggagggcaaaataccagcggaggccttcaagcagattagttag

SEQ ID NO: 17217 - DNA, 189 bp, synthetic construct
  source 1..189: mol_type = other DNA; note = Synthetic coding sequence
atggcaatggctccgtccccgtcacttgtgcaggtgtatacatctcccgccgctgtggctgtgtgggagtggcaggacggcctgggtacttggcacccttatagtgcaactgtttgttcttttatcgagcagcagtttgttcagcagaaaggccagaggtttgggcttgggtctctggcacacagctag

SEQ ID NO: 17218 - DNA, 228 bp, synthetic construct
  source 1..228: mol_type = other DNA; note = Synthetic coding sequence
atgcgcttgtccctcccactcctgttactcctactgggggcatgggcgattccaggcgggctgggggacagggcgccactcaccgccacagcccctcagctggacgatgaggagatgtactccgcccatatgccggctcacctgcggtgtgacgcatgtagggcagtggcctaccagagactctgttcataccctccccacctgccattaacagagcaacagtcatag

SEQ ID NO: 17219 - DNA, 2619 bp, synthetic construct
  source 1..2619: mol_type = other DNA; note = Synthetic coding sequence
atgggggacagcgatgacgagtatgatcgtaggcgaagggacaagtttcggcgcgagagatcagactatgatcgctcacgagagcgggatgaacgcaggcgaggcgacgattggaatgaccgcgagtgggacagaggccgcgagaggagatcacggggagaataccgcgattacgatcgtaatagaagggagaggttctccccgccccggcacgaactgagtcccccgcaaaaacgaatgcgcagggattgggacgagcacagcagcgacccatatcacagtggatatgaaatgccatatgccggggggggcggcggaccaacttacggaccaccccaaccctggggccacccggacgtgcacattatgcagcatcatgtccttccaatccaagccagattgggctctattgctgagatcgatctgggcgtccctccacccgtgatgaaaacgtttaaggagtttctcctgtcactggacgatagtgtcgatgaaaccgaggctgtgaaaagatacaatgactacaaattggacttcaggcgacaacaaatgcaggacttcttcctcgctcacaaagacgaggagtggttcaggtctaagtatcatccggatgaagttgggaaaagacgccaggaagccagaggcgccttgcagaacagattacgcgtctttctgtcgttgatggaaactgggtggtttgacaatctcctgcttgatatagacaaagccgatgcaattgtgaagatgctggatgctgctgtgataaaaatggaagggggtaccgagaacgaccttcggatactggagcaggaggaggaagaggagcaggccggcaaaccgggcgagcccagtaaaaaagaagaggggagggccggagcaggattgggggatggcgaaagaaaaactaacgacaaagatgagaaaaaggaagacggtaaacaggccgaaaatgattcatcgaacgacgacaaaaccaaaaagtccgagggcgacggcgataaggaagaaaagaaggaggattccgaaaaagaagcaaaaaagtccagtaagaagcggaatcgaaagcatagcggagacgactctttcgacgagggaagcgtctccgaatctgagagtgaatccgaatcggggcaggccgaagaagagaaggaggaggctgaagaggccctcaaagagaaggagaagcccaaggaagaagagtgggagaaaccgaaggatgccgctgggctggaatgcaagccgcgccctctgcataagacctgctcactgttcatgagaaatattgccccaaacatttctcgggccgagatcattagcctctgtaagcgctatcccggttttatgcgtgtcgccctcagcgagccacaacctgagaggcgatttttccgtagaggctgggtgacttttgaccgttccgtgaacattaaggaaatctgctggaatctacagaatattcgacttagggagtgcgagctttctccaggggtcaacagggatcttacccgtcgggtgagaaacattaatggtataacacagcacaaacagattgtcaggaatgacatcaagttggcagctaagctgatccacaccctcgacgacagaacccagttgtgggcctctgagccgggaactcctccactgccaacttcattacccagccagaatccgatcttgaagaatatcacggattacctgattgaggaggtttccgcagaggaagaggagctcctgggaagcagtgggggcgctccccccgaggaacccccaaaggagggcaatcctgcagagatcaacgtggagcgggacgaaaagcttatcaaagtgctggacaagttgttactgtacctgcgcattgtacactctttggattattacaacacatgtgagtatcctaatgaagacgaaatgccaaataggtgtggcataattcatgtgcgcggacctatgcccccaaatcgaatatcacacggcgaggtgcttgagtggcagaagacattcgaagagaaactgactccgctcctcagcgtgagagaaagcctgtctgaggaagaggcccagaagatgggaaggaaagaccccgaacaggaggtggaaaagtttgttacatcaaatacgcaagaactcggaaaggacaaatggttatgtcctctgagtggaaagaaatttaaaggccctgagtttgtgagaaaacacatcttcaataaacatgccgagaaaatcgaggaggtgaaaaaagaagtggcctttttcaacaatttcttgacagacgctaagaggcccgccttgccagaaattaaacccgcccagcctccaggccctgcacagtccttaaccccaggccttccatacccccatcagacaccccaggggcttatgccctacggtcagcctaggccccctattctcggctacggcgctggggcagtgcgtccggctgttcccaccggcggtccaccttatccccacgccccgtacggcgcaggaaggggaaattatgacgccttccggggccaggggggatatcccggcaagccacgaaatcggatggtcaggggcgatcctagagctatcgtcgaatatcgcgatctggacgctcctgacgatgtcgattttttctag

SEQ ID NO: 17220 - DNA, 483 bp, synthetic construct
  source 1..483: mol_type = other DNA; note = Synthetic coding sequence
tagcccgaggacgtgcaggctttggttagtgggaagcttgccttgaggtatgcagggcgccagactgaagctctaaaatgtgtggctcaggcctccaagaaccgatcattggccgacttcgagaaggcacttactgattatcgcgcggaactgcgtgacgatcctatcataagcacccacctggccaaactgtatgataacttgctcgagcagaatctcatccgcgtaattgaaccatttagcagggtccaaattgagcacatttcatcactcattaaactttctaaggccgatgttgaacgtaagctgtcacagatgatcctcgacaaaaaattccatgggattctcgaccaaggagaaggggtgctaatcatcttcgatgaacctccggtagataagacttatgaggctgcgctggagacaatccaaaacatgagcaaggtcgtcgattctctgtacaataaagcaaagaagttgacctag

SEQ ID NO: 17221 - DNA, 3906 bp, synthetic construct
  source 1..3906: mol_type = other DNA; note = Synthetic coding sequence
atgtggcggagaaagcatccacgtacttctggcggcacaagaggagtcttgtccgggaatcgcggggttgagtatggatctgggcgcggccacctcggaacttttgagggcagatggagaaaactccccaaaatgcctgaggccgtagggactgatccctccacttctcggaagatggctgagctggaggaggtgactttagacggaaaacctctgcaagcattacgggtgaccgacttaaaggcagcattggagcagcgaggcttggcaaaaagcgggcagaaatctgctctggtcaaacgactgaaaggtgctctgatgctggaaaacctacagaagcacagcaccccacacgctgcttttcagccaaattctcagatcggcgaggagatgtcccagaatagctttatcaaacagtatctggagaagcaacaggagctcttgcgccaaagactcgaacgggaagccagagaagccgccgaactggagggcaaaagctcctctatctccgaggaaaaaggcgattctgacgatgagaaaccccgaaaaggcgagaggcgctcgagccgtgtcaggcaagcacgcgcggccaagctctccgagggaagtcaacccgccgaggaggaggaggaccaggaaaccccctcccggaacctacgcgtgagggctgacaggaacctgaagacagaagaagaggaggaggaagaggaggaagaggaagaggatgatgaggaagaagagggcgatgatgagggccagaagtctagagaggcacctatactcaaggagtttaaagaggagggcgaggagatcccacgggtaaaacctgaggaaatgatggacgagcgacctaaaacaaggtcccaggagcaagaggtgctagaaagaggaggtagatttacccgctcacaagaagaagcccggaaaagccaccttgcaagacagcagcaagagaaagaaatgaaaacaacctctcccctcgaggaagaagagcgtgagattaaatcctcccaggggctgaaggagaaatcaaagtctccaagtcctccaagactgacagaggatcgaaaaaaggcttccctcgtagcgcttcccgaacagacggcatctgaggaggaaactcccccccctctgctgacgaaggaggcctccagtcccccaccccatccacagctgcacagcgaggaagagattgagcctatggaggggcctgctccggccgtgcttatccagcttagcccacctaacaccgacgccgatacccgagaactgctggtaagccagcatacagtgcaactcgtgggaggccttagccccctgagcagtccttctgacacgaaggcagagtcccccgccgagaaagtgcccgaggaatccgtgctccccttagtgcagaagtccaccctggccgattactcagcccagaaagatctagaaccagaatctgaccgtagcgcacaaccactgccactcaagatcgaagaactggcccttgccaaaggtatcacagaggagtgtttaaaacagccttcccttgaacagaaagaagggcgccgcgcctctcacacgcttcttcccagtcatagacttaaacaatcagcggactcatcttcatctcggtcaagcagctcctcttccagctcctctagatcccgttcccggtctcccgactcttccggtagccggtcacacagccctttacgtagcaaacagagagacgtcgcacaggcacggacacatgccaaccctagaggccggcccaagatgggatcacggtccacctcagagagccggagccggtccaggagtcgtagccgctctgccagctctaattcacgaaagtcactttcacccggagtgagtagggactcgagcaccagttataccgagaccaaagacccctcctccgggcaggaggtggctacgccccccgttcctcagcttcaggtttgcgagcctaaagaacggacatccacatcctcctcttccgtgcaggcccgcagactgtctcagccagaaagcgcagaaaagcacgtgactcagcgtctgcagcctgaacggggatctccaaaaaaatgtgaagccgaagaagcggaacctccggccgcaacccaaccacagacatccgagactcaaacctcccacttgccagaaagtgagcgtatacatcatacagtggaagagaaagaggaagtaactatggataccagtgagaaccgcccagagaacgatgttcctgagcccccaatgcctatcgctgaccaagtcagcaacgatgaccgcccagagggctcagtggaggacgaagagaagaaggaatcttctctgccaaaatcattcaaacgcaaaatatccgttgtgagcgcaactaagggcgtgccggccgggaatagtgacaccgaaggtggccagccagggaggaagcggcgctggggggctagtacagctacaacccagaagaaaccaagcatttcaatcaccaccgaatccctgaaaagtctgatccctgatattaaaccactggcaggccaggaggctgtcgttgacctccacgccgatgactctaggatcagcgaagatgaaaccgagcgtaatggagatgatggaacacacgacaagggcctgaagatttgtcggacagttactcaagttgtgcccgccgaagggcaggagaacggacagcgggaagaagaggaagaagagaaggaaccagaggccgagccacccgttcctccgcaggtctccgtggaggtagccctgcctcctcccgccgagcatgaggtgaaaaaggtgacattaggcgacactttgacgcgccgttccatttctcagcagaagtcgggcgtgagcatcacaatcgacgaccctgtccgaactgctcaagtgcctagtccacctcgggggaaaatttccaacatcgtgcatatttccaatttagttagacccttcacgctgggccagcttaaggagctgttgggacgcaccggaaccctggttgaagaggctttttggattgacaagattaagagccattgctttgtcacgtattcaactgtcgaagaagccgtcgctacgcggacagcgctgcacggcgtgaagtggccacagagtaatccaaaatttctgtgtgccgattatgcagaacaggatgagctggactatcatcgcggcttgctggtggataggccgtccgaaacaaagacagaagaacaaggcattcctaggccgctgcatcccccccctcctccaccagttcagcctcctcagcatcctcgcgcggagcagcgggagcaggaaagagctgtgagggaacagtgggcagaacgggaaagggagatggaaagaagggagagaacgcgatccgagagggaatgggacagagataaagttagagagggacccaggagccggtctagatcaagggatcggcgccgaaaggagagagcaaaaagtaaggaaaaaaaatccgagaagaaagagaaggcccaggaggagcctcctgctaagctgctcgacgaccttttccgtaaaaccaaggcagctccttgtatctattggcttccgctgaccgatagccagattgtgcagaaggaggccgagagagccgagagggccaaagagcgtgagaaacgccggaaggagcaggaagaagaagagcagaaagaaagagaaaaagaggctgagagggaacgcaaccgccagctggagcgggaaaaacgacgggagcactcccgtgagcgagacagagaaagagagcgggagcgtgaacgagatcggggggacagagacagagatcgcgaacgcgaccgggagcgaggacgtgaacgcgaccgacgagatacgaagagacactcaagatcacggagtcgatcaactcccgtgagggatcggggtggccggagatag

SEQ ID NO: 17222 - DNA, 231 bp, synthetic construct
  source 1..231: mol_type = other DNA; note = Synthetic coding sequence
atgctcctcgaaaacctgacagataacgaatccgagaataccaatctgaagaagaaggtcttcgaaaaggaagcccacatccaggagctcagctgcctgttccagagcgaaaagtctctggaaaccaaaatcgcaaagtggaacttgcagagcagaatgaataagaatgaggcaatagttatgaaggaggctagcagacagaaaacagtggcgttgaagaaggcctcttag

SEQ ID NO: 17223 - DNA, 1749 bp, synthetic construct
  source 1..1749: mol_type = other DNA; note = Synthetic coding sequence
atggaggtgcgcgcgtcccttcagaaggtgtcagggtcatccgactcagttgctactatgaactctgaagaattcgttctggtgcctcaatacgcagacgataacagcacaaaacacgaagaaaaaccacagctgaaaatcgtgtccaatggagacgaacaactggaaaaggctatggaggagatactccgagacagcgaaaagcgccctagctctctcctcgtcgactgccaaagctcatcagaaatatctgatcactctttcggagacatccccgcttctcagactaacaagccctcacttcagcttatcctggaccccagtaacacagagatcagcactcccaggccttcaagtccagggggcctgcccgaagaggacagtgtgttgtttaataagttgacttacctgggatgcatgaaagtgagttccccacgcaacgaagtggaggccttgagggcaatggccaccatgaagtcctcctcgcaatacccatttccagttacattatacgtacctaatgtgccagaaggctccgtcaggatcatagatcagtcgtctaatgtagaaatcgcaagtttccccatctacaaggtgcttttctgcgcacgcggccacgacggcactactgagagtaactgtttcgcttttactgagtcgtcccatggtagcgaagagtttcaaatccatgtgttctcctgcgaaatcaaagaggctgtgtcaaggatcctatactcgttctgtacagcctttaagagatcaagtcgtcaggtctcagacgtgaaagactccgtgattccaactcctgactctgacgtcttcacattttccgtgagcttggaggtgaaggaagatgatggcaagggcaatttccgactgctcgtaattcctatacctttcgagtatttctcacccgtccctaaggaccgggacaaattctatttcaaactcaaacagggtatagagaaaaaagtggttatcaccgtgcagcagctgagtaacaaagaactggcaatcgaaagatgttttggcatgctcctgagccctgggcgcaatgtgaagaatagcgacatgcacctcctcgacatggaaagcatggggaagtcctatgacggcagagcttacgttatcaccggtatgtggaaccccaacgcaccggtttttctggcactcaacgaagagacacccaaggacaaacaggtttacatgactgtggccgtggatatggtcgtcaccgaagtggtggaaccagtgagatttttgcttgaaactgtggtgcgggtataccccgctaatgaaaggttctggtattttagccgaaagaccttcactgaaacattttttatgcggctgaaacagagcgagggtaagggccataccaacgccggcgatgcaatctatgaggtcgtgtctctgcagagagaaagtgacaaagaagagcctgtaacaccgacttccggcggcgggcctatgagcccccaagacgatgaagctgaggaggaatccgacaatgaactgtcttctgggacgggagacgtctccaaagactgtccagaaaagatcctctactcctggggcgagctccttgggaagtggcatagcaacctaggcgctagacctaaaggtcttagcacactggtgaagtccggtgtacccgaggcactccgcgcagaagtctggcaactgctggcgggttgtcatgataatcaggctatgctggacaggtaccggatcctcataactaaatag

SEQ ID NO: 17224 - DNA, 138 bp, synthetic construct
  source 1..138: mol_type = other DNA; note = Synthetic coding sequence
atggatgctgattctgacgtggcactcgacatcctgatcacgaacgtggtgtgcgtgttccggaccaggtgccacctgaacttgagaaagatcgcactggagggagcgaacgtgatttacaagcgggatgtgggttag

SEQ ID NO: 17225 - DNA, 762 bp, synthetic construct
  source 1..762: mol_type = other DNA; note = Synthetic coding sequence
atggaagacgcgccccagcggctcaggtggcaggctcatcttgaattcacacataatcacgacgtgggagatcttacatgggacaaaatcgccgtgagcttacctagaagtgagaagcttcgctctttggtcttggccggcatccctcacgggatgcgaccacagctctggatgagactgagcggggctctgcagaaaaaacgaaattccgaactgtcctaccgtgaaatcgtgaagaactcttctaatgatgaaactatagctgccaaacagatcgaaaaggatttgcttcggaccatgccttcaaacgcttgcttcgcaagcatggggagcatcggggttccgaggctgcggagagtactgagagccctggcctggctttacccagaaatcgggtactgccaggggactggcatggtcgcagcctgcctcttgctctttcttgaagaagaggacgccttctggatgatgtccgcgattatcgaggatctattaccggccagttacttctccacaacgctgttaggggtgcaaaccgatcaaagggttcttcgccacctcatagtccagtaccttccaaggctggacaaactgctccaggagcacgacatagagctatccctaattaccctgcactggtttctcacggcctttgcctctgtggttgatattaaattacttctgcggatttgggacttgtttttctacgaaggtagcagagtgcttttccagctgacactgggaatgttacacctgaaatag

SEQ ID NO: 17226 - DNA, 336 bp, synthetic construct
  source 1..336: mol_type = other DNA; note = Synthetic coding sequence
tgaccgctggtgaaagtgcagatctttggagtacggttggacacagctaggcaggagaccaactacgtggagaataacggcttcaacccatattggggccagactctatgttttagggtcctggtgcccgagctagccatgctgagattcgtggttatggactatgattggaagtctagaaatgattttatcggtcagtatacactcccatggacttgcatgcagcagggatacaggcacatacatctcttaagtaaggatggcatctctttacgtcccgcttctatcttcgtgtatatctgtattcaggagggtctggagggagatgaatcctag

SEQ ID NO: 17227 - DNA, 552 bp, synthetic construct
  source 1..552: mol_type = other DNA; note = Synthetic coding sequence
atgatgcagatctgtgacacatacaaccaaaaacacagtctttttaatgctatgaatagatttatcggggcggtgaacaacatggaccagacggtgatggtgccgagtctgttgagagatgtgcccttggccgacccaggacttgataacgatgtgggagtggaagtcggaggttccggtggatgcctagaggagagaacgcctccggtgccagacagcggcagcgcgaacggcagtttcttcgcgccatccagagatatgtatagccactatgtccttctgaagtcaatacgaaatgacatcgaatggggcgtactgcatcaacccccaccccctgccggatccgaggaaggatcggcttggaaaagtaaggacatattggtggacctgggccacctggagggggccgatgccggtgaggaggacttggagcaacaattccactaccacctgaggggtctgcacaccgtcctgtctaagctgaccaggaaggctaatatcctcactaatcggtacaagcaggagatcggctttggcaattggggacactag

SEQ ID NO: 17228 - DNA, 1215 bp, synthetic construct
  source 1..1215: mol_type = other DNA; note = Synthetic coding sequence
atgatgttgtccaccgaaggacgggaaggattcgtggtgaaagtacgggggctgccctggagctgtagtgctgacgaggtgatgaggttcttttccgattgcaagatccagaacggtacatctggaatccggttcatttacacccgtgagggaaggccctcaggagaagcgttcgttgagcttgagtccgaggaggaggtgaaactcgcacttaaaaaggaccgcgagacaatggggcaccgctacgtcgaggtgttcaagtccaactcggtagagatggactggatgactctccctgtggacttccagggccggtctaccggcgaggctttcgtacagttcgcgtcccaggagatagccgagaaagcccttaagaaacacaaggagcggattggacatcggtacatcgaaattttcaagagttccagggccgaggttagaacccactacgacccacctaggaagcttatggccatgcagaggccaggcccttatgacagacccggggccggaagaggctataattctatcgggcgcggagccggctttgaaaggatgcgccggggtgcttatgggggtggctatgggggatacgatgattatggaggatataatgacggatatgggtttgggtctgaccgctttgggagagacctgaactactgtttcagcggaatgagcgatcatcgctatggggatggtggctcctcattccagtccacgaccggtcattgcgtccacatgagggggctgccctatagggccactgaaaacgacatctataacttcttcagccccctgaatcccatgcgtgtgcatatagaaataggcccggacggcagagtgacaggcgaagctgatgtggaattcgctacacacgaggacgcagtcgctgctatggccaaagacaaggccaacatgcagcacaggtacgtggagcttttcctgaattccacagccggcacaagtgggggagcctatgaccacagttacgtggaactgtttttgaactccactgcaggtgcttcaggtggggcttacggctcccaaatgatgggaggcatgggcctctcaaaccagtcatcttacgggggccccgccagccagcaattaagtgggggttatggcggtggatacggaggccagtcctctatgagtggttacgatcaggttttacaggaaaattcctccgactatcagagtaacttagcgtag

SEQ ID NO: 17229 - DNA, 1545 bp, synthetic construct
  source 1..1545: mol_type = other DNA; note = Synthetic coding sequence
atgtccattagttccgacgaggtcaacttcttggtttatcggtacttgcaggaaagtggtttctcccatagtgccttcactttcggaatcgagtcccacatttcccagtcgaacataaacggcgcgctcgtgcccccagcagcacttatcagcatcatccagaaaggcctgcagtatgttgaggccgaggtgagcatcaatgaagacgggaccctctttgacgggcgacccatcgaaagcctctctctaatcgacgccgtcatgcccgatgtggtgcaaacccgccagcaggcctacagagataagctggcacagcagcaggcggccgccgccgcagcagccgccgccgctgcgagtcagcagggctccgccaaaaatggcgaaaatacagccaatggagaagagaacggtgcacatacaatagcaaacaatcacaccgacatgatggaagtcgatggagacgtggaaatccctcccaataaggcagtggttctgagggggcacgagtctgaggtgttcatttgcgcatggaaccctgtctctgatctgcttgcctccggttccggcgactctaccgcccgaatatggaacctctctgagaactctacatctggcagcactcagctggttctccggcattgcattcgggagggtggccaggatgtgcctagtaataaagatgtgacatctcttgattggaacagcgagggcaccctgctcgcaactggcagttacgacggtttcgctcggatctggactaaagatggaaatctagcctcaaccctgggccagcataagggccccatttttgcgctgaagtggaacaaaaaagggaatttcatcttgtccgcgggagtggacaagacaaccatcatctgggacgcacacacaggcgaagcaaagcaacaattccccttccattctgcccctgctctggacgttgattggcagagtaataacacattcgcctcatgctccacggatatgtgtattcatgtctgtaaattaggacaggatcgtccaattaagacttttcagggacatactaacgaggtgaatgccatcaagtgggatccaaccggcaatttgttagcaagctgcagcgatgatatgactctcaagatctggagcatgaagcaagacaattgcgtccacgacctgcaagcacataataaagaaatttacacaatcaaatggtcacctactggcccagggactaataatcccaacgccaacctgatgctcgcttccgctagttttgactcaaccgtgcgcctctgggacgttgacaggggtatttgtatccataccttgaccaagcaccaagagcccgtgtatagtgttgcttttagcccggacggccggtatctagcctcaggtagttttgacaaatgtgttcacatctggaatacacagacaggcgccctggttcactcctaccggggcaccggcggtatattcgaagtgtgctggaatgctgcgggcgataaggttggcgcttctgcctccgatggctcagtatgcgtgctggacctgcggaagtag

SEQ ID NO: 17230 - DNA, 2928 bp, synthetic construct
  source 1..2928: mol_type = other DNA; note = Synthetic coding sequence
atgaaatttgttagtgaggaccttcatcgttgcgccttgctcaccgctgacagttttggagatcccttcttcccgcggacaacacagatactattggagtatcagctgggacgctgggtgcctcgcctccgggagccacgtgacctgtacggagtatcaagcagtggccctttgtctccaaccaggtggccgtaccattgcgaggtgatcgatgagaaggtgcaacatatcgattggacccctagctgtccggaaccagtgtacattcccacaggcctcgagacagaacctctgtatcccgacagcaaggaagccacagttgtgtacttggctgaagacgcatataaagagccctgttttgtctactctagggtgggaggaaatcgcacccccctcaaacagccagtcgactacagagataacacattaatgtttgaggctaggtttgaatcagggaacctccagaaagtcgttaaagtagccgagtacgagtaccagctgaccgttcgaccagatttattcactaacaagcatacccagtggtattatttccaagtcacaaacatgcgtgccggtattgtctatcgctttacaatagtaaatttcaccaaaccggccagtctctatagccgtgggatgcggcccctgttttatagcgaaaaagaggctaaggcccatcacattgggtggcagaggattggtgaccagattaaatactacagaaacaacccgggacaggacggacgtcattacttctctctgacttggacgttccagtttccgcataataaggacacatgttatttcgctcattgttacccatacacgtatacgaacctgcaggaatatctgtcagggatcaacaatgatcccgtccgcagcaagttctgcaagattagggtgctatgccataccctggcacgaaatatggtgtacattctgactatcaccacccccttgaaaaattccgactcccggaagaggaaggccgtcatcctgaccgcaagagtgcatcccggcgaaaccaacagttcttggatcatgaagggcttcctggattatatcctgggtaactcctcggacgcccagctgttacgtgacacatttgttttcaaggtcgttccgatgttaaacccagatggtgtgattgtcggaaattaccgctgctcacttgcagggcgtgatctgaatcgaaactatacgagcctgctcaaggagagcttcccttctgtatggtacaccagaaatatggtgcatcgcctcatggaaaaacgtgaggtcatcctgtattgcgacctccacggacattcaaggaaggagaatatcttcatgtatggctgtgatgggtctgataggtcaaaaaccttgtatctgcagcagcgcatcttccctctcatgctgagtaaaaactgccctgataagtttagcttctcagcctgcaaatttaatgttcagaaatccaaagaaggaacaggcagggtggtaatgtggaaaatgggaatccggaactcatttactatggaggcgacattttgcggcagcacactgggaaataagcgcggcacacacttcagcacaaaagatctggaaagtatggggtaccacttctgtgactccctacttgactattgtgaccccgaccggacaaagtactacaggtgtctgaaggaattggaggagatggaacgacacataacattagaaaaggtgttcgaagatagtgacacacctgttatcgatatcacgctagatgtcgaaagctcgagtagggggagcgatagtagtgagagtattgactccctgacctacttgctcaaactaacttcccaaaaaaagcacctaaaaacaaaaaaggagcgcaatagcacaatcgcttctcaccaaaacgcacgaggccaggaagtttacgatcgtggacacctattgcagcggcatacccaaagtaattcagacgtaaaagatacccggcctaatgagcccgatgactacatggtggactactttaggcggcaattgcccaaccaagggctggcacactgcaaattgcgcctgcctggtagccgtcactcccctgcatctgcctcgcgcgtcgccggtactaccggtaccagacaccatacttggctcattttcgtgtttcttgtggaaatgggtaagaagattccactgaagggcactgatctatacggcaattgcttcaaggtgacctcactgcagtcacccatgggcaagcagacctctacctggacggagaagacacgtatcccgaccgaggacttacaccacaatcttaagtcaaagattaaggagtgtatctcctttcagtccaaaaagaccggcatcaattggaccgacgatgagaagcgctcctacaaagacaagggaatcgtgcagacacaggaaatcttacagtacctgctcccgatcgtgcactcaacaaagaatatgcaaaccacacaaatcaaacagctttttaatcctcggaccaactttcagattcaacatcagctgaatcccgcaacttgccggaatattaaaaagtactcaactagttggacagctccgcggaaccaccccttcgtcatccagggtgatgtcatggcgaattcatctgagtgggtgcagagcaaaccacaccggagtctcgaatctctttcaccactcaaaggacctaagaaaaacaaacactcccagatctgggcaattaaaaacgaagacatcaaaccgctgtctagtaaatgggaaacagcttccagctcttttggcatggacgccaacgtattgaagtataaatccctgcaggcagaagaaacaaaccagcaatcctccaagcacacggcactgcatctcaccaaaaataaggacgaacaggcgaacaaaaacgacgggcagccaacactgtatctgaagtttcagcgagagtcttag

SEQ ID NO: 17231 - DNA, 1626 bp, synthetic construct
  source 1..1626: mol_type = other DNA; note = Synthetic coding sequence
atgagctcgtccggctatcctccaaaccagggcgcattctctaccgagcagtcaagataccctccacacagcgtgcagtatacattccccaatacgcggcaccagcaggagttcgctgtgcccgattaccgttcctcccatttggaggtctcgcaggcatcgcaacttctacagcagcagcagcagcagcaattgcggcgcaggcccagtctgctgtctgaatttcatcccgggtctgatcggcctcaggagaggcgcaccagctacgagccctttcaccctggaccttcccctgtcgatcatgatagtctggaatccaagcgacctcgtttggagcaggtgtccgactcccattttcagcgcgtgagtgctgcggtccttcccctcgtccacccactgcctgagggactccgtgcaagtgccgacgcaaagaaggaccccgccttcggcggcaagcatgaagcgccctcatcgccaatttcgggccaaccctgtggcgacgatcaaaacgccagcccgtccaagctgagcaaggaggagctgatccaaagcatggacagagtggaccgcgaaatagccaaagtcgaacagcagattctgaaactgaagaagaaacagcagcagttggaggaggaagcggcaaagccaccagaacctgagaagccggtttcacccccgcccgtggagcagaagcaccggagcatcgtgcagatcatttacgacgagaatagaaaaaaagccgaggaagcccacaaaattttcgaaggactggggcctaaggttgaactgcctttatacaaccagccaagtgatacaaaagtgtaccacgagaacattaagactggcgtccctgcccggagaatgatgaaaaaccaggtgatgagaaagaaactcatcctgttcttcaagcgtcgcaaccacgcgagaaagcagcgggaacagaagatctgccagagatatgatcagctcatggaggcctgggaaaagaaagtagaccgaatcgagaataatccacggagaaaggcgaaggaatctaaaacaagggagtattatgaaaagcagttccctgaaattcgtaagcagcgggagcagcaggagcggtttcagagggtaggccagagaggggctggcctgtccgcaaccatcgctcggagcgaacatgaaattagtgaaattatcgacggactgagtgaacaagaaaataacgagaaacagatgcggcagttaagcgttattccacctatgatgtttgatgcggagcaacggagggtcaaattcattaatatgaacggcctcatggaagacccaatgaaggtctacaaagaccgacagttcatgaatgtgtggactgatcacgaaaaagagatctttaaggataaattcatccagcacccgaaaaattttgggctgatcgccagttatcttgagagaaagtcagtaccggactgtgtgctgtactattatttgaccaagaagaatgagaactacaaggctcttgtgcggagaaattatggtaaaaggaggggtaggaatcaacagattgcccggcctagccaggaagagaaagtcgaggagaaggaagaagataaagctgaaaagacggaaaagaaggaggaggagaaatag

SEQ ID NO: 17232 - DNA, 840 bp, synthetic construct
  source 1..840: mol_type = other DNA; note = Synthetic coding sequence
atgaaatttccctttctccctattctagtgatgaagtttattgagaaggcccagaatatgtctaagtacgtcctgatcgacacacccggacagatagaggtgtttacgtggagcgctagtggaacaattataacagaagccttagcttctagtttcccaacagttgtgatatatgtgatggacacatcccgatctacaaatcccgtgacctttatgtccaatatgctgtacgcttgctccattctgtataaaacgaagctgcctttcattgtcgtcatgaacaagaccgacatcatcgatcactcctttgccgtggaatggatgcaggactttgaagcatttcaggatgcgctgaatcaggagacgacatatgtcagtaacttaactcgctctatgagcttggttctcgacgaattctattctagtctgcgggtggtcggcgtgagtgccgtcttaggaacaggactcgacgagcttttcgtgcaggtgacgtctgccgctgaggagtacgaaagggagtaccggccggagtacgagagactgaaaaaatcgctcgccaacgccgaatctcaacagcagcgggagcagcttgaaagactaaggaaggacatgggctcagttgccctggacgcagggacagcaaaagactcgttgtcccccgtgctgcacccatctgacctcattctgacaagaggcacccttgatgaagaggacgaggaggcggattctgatactgacgacatagatcatcgggttaccgaggaaagccatgaggagcctgccttccagaattttatgcaggagtccatggctcagtattggaaacgaaacaacaagtag

SEQ ID NO: 17233 - DNA, 1230 bp, synthetic construct
  source 1..1230: mol_type = other DNA; note = Synthetic coding sequence
atgaaggatacccaggacattcaggaggcatcaaaagcaatgcagaataaggtgcatgagcaggaagacaaaaacgagaaacaaaagcagcgggaggacaagcttggcgtttacagtctcgtgcatttcagccccaagatgctcgggagtgtggccactaccctgccactctcctccagtaattcaagtggcatgccgttaggttactacctctcatcgcctcagattagcagggtgaccatatctacaacgggtcagctcacttccaaagccaccgttggatcttgctcacgcgtggaaaacagtctggatgccagcccttttagcgttccaaaaaagcaggatgagtccccgatgatcggcgatggtgaggattatttcctgagccttttcggagacagcaaaaagctgaccgcgcacagcaattatacacagaagaccctgaaatactttagcatgatacttgaggaggtagggcagtttacaagcagctcactgggcgacgtggaaattgccgaagtcaacgtgaaagggctattcgtaaagctgattaactcttcgctggacaaagaaatggctattggagaccatatactgcagcagaatgtgaatggccagaccatatccctctaccgctttctgcccaacatcgtgatgcaagccaacagtaccgtcaccgtttgggccgccgcatcagaagctaaacaccagcctccttccgattttctgtggaaggagcaagacaaatttagagcctctccggattgcataacaattctgtgcaagcccaacgggcaagccatcgcttggtacacgccaatacactggaagcaggcctgggaaaagctggacgcagatgtggagttcaaccggtgttcagtggttagccctactttccgaaagcgcgttttccaatggacggcaagtactgctaccattacaaaagaaaaacaggatcaacccaagaaggatatctctaattatcaggtcgagcaggctcaagtacttttgaagcgcgaaaaggaaatcccccctaccgtattccctaatagaagcccctggtgtcaaaatccttatgtctccgcacatccgtattgccctttaatagagccacacaatacttcaacggcgggaggccggttggaccggcagcctcggactcggtcgaccagaccaaatcgagcttcaggttctaagaaaaaaaaaacaagcgagagccaaaagcagtag

SEQ ID NO: 17234 - DNA, 2442 bp, synthetic construct
  source 1..2442: mol_type = other DNA; note = Synthetic coding sequence
atgtcggagcagggcgacctcaaccaggccattgcagaggagggcgggacagagcaggagactgcaacccccgaaaacggcatcgtaaaaagtgagtccctggatgaggaggagaagttggagctgcagcggcgcctggaggcccagaatcaagagcgccggaagtccaagtcgggcgctggcaagggcaaactgacccggtccttagctgtttgtgaggaatcatcggctaggcccgggggggaatctcttcaggaccaagaaagcatccacctgcagttgagctccttctcctctctgcaggaagaggataaaagtagaaaggatgacagcgaacgcgaaaaagaaaaagataaaaacaaggataagacaagtgagaagcccaagatccgtatgttgtcaaaagattgtagccaagaatacacagactccacgggtatcgacttgcatgaattcttgatcaatacccttaagaacaactctagagatcggatgattctcctgaagatggaacaggagatcatagacttcatcgccgacaataacaatcactacaaaaagtttccccagatgtctagttaccagcgcatgttggtgcacagagtggctgcctacttcggtctagaccataatgtggaccaaacaggcaagtcagtgattataaacaagacttctagcactcgcatcccagagcagcgcttctgcgagcatctcaaagacgaaaagggagaggagtctcaaaaaaggttcatacttaagagggacaattcttctatagataaagaggacaatcagtcggtatgctcacaagagagccttttcgttgagaacagccggcttttggaggatagcaatatttgcaatgagacttacaagaagcgccagctgttccgaggcaatagagacggttcaggtcgaacgtccggctcccgtcagtcatcctctgagaacgaacttaagtggagcgatcatcagcgcgcatggtcttccaccgacagcgacagttccaatcgcaatctcaagcctgccatgaccaaaaccgccagttttggaggcatcacagttcttacacggggagactcgacatccagcactagatcgacaggcaagctgagtaaagcaggctcagaatcatcatcatctgccggatcaagcggctcgctgagccgcacccatccaccactccagtctacaccgctggtgtccggcgtcgccgctggctcccctggatgcgtgccgtacccagagaacggcattggcggacaagtcgccccgtctagtacttcctatatcctgctgccattggaggccgccacaggcattccaccaggcagtatcttgctaaatcctcacaccggacagccatttgttaatcccgacggcacgccagctatttataacccccccacatcacagcagccccttagatccgctatggttggccagagccagcagcagccgccccaacaacaacccagccctcaaccgcaacagcaagtacagccgccccagccgcagatggccggccctctcgtcacccaaagcgtgcagggactgcaggcttcatcccagagcgttcagtaccccgccgtctcattcccaccacagcacctgctacccgtttcacccacgcaacatttccccatgagagatgacgtcgcaacccagtttggccagatgacactttctagacagagctctggagagactccagaacccccttccggtcctgtgtacccatcatcattaatgccccagccagcacagcagccctcgtatgtaatcgcctctaccggccagcaacttccgacaggcgggttcagcggaagtggtcctcccatcagccaacaggtcctgcagccccctccctcaccgcaaggcttcgtgcagcaaccacctccagctcaaatgcctgtttactattacccatccggccagtatcccacttctaccactcaacagtatcgtccaatggcacccgtacaatataatgcgcagcgatcacagcagatgccacaagccgcacagcaggctggatatcaaccggtcctgagtggacagcagggatttcaggggcttattggcgtgcagcagcccccccagtcccagaatgtcataaacaaccagcaaggtactccggtccagtccgtaatggtcagttatccaaccatgagctcataccaggtgcctatgacacagggtagccaagggttgccacagcaaagctaccagcaacctatcatgttacccaaccaagctgggcaggggagcctacccgccacaggcatgccagtgtactgtaatgtcacgccaccaaccccgcaaaataacttgaggctcattggccctcactgcccctcatcaacagtgcctgtcatgtcagcgtcatgcagaacaaactgtgcatcaatgtcaaatgcaggttggcaggtaaaattctag

SEQ ID NO: 17235 - DNA, 1773 bp, synthetic construct
  source 1..1773: mol_type = other DNA; note = Synthetic coding sequence
atgcccagccctcagttgcttgtactattcggctcacagaccgggacagcccaggacgtgtccgagcggctaggccgggaagcaagacgcaggagactgggttgcagagtccaggcattagactcttatcctgttgtgaaccttattaatgagccactcgtgatctttgtgtgtgcgaccacgggtcaaggcgaccctccagataacatgaaaaatttctggcgtttcatttttagaaagaacctgcctagtaccgcactgtgccagatggacttcgcagtgctcgggctgggagattcatcttacgcaaaatttaacttcgtggctaaaaaactgcatcgacgtctgctgcagctcggcggctccgcactactgcccgtgtgcctgggtgatgaccagcatgagcttggtcctgacgctgctgtagacccttggctaagagacctttgggaccgggtgctcggactgtatccgccaccccctggtcttactgaaatcccacccggtgttccactgccatctaaattcacactcctgttcttacaggaggccccgagtactggttccgagggccagcgcgttgctcaccctgggtcacaggaacccccaagtgaatcaaagccttttctcgctcctatgatcagcaaccagcgcgttaccggcccttcgcacttccaggatgtccgactgatcgaattcgatatcctcgggtccggcatctcttttgctgccggtgatgtggtcttaatccagccctctaacagcgctgctcacgtacagaggttctgccaggtgctaggcctggaccctgaccagctgtttatgctgcagccacgggagcctgacgtgtcctcccccacccgtctgccccagccttgttccatgcgccatctggtgtctcactacctggacattgcttcagtgccaaggagaagcttcttcgaacttctcgcttgcctgtctctgcatgaacttgaaagggagaaactactggaatttagcagcgcccagggccaggaggaattatttgaatattgtaaccggccacgaaggactattttagaggtgttgtgcgatttcccccataccgcggctgcaatcccgcccgattatctgttagacctgatccccgtaatcagacctagagctttctccatcgcgtcttcattgctgattttagtggctgttgtgcagtttcagaccaggctgaaggaacctagaagaggactctgctccagctggctcgccagcctagacccgggccaggggccagtgcgggtacctctgtgggtgcggcctgggtcactggcgtttcccgagacaccagacacgccggtcatcatggtgggcccaggcacaggagttgcccccttcagggctgctatccaggaacgcgtggcccagggccagaccggcaactttctgttcttcggctgccgctggcgggatcaggatttttattgggaggctgagtggcaagagttggagaagagagactgcttaactctcatacccgccttttccagggagcaggagcagaaagtgtacgtccagcaccgtcttagggagctcggttcattagtttgggagctgttggacagacagggtgcatacttctacctagccggcaacgcaaagtcaatgcccgccgacgtgtcggaggccctgatgtctattttccaagaggagggcgggctctgctcccccgatgctgccgcttacttggcacggttacagcagacccggaggttccagaccgaaacctgggcatag

SEQ ID NO: 17236 - DNA, 2436 bp, synthetic construct
  source 1..2436: mol_type = other DNA; note = Synthetic coding sequence
atgcccctgtccagtcccaatgcagctgccacggcaagcgacatggacaaaaatagtggtagtaactcatcctcagcatcctcaggctcatcaaagggccagcaaccacctcgctccgcctctgctggcccagccggagagagcaagccgaagtcggacggaaagaatagttccggcagtaagagatataaccgaaaacgggagctgtcatacccaaagaatgagagtttcaataatcagtcccgccggtcatcctcgcaaaagtccaaaacctttaacaagatgcccccccagcggggtgggggatcatctaagttgttttcctctagcttcaatggtggacgcagggacgaggtggcagaagcacagcgcgccgagttcagccctgcacagttctcaggccccaagaagatcaacctcaaccacttgcttaatttcacctttgagccccgcggccagacaggccacttcgaggggtctggccacggaagctggggtaaacgtaataagtggggtcataaaccatttaataaggagctttttttacaggctaactgccagttcgtggtgtctgaggatcaagactacacggcccattttgcggaccccgatactcttgtgaactgggacttcgtggagcaggtgaggatatgttcccacgaagtgcctagctgcccaatctgtctgtatcctccaaccgccgcgaagatcacgaggtgtggtcatattttttgctgggcctgtatcctgcactatctaagtctgagcgaaaagacatggagcaaatgccctatttgttatagcagcgtccacaaaaaggatcttaagtccgttgtggccacagaatctcaccagtatgtagtgggagacacaattactatgcagctcatgaagcgggagaagggcgtgctggttgcactaccaaaatctaaatggatgaatgtcgatcaccccatccatctgggggacgaacaacatagccagtactccaagttgcttctggcctctaaggagcaggtgctgcatcgtgttgtcttagaagagaaagttgcacttgagcaacagctggccgaagagaagcacactcctgaatcttgttttatagaggcagcaatccaggaactaaaaacaagggaggaggccctgtccgggctcgctggttcccggcgggaggtgacgggggtggttgccgccctagaacagcttgtcttgatggcccccctcgcaaaggagtccgtgttccaacccaggaagggcgtcctggagtacctgtcggcattcgacgaggaaactaccgaagtgtgcagcctggataccccgtcacgcccccttgccctgcccctggtggaggaggaagaagcagtctctgagccagaacccgagggcctccctgaagcatgtgacgacctggagttagccgacgataatctgaaagaaggcacgatctgcaccgagagctcacagcaggagccaattactaaatctggtttcacccgcctctcgtcctccccttgctactatttctaccaggcagaggacggccagcatatgttcctgcaccccgtaaatgttaggtgtctggtgagagaatacggatcattagagcggtcacctgagaagatttcagccacagttgtagaaatcgccggatactctatgagcgaggacgtgcggcaaaggcacagatacctgagccatcttcccctcacatgcgagttctcaatctgcgaattggctctgcagcctcccgtggtcagcaaggagacgttagaaatgttcagcgacgacatcgagaagcgaaagaggcagcgacagaaaaaagccagagaggaacggaggagagaaagaagaatagagatagaagaaaataagaagcagggtaagtatcctgaagttcacatcccgctggagaacctccagcagtttcctgcttttaattcttacacttgctcatctgatagcgcacttggacccacctctacagaaggtcatggggcgctgagcattagccccctttcgaggagtccaggaagtcatgctgatttcctcctcacaccgttgtcccccaccgcgagccaaggatcgccatccttttgtgtgggcagcctggaggaggactctccgttcccctcgttcgcccagatgttaagagtgggcaaggcgaaagcagacgtgtggccgaagaccgctccaaagaaagacgaaaattccctggttccgcctgctccagtagattccgatggggagagcgataactctgatcgcgtgccagtgcccagcttccagaacagcttcagccaggcaattgaggccgccttcatgaagctggatacgcctgctacctccgaccccttgagcgaagaaaaggggggcaaaaaacggaaaaaacagaagcagaagcttctcttcagcactagcgtggtacatacaaaatag

SEQ ID NO: 17237 - DNA, 189 bp, synthetic construct
  source 1..189: mol_type = other DNA; note = Synthetic coding sequence
atgcccgagataagggtaactccattgggtgcttgccctgtgttgtcctggaacctggtgttgccccctgggcgaggaagtcgggcaccaagctctacggataccagaacgggtttccacgtgctgccccacggcgtatccgcttcaagtgaaggcgcacccagacccggagtggatacagtgctgtag

SEQ ID NO: 17238 - DNA, 948 bp, synthetic construct
  source 1..948: mol_type = other DNA; note = Synthetic coding sequence
atgtccgggctcgttctgggccagcgggatgagcctgccgggcacagactgagtcaagaagaaatcttgggtagcactcgccttgtgtcccaaggattggaggccttgaggtcggagcatcaggccgtgctccagtctctgtcccaaacaatcgagtgtctgcaacagggagggcacgaggaaggacttgtgcacgaaaaagccaggcagctgcggcgctctatggagaatatcgaactgggcctcagcgaggcccaagtcatgctcgctttggctagccatctgtccacagtcgaatcagaaaaacaaaaattaagagctcaggttagaagactttgccaggagaatcaatggctgagagatgagctggcggggacacagcaacgcctacagcggagtgaacaggccgtggcccagctggaggaagaaaagaaacatctagagttccttggtcagctgagacagtacgacgaggatggccacacctccgaagagaaggagggcgatgctaccaaagacagtctggatgacctgtttcccaatgaggaagaagaggacccctctaacggtcttagccggggtcaaggcgccaccgccgcacagcaaggcggctacgagatacccgcacgactccgtacactccacaacctggttattcaatatgcagcccaaggcaggtacgaagttgccgttcctctgtgtaagcaagccttagaggatctggagcgcacatccggaaggggccaccctgatgtcgccacaatgcttaatatcctcgccctggtgtatagagaccagaataaatacaaggaggctgcccatctgttgaacgacgcattgtccatacgggagagtactctgggtcccgatcacccagcagtgtctattccctgtcccccccacccgacacccagaactccacaccactgctgttttgggttgagttag

SEQ ID NO: 17239 - DNA, 2055 bp, synthetic construct
  source 1..2055: mol_type = other DNA; note = Synthetic coding sequence
atggagaatttacagactaatttttccctggtacagggaagtactaaaaagctaaacggcatgggcgacgacggcagtcctccagccaaaaagatgattactgatatacatgcgaatggaaaaacaatcaataaggttcccacggttaagaaagaacacctggacgactatggggaggccccagtcgagaccgatggagaacacgtcaagcgaacctgtaccagcgtgccagaaacactccatctgaatccttctttgaagcatactttagcccagtttcacctatccagtcagtcctccctggggggacctgccgccttttcagctaggcacagtcaggagagcatgagcccaactgtattcctcccactgccctccccacaggtccttccgggtcctcttctgattccaagcgactcctctacagagctgacgcagacagtcctggagggagagtcaatctcctgcttccaggtgggcggagagaagaggctatgcctgccacaggtgctgaattcagtgctgcgggaatttacgctgcaacagataaatactgtctgcgacgaactctacatttactgcagcaggtgtacctctgaccagttgcatattctcaaggtattgggcattcttccgttcaatgccccctcttgcgggctaattaccctaacagatgcccaacggctgtgcaacgctttactgcggccccgtactttccctcaaaatggctctgtgctgccagccaagtcaagcctcgctcagcttaaggaaacgggatctgcgttcgaagttgaacacgagtgtttaggtaaatgtcagggactcttcgctccccagttttacgtacagcctgacgccccatgcatccagtgtctggagtgctgtgggatgttcgctccacagacctttgtgatgcactctcataggtcaccggacaaacggacttgtcactggggcttcgagtctgccaaatggcactgctatctccatgtgaatcagaagtacttgggcacgcctgaagagaagaaacttaagatcatcctggaagaaatgaaggagaaattctctatgcgatctggcaagcggaaccaatccaagacagatgctcctagcggcatggagttgcaatcctggtatccagtgataaaacaggaaggcgaccacgtgagccagacgcatagtttcctgcatccttcgtactacctttatatgtgtgacaaagttgtcgccccaaacgtctccctcactagtgctgtttctcaaagtaaagagcttacaaaaacggaggcttccaagagcattagtcggcaaagcgagaaagcccacagcagcggaaaactacaaaaaaccgtgtcctacccagatgtgagcctggaggagcaggaaaagatggatcttaagacatccagggaactctgcagccgactggatgcttcaattagcaacaacagcacctcgaagagaaagagtgagtctgccacatgcaatttggtccgagatataaacaaagtgggcatcggattggtggctgcggccagttccccacttctcgtgaaggacgtaatctgtgaggacgacaagggaaaaattatggaggaggtcatgcggacatacttaaaacagcaggaaaagcttaacctgattttacagaaaaaacagcagctgcaaatggaagtgaagatgttgagctcttcgaagagcatgaaagaactcaccgaggaacagcagaacctacagaaggagctcgaaagtctgcagaacgaacatgcacagcggatggaggagttctacgtcgaacagaaagacctggagaagaagctagaacagataatgaagcagaaatgcacctgtgattctaacctcgaaaaggacaaagaggccgaatacgccggacagttggcagagctcaggcagagactggatcacgctgaggccgaccgccaagaattacaggacgaactgagacaggagagagaggccaggcagaagttagagatgatgatcaaggagctgaaactacagattctgaagtcttctaagacagccaaagagtag

SEQ ID NO: 17240 - DNA, 4050 bp, synthetic construct
  source 1..4050: mol_type = other DNA; note = Synthetic coding sequence
atggaggagaatgagtcccagaagtgtgaaccttgcctgccatattctgccgaccgccgtcagatgcaggagcagggcaaaggaaatctccacgtcactagccccgaggatgcagagtgtagacgtacgaaggaacgcctgagtaatggcaattcgcgggggtccgtctccaaatcatcccgcaacattccgcggagacacaccttgggcggtccccgatcctctaaagagattctaggtatgcaaacctcagagatggaccgcaagcgcgaggcatttttggaacatctcaaacaaaagtacccacatcacgccagcgcgatcatgggtcaccaggaacggctcagggatcagactcgatcacctaaactttcccattcaccacagccgccaagcctgggtgatcctgtggaacatctttccgaaacttccgcagattcgctcgaggccatgagtgagggcgatgcacccacgccattctcacgcgggagccgtactcgcgcaagtctgcccgtggtgcgatccacaaatcagaccaaggaacggtcattaggggttctttacttgcagtacggcgatgagacaaagcagctgcgcatgcctaacgagataaccagcgctgacacaatcagagcattattcgtaagcgccttcccacagcaattgaccatgaaaatgctcgaaagtccatctgtggccatctacattaaggacgaatcgcgtaacgtatactacgagttaaacgacgtgcgaaacattcaggaccgcagcctcctcaaagtgtacaacaaggacccggcccacgcctttaaccacaccccaaaaaccatgaacggtgacatgagaatgcaacgggagctggtctatgcaagaggggatggccccggagcaccaaggcccggcagcacggctcacccgccccacgccattcccaattctccaccaagcactcccgtgccccattccatgcccccttccccatcccgaatcccatatggggggacccggtcaatggtcgttcctggaaatgctaccatacctcgcgaccgaataagctcgctcccggtgagcaggcctatctcgccatccccttcagcgatattagagcggcgcgatgttaaaccggacgaggacatgtccgggaagaacatcgcgatgtacaggaatgaggggttttacgccgacccttacttgtatcacgaaggccggatgtccattgcctctagtcacggaggacaccccctcgacgtccccgatcacataattgcttaccatcgcaccgccatacgtagcgcttctgcttattgcaaccctagcatgcaggcggaaatgcacatggagcagtctctctaccggcagaaatctcgcaagtacccagatagtcatctaccaacgctgggaagcaagacgcctcctgccagtcctcacagggtctctgatctcaggatgattgacatgcatgcgcattacaatgctcatggcccaccgcacacgatgcagcccgacagagcctcgccaagtaggcaggcctttaaaaaggaaccaggtactctagtttacatcgagaagccgagatccgctgcaggactgagcagcctggtagacctcgggcccccgcttatggaaaaacaggtgtttgcctacagcacagccactatccctaaggatcgcgagacatccgagaaaatgatgaagaccacagcaaacagaaatcatacagattcagcaggcacccctcacgtgagcggcggaaagatgctcagcgccttagagtctacggtccctcccagtcagccccctcctgtgggcacttcggccatccacatgtctcttctggagatgcgccgatcagttgccgagctgagattgcagttgcagcagatgcggcagctccaactacagaaccaggaattgttaagagccatgatgaagaaggccgaattagagatctctggtaaagtgatggaaactatgaaaaggctcgaggacccagtgcaaagacagagagtactcgtggagcaggaaagacaaaagtacttgcacgaggaggaaaagatcgttaaaaagttatgtgagctggaggacttcgtggaggatctaaagaaagactcgacggctgccagccgcctggtgacgttgaaagacgtcgaggacggggccttcctcctgcgtcaggtcggagaagccgtggccactctcaaaggagaattcccaacgctgcagaacaagatgcgggcgatactgcgtatagaagtcgaggcagtccgcttcctgaaagaagaaccacataaactggactcactgctgaagcgagttcgaagcatgacggatgtgttaacaatgctacgccgtcatgttactgacgggttactcaagggcacagacgcggcacaggccgcccagtacatggctatggaaaaggccacggccgctgaagtgctcaagtctcaggaggaagccgcccacacaagcggacagccgttccattccacgggggcccccggggacgccaaaagcgaagttgtcccactgtcaggcatgatggtcagacatgcgcaaagtagtcccgtcgttattcagcccagtcagcatagcgtcgccctgcttaatcctgcccagaatctgcctcacgtggcctcctcccctgccgtaccacaagaggcaacaagtaccttgcagatgagccaagctccacagtcccctcaaatcccaatgaacggaagcgccatgcagagtctgtttatcgaggagatccatagtgtctccgctaaaaatcgggcagtttctatagagaaagcagagaagaagtgggaggaaaaaaggcagaatcttgaccattacaacgggaaagaatttgaaaagctgctggaggaagcacaggctaacatcatgaagagcattccaaatctcgagatgccacctgccactgggcccttgccccgaggggacgcccccgttgacaaagttgaacttagtgaggattcccccaatagcgaacaggatctggaaaagcttggagggaaatcccctccccccccgcccccccccccacggagatcttacctgcccgggagcggattaaccactactcgctccggcgacgtggtgtacacgggtaggaaggaaaacattactgctaaggcaagtagtgaggacgccggaccatccccacagactcgcgctactaagtatcccgcggaagagccagcaagcgcctggacaccttcaccccctccggtgaccacctcctcatctaaggacgaagaggaggaggaagaggagggcgacaagatcatggcagaactccaggcgttccaaaaatgcagctttatggacgtgaattccaattcccatgccgaaccttcgcgtgcagattcacacgtgaaggatacccgaagcggtgccaccgtgccacccaaggagaagaagggtagctccggcgcgcctcagacatcccggatgcccgttcctatgtcagccaagaatagacctggtactcttgataaacctggaaagcagtccaaactacaggacccacgtcagtaccgtcaggccaacggaagcgcgaagaagagcggcggagacttcaaacctacctccccctcactgcctgcaagcaagattccagctctgagtccttcctcagggaaaagctcaagccttccttcctctagcggggatagtagcaacctgcccaatcctcccgccacaaaacccagcatcgcatccaatcctctgtcaccccagactggtccccctgcccactcggcaagtctcatcccaagcgtttctaacgggtccctcaaatttcagagtctgacacatacaggaaaagggcatcacctgtctttctccccccaatcccagaacggcagggcccccccgccccttagtttcagtagtagccctccaagcccggcatcttcagtatccctcaatcagggagccaagggcaccagaacgatacacacgccctccctgacctcttacaaggcacagaatggctcgtccagtaaagccaccccctccacagccaaagaaacctcctag

SEQ ID NO: 17241 - DNA, 177 bp, synthetic construct
  source 1..177: mol_type = other DNA; note = Synthetic coding sequence
tgaataatccacaaactggcaatgcagctgcgtcacataggggacaacattgaccacagaatggtgagagaagatcttcagcaggacggacgagacgccttggaccactttgtgttttttttcttcaggagggtccaggtcctgctccattttttctggaacaaccatcttctgtag

SEQ ID NO: 17242 - DNA, 429 bp, synthetic construct
  source 1..429: mol_type = other DNA; note = Synthetic coding sequence
atgccggaagaccaagtggggaagctggaagcaaccgagaacactatctccgccatggcagccgctgctgccgagcagcaacagttttacttactgttgggaaatcttttgtcacccgataacgtggtgagaaagcaggctgaagagacgtacgagaacatccctggacagtccaagattacatttctcctccaggccatacggaacaccactgcagccgaggaggcccgccagatggctgcagtcctgctgcgaagactactgagtagcgctttcgacgaggtgtatccggctctgccaagcgacgttcagacggcaataaagagcgagttattgatgatcatacagatggagacccagagcagcatgaggaaaaaggtgtgcgatatagccgcggaactggctcggaacctcattggcgtctattag

SEQ ID NO: 17243 - DNA, 93 bp, synthetic construct
  source 1..93: mol_type = other DNA; note = Synthetic coding sequence
atgggaagccggaaaaaagagatagctttgcaggtgaatatatcgactcaggagctttgggaggagatgctgagttccaaaggcctaacctag

SEQ ID NO: 17244 - DNA, 645 bp, synthetic construct
  source 1..645: mol_type = other DNA; note = Synthetic coding sequence
atggccggggagaactttgccactccctttcacgggcacgtcggccgcggtgcattttctgacgtgtacgaacccgccgaggatacatttctactacttaacgctctggaggctgcggccgccgagttagccggagtggagatctgcttggaggtgggatcgggctctggagtcgtctccgccttcttggcaagcatgatcgggccgcaggctctttatatgtgtactgatatcaaccccgaagccgctgcgtgtaccttagaaacagctagatgtaataaggtccatatccagccagtcatcacggacctcgtgaaagggcttctgccccgactgactgagaaagtagacctgctggtgttcaaccctccttacgttgtgacccctccacaagaagtaggctcgcacgggatcgaagccgcctgggctggcggcaaaaatggtagggaagtcatggatcgattctttccgctcgtgcccgatcttctgtctcccaaggggctattttatctagtgactatcaaggaaaataatcccgaggaaattctgaagattatgaagacaaagggactgcagggaacgactgcgctctcccgccaggcaggccaggaaaccctatccgtgttgaagtttacaaaatcttag

SEQ ID NO: 17245 - DNA, 1158 bp, synthetic construct
  source 1..1158: mol_type = other DNA; note = Synthetic coding sequence
atgggccgatggtgccagaccgtagcccgcgggcagagacctcgaacatcagcaccctcccgagcaggcgctttactgctgttattgctgttgttaaggtccgccggctgctggggcgccggagaagcgccaggtgccttatccactgctgacccagcagaccaatcggtccaatgtgtacctaaagcaacttgcccatccagtagacctcgtctcttatggcaaacccccaccacacaaaccctcccgagcaccaccatggagacgcaatttccagtgagtgagggcaaagtggatccctatcgcagctgcggatttagttacgaacaggatcccacactgagggatcctgaggctgtagcccggcggtggccttggatggtcagcgtgcgtgccaatggaactcacatctgcgcaggtaccatcatcgcctcccagtgggtcctgaccgtggctcactgtctgatttggcgtgatgtcatctatagtgtgagagtgggctctccttggattgaccaaatgacacagactgcgtcagacgtcccagtactccaggtcatcatgcactcccggtacagagctcagcggttttggtcatgggtagggcaggctaacgacataggactgctaaagttgaaacaggaactgaaatatagcaactacgtgcgacctatctgcctgccagggacggactacgtgctgaaggaccattccagatgcactgtgacaggttggggactttcaaaggcagacggaatgtggccacaatttagaactatccaagagaaggaagtgattatattgaataataaggaatgcgacaacttctaccacaacttcacaaagatccctacacttgtgcagatcattaagagccagatgatgtgtgccgaggacacccaccgggagaagttctgttacgagctcactggggagccactggtttgctcaatggagggtacatggtacctcgtggggctggtgagctggggcgctggttgccaaaaatcagaagctccccccatttacctgcaggtctcaagctaccagcattggatctgggactgcttaaacggacaggcccttgcccttcccgcgccctcgagaaccctactgctggccctcccactgccactctcactcctggccgctctatag

SEQ ID NO: 17246 - DNA, 255 bp, synthetic construct
  source 1..255: mol_type = other DNA; note = Synthetic coding sequence
atgagtggtctcgtgctgggccagagagacgagccagccgggcacaggctgagtcaagaggaaatcctcggaagtacacgccttgtctcccaggggttggaggccttgagaagtgagcaccaggccgtgctccagtccttgtcacagaccatcgaatgcctccagcaggggggacatgaggaagggctcgtgcatgaaaaagcacggcagctgcgcagatccatggagaatatcgagcttggcctgtctgagtag

SEQ ID NO: 17247 - DNA, 483 bp, synthetic construct
  source 1..483: mol_type = other DNA; note = Synthetic coding sequence
atgtccgtgaacagcgaaaagtcttcaagtagtgagcgacctgagccgcaacagaaggccccactggtgcctcctcctcccccccctccaccgccccctcctcctcccttacctgaccccaccccccctgaacctgaagaggaaattttaggctcagatgacgaggagcaggaggatcctgcggactactgtaagggcgggtatcacccggtaaagattggagacctgtttaatggcagataccatgtgattcggaagctgggctggggtcacttcagtacagtatggctctgttgggacatgcagggcaagaggttcgtggccatgaaagtggtaaaaagcgctcagcactacactgaaaccgctctggacgagatcaagctcctaaagtgcgtgcgcgaaagcgatccctccgacccgaacaaggacatggtggtgcaattaatagatgactttaaaatctccggtatgaatggaatatag

SEQ ID NO: 17248 - DNA, 66 bp, synthetic construct
  source 1..66: mol_type = other DNA; note = Synthetic coding sequence
atgaaccccgcgtccgcaccccctcctctacctccgccaggccagcaagtgattcacgtgacatag

SEQ ID NO: 17249 - DNA, 1212 bp, synthetic construct
  source 1..1212: mol_type = other DNA; note = Synthetic coding sequence
atgagcggttctgacggcggcctggaggaggagcccgaactgtccatcacactaaccttaagaatgctgatgcacggaaaagaggtcggctctatcattgggaagaaaggagagactgtcaaaaggatccgcgagcagagctcagcccgtattactatctcagaagggagctgcccagagcggatcaccaccataacgggaagcacagctgccgtatttcacgccgtctcaatgatcgcattcaagttagatgaggacctttgtgcagcaccggcaaacggaggcaacgtgagcagacccccagttacactgcgcttggtgattcccgcgagccagtgtggaagcctgattggcaaggccggaaccaagattaaggagatacgcgaaacgaccggcgcccaggttcaagttgccggtgaccttctcccaaattccacggagcgcgctgtgactgtctccggagtgcctgacgcaatcatcctttgtgttcggcaaatctgtgccgttatcttagagtccccccccaaaggagcaacaatcccctaccatccctctctgagtctgggtaccgtcttgctctccgcaaaccaaggcttctctgtccagggacagtatggcgccgtgacgcccgccgaggttacaaagttgcaacagctgagtagccacgccgtcccgttcgccacacccagtgttgtcccaggcctggacccaggcacacagacatcctctcaggagtttctggtcccaaacgatctaattggatgcgtgatagggcggcagggatcaaagatcagtgagatccgccagatgagtggtgcacatattaagatagggaatcaagcagagggcgcaggggaacgtcacgtcacaatcacaggctctcccgtgagtattgcactggcacagtacctgattacagcatgcctggagacagccaagagtacctctgggggcactccttcaagtgctccagctgatctgccagctcccttcagcccgcccctgacagcgcttcctacagccccccctggattgctgggcacgccttacgcaatttcactgtctaatttcatcggcttgaaacctatgccctttctggccctgcccccagcttcccccgggcccccgcctgggttggccgcttacactgccaaaatggccgccgctaatggatccaagaaagcagaacgccagaaattctcaccttactag

SEQ ID NO: 17250 - DNA, 5106 bp, synthetic construct
  source 1..5106: mol_type = other DNA; note = Synthetic coding sequence
atggggaacagcgacagccagtacaccctgcagggctccaagaaccattcgaacaccataacaggcgctaaacaaataccatgctccctgaagatccgcggtattcacgccaaagaggaaaaatcccttcacggctggggccacggatccaacggggcaggctacaaatcccgaagcctcgctcgctcctgtctgtcccacttcaagagtaaccagccctatgcttctaggttaggtgggccgacttgcaaagtcagcagaggggtggcttatagtacacataggacgaacgccccgggaaaggacttccaaggcatcagcgcagccttttctaccgaaaacggcttccacagtgtgggtcatgagctagcggataaccacattacctcccgggactgtaatggtcacctacttaattgttacgggcggaatgagagtatcgcttccacgcctccaggtgaagatagaaagagcccgcgggtgctgatcaagaccctcggcaagttggatgggtgtctacgggtggagtttcacaatggtgggaacccctcaaaggttccagccgaggactgctcggaacccgtccagctactgagatattcccctacactcgcttcagagacgtcccctgtgcctgaggctaggcgtggctcctctgcagactccctaccgagtcaccgaccttctccaaccgactcccgccttaggagcagtaagggttcttcgttaagttctgagtccagttggtacgattcaccttggggcaatgccggcgagctgagcgaggccgaagggtcttttttggccccaggcatgccagaccccagcctccatgccagcttcccgcctggtgatgcaaaaaagcccttcaaccagtctagctctctaagttcactgcgtgagctatacaaagacgctaatctggggagtctgagcccctcaggcatccgattgagcgacgagtacatggggacacatgcctctttaagtaaccgggtctcttttgcatcagatatcgacgttccctctagggttgcccacggggaccctatacagtatagtagctttacgctgccatgccggaagcctaaggcattcgtggaagatactgctaagaaggattctctcaaggctaggatgaggcggatcagcgactggaccgggtcactatcacgcaaaaagcgtaagctgcaagaaccccggtccaaagaggggtcagactatttcgactcccgcagcgatgggctgaacaccgacgtccaagggagcagccaggctagtgctttcctgtggtctggaggctctactcagatccttagtcagaggtcggagtctactcacgccattggaagtgatcccttgagacagaacatatacgagaattttatgagggagctggagatgtctaggacaaacacagagaatattgaaacatccaccgaaacggctgagagctcttcagaatctctgagtagtctcgagcagttagaccttctgtttgagaaggaacagggagtcgttagaaaggctgggtggctattctttaagccgcttgtgaccgtgcagaaagaacgaaagctagaactggttgcgcggcggaaatggaagcagtattgggtgacattgaagggctgtacattgctcttttacgagacgtacggcaagaattctatggaccagtccagcgctccacggtgcgcactctttgccgaagattccattgtacaatctgtcccagagcaccctaagaaagagaatgtgttttgtctcagtaattcatttggcgacgtgtatctcttccaggcaaccagtcaaacagacctcgaaaattgggtaaccgctgtccatagcgcctgtgcatccctgtttgcgaagaagcacgggaaagaagatactctacgattactcaagaaccagaccaaaaacctcctgcaaaaaatagacatggactcaaagatgaagaaaatggcggaactgcagctgtccgtggtcagtgacccaaagaatcgtaaggccatagaaaatcagatacaacagtgggagcagaacctcgagaagttccatatggatttatttcggatgcggtgttatttagcctcattgcagggaggggaacttcctaaccccaagtcccttctcgccgcagcctccaggccttccaagttggcacttgggcggttgggcattctcagcgtcagttcatttcacgcgttggtgtgcagcagggatgatagcgcactccgtaagcgcactctgtccttaactcagagggggcgaaataagaaaggcatcttcagcagtctcaaaggattggacacccttgctcgcaaaggtaaagaaaaaaggccaagcataacacaggtagacgagctgttacatatatacggaagtaccgtggatggtgtacctcgcgacaatgcttgggagatacaaacctacgtgcatttccaggataaccatggcgtgaccgtcgggattaaacctgagcaccgggtagaggatatactgactctggcttgtaagatgcgccagctcgagccatcacactacggtctgcagttaaggaaactagtggacgataatgtagaatactgcataccggcaccttatgagtatatgcagcagcaggtgtatgacgagatcgaagtgttcccactcaacgtctatgacgttcagttgaccaagacagggtccgtttgtgattttggtttcgctgtcacagctcaggttgacgaacgtcagcacctgtcgcgcatattcatttccgacgtcctacctgacggtcttgcatacggggaggggctccggaaaggcaatgaaatcatgacactaaacggcgaagcggtgtcagaccttgacctaaaacagatggaggctcttttttcagaaaaaagcgttggcctgacgttgatcgctagaccacctgacacgaaggccactctgtgtacaagctggtcagacagcgacctgtttagtagggatcagaagtctctcttacctccaccaaaccagagccagctccttgaagagttcctagataactttaagaaaaataccgccaacgatttctctaacgttcctgatataactaccggactgaagagatcacagaccgacggcactttagatcaagtgagccaccgagagaagatggaacaaaccttccggtcagcggaacaaatcaccgctctgtgccgctccttcaacgactcacaagcaaacgggatggagggcccacgcgaaaatcaggatccaccccctcggtcactggcccgacatctgtctgatgctgaccggctgcgtaaagtcatccaagaactcgtggatactgaaaaatcttacgtgaaagacctgtcatgcctcttcgaactgtacctcgagcctctgcagaacgagacattcctgacccaggatgagatggagagtctttttggatctctgcctgaaatgcttgagtttcaaaaagtgtttctggagaccctggaagatggcattagcgcctccagcgattttaacacgctggaaactccaagtcagttcagaaaattgctgttcagcttaggtggtagcttcttatactacgctgaccacttcaaactttattccggcttttgcgccaatcatattaaagtgcaaaaagtgctcgagagggccaagacggataaagcttttaaagcattcctggacgctcggaatccgaccaaacagcactctagcacgctggagagctatctaattaagccggtgcagcgcgtattgaaatatcctctgctgctcaaagaactagtgtcccttactgatcaggagtccgaagaacattatcacctgaccgaggccctgaaagctatggagaaggttgcatctcatataaatgaaatgcagaagatttatgaggactatggaacagtgttcgaccagttagtggcagagcagtctggcaccgagaaggaagtgacagaactctcaatgggagagctcctgatgcactcgaccgtcagctggcttaatccattcctgtctcttggcaaggcgcgaaaagacctcgagttaactgtgttcgtgttcaagcgtgccgtcattctggtgtacaaggagaattgtaagctcaaaaaaaagctcccttccaattcaagacccgcccataattctacagacctcgatccatttaaattccgatggttgattccgatctctgccttacaggtcaggctcggaaatcccgccggaactgaaaacaactccatatgggaactgatccacacgaagagcgaaatcgaaggccgcccggagaccattttccaactgtgctgttctgattcggaaagcaaaacaaacatagttaaagtgattagatcgattttgcgggagaacttcaggcgacatattaaatgcgagctgcccctcgaaaagacctgcaaagatcggctggtaccactgaagaaccgcgtgccggtatccgcaaagctcgccagcagtcggtctcttaaagttttgaagaacagttcttctaatgagtggacaggcgagacaggcaagggaacgttgttggattcagatgaggggagcctcagctcagggacccagtctagtggttgtcccaccgctgaaggccggcaggatagcaagagtacatccccgggcaagtatcctcacccaggattggctgactttgccgataaccttatcaaggagagtgatatactgtctgacgaagacgatgaccatcgacagaccgtaaagcaggggtctccaaccaaggacattgaaatccagtttcagaggcttaggattagcgaagaccctgatgtccaccccgaggccgagcagcagccaggccccgaatccggcgaaggtcagaagggtggcgagcagccaaaactcgttaggggacacttctgtcctatcaagcgcaaggccaacagtactaaaagagacaggggaactttactgaaggcacagattagacaccagtctctcgacagtcaaagcgaaaacgctacaatcgacttgaattccgtgctggagagagagttttctgtccaatcccttacatccgtagtgtcagaggagtgtttttatgaaacagagagccacggaaaatcgtag

SEQ ID NO: 17251 - DNA, 408 bp, synthetic construct
  source 1..408: mol_type = other DNA; note = Synthetic coding sequence
atgggtaagagttgcaaggtcgtggtctgtggccaggcttcagtcgggaaaaccagtattctggaacagttactgtacgggaaccacgtggtcggcagtgagatgatagagactcaagaggatatttacgtcggatccattgagaccgacagaggggtcagggagcaggtgacaattgttgtccttggaaataagtgtgaccttcaggagcaacgccgggttgatccagacgtggcccagcactgggccaagtccgagaaggtcaagctgtgggaggtgagcgtggctgaccgtcggtccttgctggagccctttgtgtatctggcctcaaagatgactcagccacaatctaaatctgcattccccctgtctaggaagaataaaggttccggcagcttggacgggtag

SEQ ID NO: 17252 - DNA, 3693 bp, synthetic construct
  source 1..3693: mol_type = other DNA; note = Synthetic coding sequence
atgcctcgaaaggggacgcagccctctactgcccgcaggagggaagaaggccctcctcctccttctccagatggggccagctctgatgctgaaccagaacctcccagcggccggaccgaaagtcccgccactgcggcggagactgccagcgaagagcttgataatcgaagcctggaggagattttgaactcaataccacccccacctccaccagcaatgactaacgaagctggggccccccgtcttatgattacacacatcgtcaaccagaactttaagagctatgcaggggagaaaattctgggccctttccacaagcgattcagctgtattattgggcccaatggctctggcaagagcaacgtgatcgactctatgctctttgtatttggctaccgcgcccagaagatcaggtccaagaaactgtccgtcctgattcataattccgacgagcataaggacatccagtcatgcaccgtggaggtacacttccagaaaattattgacaaggagggggatgactacgaggtgattccaaattctaatttctacgtttcaagaacagcctgcagagataacacatccgtctaccacatctccggaaagaagaagaccttcaaagacgtcggcaatctcctgaggagtcacggtatcgatcttgaccacaataggttcctgatcctgcagggcgaggtggagcaaattgccatgatgaagccgaaaggccagactgagcatgacgaaggcatgctggaatacctggaggacattattggatgtggaagattgaacgaaccaatcaaggtactatgcagacgagtagagatcctgaacgagcaccgaggcgagaaactgaaccgggtcaagatggtagagaaagaaaaagatgccctggagggagagaaaaacatcgcaatcgagtttcttacattggagaatgaaatcttcaggaagaagaaccacgtgtgccagtactacatctacgaactgcagaagagaattgctgagatggagacacagaaagagaaaattcatgaggatacaaaggaaattaacgaaaagagcaacatactgtccaatgagatgaaagccaagaacaaagatgtcaaggacacagaaaaaaagctgaacaagatcacgaaatttatcgaagagaataaagagaagttcacacagctcgatctggaggatgttcaagtccgggagaaacttaaacacgccacgtcaaaagctaaaaagttagaaaagcagctacagaaggacaaagagaaggtggaggagttcaaaagcatacccgccaaatccaataacattatcaatgaaacaaccactcggaacaatgctcttgagaaggaaaaagagaaggaagaaaaaaagctgaaggaggtaatggatagtctaaaacaggagacacagggcttacagaaagagaaagagagtcgggaaaaagaactcatgggttttagcaaaagtgttaatgaagcccggtcaaagatggacgtggcccagtcggagcttgatatttacctgagccggcacaacaccgctgtgtcccaactaaccaaagctaaggaggccctgatcgctgcaagcgagaccctgaaagagcgcaaggcagcaattagagacatcgaggggaagctgccacagactgagcaggagctgaaagaaaaagagaaggagctgcagaaacttacccaagaagagaccaactttaagtcattggtccacgacctatttcaaaaagtggaggaggcaaaaagcagtctcgccatgaataggagtcgcggaaaggtgttggatgcaatcatccaggagaaaaagagcggacgcatccctgggatttatggccgtctaggagacctcggtgctattgacgagaagtatgatgtggccatctctagctgctgccacgccctggactatatcgtggttgactctatcgatattgcccaggagtgtgtaaatttcctgaaacggcaaaacattggggtcgctacgttcatcgggctggacaaaatggcggtctgggctaaaaaaatgaccgagattcaaactcctgagaataccccaaggttgtttgacctcgtcaaggtgaaagacgagaagatccggcaagcattttatttcgccctgagggacacgctggtggcagataatttggatcaggctacacgggtggcttatcagaaggaccgacggtggcgagtcgtgaccctgcagggacagatcatcgaacagagtggcacgatgacgggcggcggatcaaaagtgatgaaggggcggatgggctcatcactcgtgatcgagatcagcgaagaagaggtaaataagatggagtctcaactgcagaatgactctaagaaagcaatgcaaatccaggagcagaaggttcagctcgaagaaagggtcgttaaacttcgccactccgagcgagaaatgagaaatacactcgaaaaattcaccgcctccatccagagactcattgaacaggaagaatacttaaatgtacaagtaaaggagctggaggctaatgtgctcgccactgcaccagacaagaaaaaacaaaagctgctggaggagaacgtgagtgccttcaaaactgagtacgacgcagtcgcagaaaaggccggcaaagtagaggccgaagtgaagaggttacacaataccattgtggagattaataaccacaaactgaaagcccaacaggataaattggacaaaataaacaagcaactggacgagtgcgccagtgcaatcacgaaggcccaggtggccattaagaccgcagaccgcaatctgcagaaggcccaggatagtgtgctgcgaactgagaaggaaatcaaagacaccgagaaggaagtggacgacctgacggcagaactgaagagcctggaagataaggcagccgaagtggtcaagaatactaatgctgcggagataagtaagatttccctgcaccctatcgaggacaatcctattgaggaaatctcggtactgtccccagaggatctggaagcaattaagaacccggatagcatcaccaatcagatcgcgctcctcgaagcacgctgccacgaaatgaagcccaatttgggcgcaatcgctgaatacaagaagaaggaagaactttacttacagcgcgtggccgagctggacaagatcacgtatgagcgtgattctttcaggcaggcctatgaagaccttcgaaaacaacgactgaatgaatttatggccggattctacataatcacaaacaagcttaaagagaactaccaaatgctgaccctagggggggatgcggaacttgagcttgttgatagcctggacccatttagtgaggggattatgttctcggttcgccctcccaaaaaaagttggaaaaagatattcaatctgtccggcggggagaaaacactatcaagtctcgctctggttttcgcgctgcaccactacaaacctacacccctctattttatggacgagatcgatgctgctctggatttcaaaaatgtctcgatcgttgcattctacatttatgagcagaccaaaaacgcccagttcatcattatctcacttcgcaacaacatgttcgaaatttctgatagattgattgggatttacaaaacctataatattactaagagtgtggccgtgaatcccaaagaaatcgccagcaagggactatgctag

SEQ ID NO: 17253 - DNA, 267 bp, synthetic construct
  source 1..267: mol_type = other DNA; note = Synthetic coding sequence
atgcctgaagatcaggtcggcaagctggaggctacagagaataccatatccgctatggctgcagcggcggctgagcagcagcagttctacctcctgttgggaaatctactgtcccccgataatgttgtacgtaaacaggcagaagaaacttatgaaaatatccctggacagtcgaagattacattcctgctgcaggccatccgcaacacgacggcggctgaagaggctcgccaaatggcagcagttctgttgaggcgactattatag

SEQ ID NO: 17254 - DNA, 3627 bp, synthetic construct
  source 1..3627: mol_type = other DNA; note = Synthetic coding sequence
atggacagcttgcctgacgaattcttcgtccgtcaccccgccgtggaagatcagaggaaggaggagacagaaaacaaactcgagaagagctccgggcaattgaataaacaggagaacgacatccctacggacctggtccctgtgaatctcttactggaggtaaaaaagctcctgaacgccatcaacacccttcccaaaggggtggtccctcatatcaaaaaattccttcaggaagactttagcttccaaaccatgcaacgggaggtagccgcgaatagtcagaatggggaagaaattgtccctgcattgacgctgaggttcttgattactcagctggaggcagctctgcgaaatattcaggcaggaaactataccgctcaccagatcaacatcggttactatttgacactgctgtttctctatggcgtagccctaaccgaaaggggaaagaaagaggactataccgaagctgagaacaaatttctggtgatgaagatgatgattcaggagaacgaaatttgcgaaaattttatgagtcttgtttacttcggcaggggactactgcgctgcgctcagaaacgttacaacgggggtctattggagtttcacaagtcattgcaggagataggcgataaaaacgatcattggtttgatatcgatcccacagaagacgaggatctgccaacaacattcaaggacctgctgaacaactttatcaaaacaaccgagagtaacattatgaaacagaccatatgcagttatctggactgtgagcggtcttgcgaggccgacatcctcaaaaatacttcttataaggggttttttcagttgatgtgttctaagagctgctgcgtctactttcacaagatttgctggaagaaattcaaaaatctgaagtatccaggagaaaacgatcaaagcttttctgggaaaaaatgcttgaaagaaggatgcacgggcgatatggttcggatgttacagtgtgatgtgcccgggatcgtgaagatattattcgaagtggtgagaaaggacgagtacataacgatcgaaaatcttggcgcttcctatcggaagctgatttcactaaaaattactgatactgatatccgacccaagataagcctcaagttcaacacaaaagatgaaatgccaatatttaagctcgattacaactatttctaccatctactccacattatcatcattagtgggactgatattgtgcggcaaattttcgatgaggccatgccgccacctctcctgaagaaggaacttctgatccataaaaacgttctggagagctattataaccacctgtggacaaatcatcctcttggcgggagttggcacctactgtatccgccaaataaagagctgccacaaagtaagcaattcgacctttgccttttgctggccttgataaaacatctgaatgtgttccctgcacctaagaagggctggaatatggagccaccaagcagtgacataagcaagagtgctgacattctgaggctgtgcaagtaccgagacattctgctctccgagatcttaatgaacggtttgacagagtcacagttcaacagcatctggaaaaaggtgtccgatattctccttcgactcggaatgatgcaggaagacatcgataaggtaaaagagaatccgatcgaaaacattagcctcgactatcatcagctgtccgtttatctcgggatccccgtaccagagattatacagcgcatgctgagttgttaccaacaaggcattgctcttcagagtatcacaggcagccagcgaatcgaaattgaggaactgcagaatgaagaggaggagctgtcgccacctctgatggaatacaacatcaatgtcaaaagtcaccccgaaattcagttcgcagagatcaataaagacgggaccagtatcccaagtgaatcatccacggagtccctaaaggacttgcaggaggtaaagagcaagcagcggaagaagaagaaaacaaagaacaaaaaaaataaggactcaaaggaggaccaagtcccctacgtggttgagaaggaagagcaactgcgaaaagagcaggcaaacccccacagcgtctctaggctaataaaggatgatgcgagcgatgtacaggaagactcggcaatggaggacaaattttattccttagatgagctgcacatcctcgatatgatcgaacagggctctgccggaaaagtgactaccgattacggtgagaccgagaaagagagactcgcacggcagagacagttgtacaagctgcattaccaatgcgaagactttaagaggcagctccggacagtgacttttagatggcaggagaaccagatgcaaattaaaaagaaagataagatcatagcctctcttaatcagcaagtcgcttttggtatcaataaagtgagtaagctccagcggcagattcacgccaaggataacgaaatcaaaaatctgaaggagcagctatccatgaaaaggtcccaatgggagatggaaaaacacaatctggaatccacaatgaagacttacgtcagcaaacttaacgcggaaacatcccgtgccctgaccgctgaagtttactttctccagtgtagaagggacttcggccttctgcacctcgaacagaccgagaaagaatgtttgaaccagcttgccagagtaacccatatggctgcttcgaaccttgaaagcctgcagttgaaggccgccgtggattcctggaatgcaattgtcgcagacgtgcgcaataagatcgcatttctaaggacacaatacaacgagcaaattaacaaggtcaaacagggatttgcactcagtacactccctcccgttcagctgcctcctccgccgccatctccagaaatcctgatgcagcagtttcttgggcgcccactggttaaagaaagtttttttcggccgatcctgacagtgccgcagatgccagccgtatgcccgggtgtggtcagcgccaccggccagccacgggcccctctcatgaccggaattgcttgggcactgccagccccagtgggcgatgcggtgcccccgagcgcaggactccgtagtgacccaagcattatgaattgggaaagaattacggaccggctgaaaacagccttccctcagcagacacgcaaagagctcactgatttccttagaaagctcaaggatgcatacggaaagtcgctgtcggaactaaccttcgacgagattgtctgtaaaatcagtcagttcatcgacccaaagaagtcccagtcccagggaaagtcagtgtctaacgtcaattgcgtttcaccaagccactccccaagtcagccagatgctgcccagccccccaaaccggcatggcgcccgctgaccagccagggcccggccacgtgggagggcgcaagcaaccccgatgaagaagaagaggaagaagagccctgcgtcatttgccatgaaaatctgagtcccgaaaatctgagtgtattgccttgtgcacataaattccatgcccagtgtatccgcccttggctcatgcagcagggcacgtgccccacatgccgcttgcacgtacttctccctgaagaattcccggggcatccctctaggcagctgcctaagatctag

SEQ ID NO: 17255 - DNA, 1743 bp, synthetic construct
  source 1..1743: mol_type = other DNA; note = Synthetic coding sequence
atggtgctcgtcgggacacaggatgcgatctctgccgccaatcctcgcgtaattgatgactccagagcccggaagctctcaacggatctgaagcgctgtacctattacgagacctgcgcgacttatggacttaacgtcgagcgtgtttttcaagacgtcgcccaaaaggtcgtggcgctgcgcaaaaaacaacaactggcaatcggcccctgtaaatcactgcctaactctccctcccattctgccgtctctgcagcctccattcccgcagtgcacattaatcaggcaacaaacggggggggttctgcattcagcgattattcctccagcgtgccatccactccttctatcagtcagcgcgaactccgcattgagacgatcgccgcttctagtactcctacccctatccggaaacagtctaagagacggagtaacatcttcaccagcagaaaaggcgccgacttggacagagagaaaaaagccgcagaatgtaaggtggatagcataggctctgggcgggctattcctataaagcagggtatcctcctgaagcggagtggcaagtctctgaataaggagtggaaaaaaaaatacgttacattatgtgacaacggactgcttacctaccatccgagcctgcacgattacatgcaaaacatccacggaaaagagattgacctgctgcgtactaccgtgaaagtcccggggaaacgtctgccccgagcgactcctgccactgcccccgggactagtcctcgggcaaacggattgtcagtcgagaggagcaatacccagctgggcggtggcaccgaggcggaagagagtttcgagtttgtagtagtgtccttaaccggccaaacatggcatttcgaagcctcaaccgccgaggaaagggagctatgggtccaaagcgtgcaagcccagattctggcctctctccagggatgcagaagcgccaaagacaaaacaaggcttggcaaccagaacgccgccctggcggtccaggccgtgagaaccgtgcgcggcaactccttttgcatcgattgcgacgctcccaacccagactgggcgagcctcaatctgggagctttaatgtgcatcgagtgctcgggtatacatagacacctgggcgcacatctttcccgtgtacggtccctagatctggacgattggccccccgagcttctggcggtcatgaccgccatgggaaacgccctggccaacagcgtgtgggagggtgctctgggtggctacagcaagcccggtcccgatgcctgtagggaagagaaggaacgctggatccgggctaagtatgagcaaaagctgtttttggcccccctgccttctagcgatgtcccgttggggcaacagctcttgcgggccgtggtggaagatgaccttaggttactggtcatgttgctagcacacgggtcaaaggaggaggtcaatgagacttatggcgacggagatggccgcacggcactgcacctgagctcagcgatggctaatgtagtatttacacagctgctgatttggtacggagtagatgtgcgttctagagatgcgcggggtctgacaccactagcctacgccagacgcgcaggatctcaggagtgtgctgatattttgattcagcacggctgcccgggcgaaggatgtggcctcgcccccacgcctaacagggaaccagccaacggaaccaatccatccgcagaattacatcgtagcccaagcctgctgtag

SEQ ID NO: 17256 - DNA, 312 bp, synthetic construct
  source 1..312: mol_type = other DNA; note = Synthetic coding sequence
atggcagaactgattcagaagaagctacagggcgaggtggaaaagtaccaacaactgcagaaggacttgagcaaatcaatgtccggtcgccagaagctggaggcccagctgaccgagaacaacattgtgaaggaggagcttgcacttttagacgggagcaacgtcgtttttaaactgttaggccctgtgttagtgaagcaggaattgggagaagcgagggccactgtggggaagcgcttggattacattactgcggaaatctttcttcggactataccagatcctggcgacgttcctgactcctttttctag

SEQ ID NO: 17257 - DNA, 453 bp, synthetic construct
  source 1..453: mol_type = other DNA; note = Synthetic coding sequence
atgacgtcacggaagaaggtcttgctcaaggtgatcattctgggagatagcggtgtcgggaaaacatctttgatgaaccagtatgtgaacaagaaattttctaatcagtacaaggccaccatcggtgccgacttcttaacaaaagaggtgatggtggatgaccggcttgtgacaatgcagatctgggataccgcgggacaggaaaggttccaaagcctgggcgtggccttctatagaggtgcggactgttgcgttttggtgttcgatgtgaccgctcccaatacatttaagacgctggactcatggagggacgaatttctgatacaggccagccccagggatccggagaattttccatttgtagttttaggaaataagatagacttagaaaacagacaagtcgcaacaaagcgtgctcaggcatggtgttattcaaagaataatattccctag

SEQ ID NO: 17258 - DNA, 540 bp, synthetic construct
  source 1..540: mol_type = other DNA; note = Synthetic coding sequence
atgaccgatctcgtggccgtgtgggatgtagctctgtctgacggcgtgcacaaaatcgaattcgaacatggaaccacatctgggaagagagttgtttatgtggacggcaaagaggaaatacgtaaggagtggatgttcaaactggtggggaaagagactttctacgtcggcgcagcaaaaacaaaagccacgataaacattgatgccatttcaggttttgcctatgaatacactctggagatcaacggaaagtcattaaagaaatatatggaggacaggagtaagactacaaatacttgggtgctccatatggatggagagaacttcagaatcgtacttgagaaagatgcgatggatgtgtggtgtaacgggaagaagctagaaaccgccggcgagtttgttgacgatggcaccgaaacacacttctcaatcggcaaccatgattgttatattaaagccgtaagctccggtaagaggaaagagggaatcattcacaccttgatcgttgataacagagagattccagagatcgccagctag

SEQ ID NO: 17259 - DNA, 171 bp, synthetic construct
  source 1..171: mol_type = other DNA; note = Synthetic coding sequence
atggatagttccatacatctgtcatccttgatctcccggcacgatgacgaagctactagaacatcaacttctgagggcttggaggagggcgaagtggaaggagagacactccttattgtggagtcagaggaccaagccagcgtcgacctcagccatgatcagagcgggtag

SEQ ID NO: 17260 - DNA, 153 bp, synthetic construct
  source 1..153: mol_type = other DNA; note = Synthetic coding sequence
atgtgcagtacaagtgggtgcgacctcgaagaaatcccattggatgatgatgacttgaatactattgaatttaagatcctcgcctattatacacgacaccatgtatttaagtctacacctgctctgtttagtcctaagctgctgaggacctag

SEQ ID NO: 17261 - DNA, 1203 bp, synthetic construct
  source 1..1203: mol_type = other DNA; note = Synthetic coding sequence
atgaaccccgcatcggctccaccccctctgcccccaccaggacagcaggtcatccatgtgactcaggatttggataccgatttggaggccctattcaatagtgtgatgaatcctaaaccttcttcttggcggaagaagattctccccgaatcattctttaaggagccagattccggctcccacagcaggcaaagctctactgattcatctggcgggcacccagggcctcggctcgccggtggagctcagcacgtgcggtctcactcgtcccccgcatccctccagctcggaacaggagctggtgccgccggaagcccagcacagcagcatgcacatctgagacaacagtcctacgacgttaccgatgagctcccccttccacccgggtgggaaatgactttcactgccacaggacagcgatattttctaaaccacattgagaagatcaccacttggcaggaccctcgaaaggccatgaaccaaccactgaaccacatgaatttacatcctgccgtcagcagcacccccgtaccccagcgatccatggcagtgtcccagccaaatctggtgatgaaccaccagcaccaacaacaaatggctccctcgactctgtcccagcagaaccatccaacccagaacccccccgccggcttgatgtcaatgccaaatgcacttaccacgcagcagcagcaacagcagaagctccggctgcaacggatccagatggaacgggagcggatccgtatgcgccaggaagaacttatgagacaggaagccgccctttgcagacagctccccatggaggccgagacgctcgccccggtacaggcggccgttaatccccccactatgacgcccgacatgcgaagtatcactaataactcttccgatcctttcctcaacgggggaccataccactcccgcgagcaatcaaccgattccggactcggcctgggctgttattctgtgcccacgacaccagaggattttctttccaatgtggacgagatggacaccggagagaacgcaggccagactcccatgaacattaaccctcagcagacccgctttcctgactttcttgactgcttgcctgggacaaatgtagatttagggaccctggaatccgaggacctgatccctttattcaacgacgttgaatctgcccttaacaagagtgaaccctttttgacatggctctag

SEQ ID NO: 17262 - DNA, 513 bp, synthetic construct
  source 1..513: mol_type = other DNA; note = Synthetic coding sequence
atgccccggaaagggactcagccaagcaccgcccggcggcgcgaggaagggccccccccaccaagtcctgacggtgcatcatctgatgcggagcccgagcctccaagcgggcggacagagagtccagccactgcggcggagactgcttcagaagagctggacaacagaagtctggaggagattctgaatagcatccctccacctcccccaccagcaatgacaaacgaggccggcgcacccaggctcatgatcacacacatcgttaaccaaaacttcaagtcctacgcaggggagaagatcttgggacctttccacaagaggttttcctgtatcataggtcccaatgggtcgggcaaatcaaacgtcatagactccatgcttttcgtgttcggctaccgagcacaaaaaattcggtcaaagaaacttagcgtcttgatccataatagcgacgagcacaaagatatccagtcctgcaccgttgaagtgcacttccagaaaataattgacaagtag

SEQ ID NO: 17263 - DNA, 504 bp, synthetic construct
  source 1..504: mol_type = other DNA; note = Synthetic coding sequence
atggagaaagctgttaacgatggaagccactccgaggagctcttttgccatttgaagacaatctcggagaaagaggacctacccagatgtactagcgaatctcacctgagttgtttaaagcaggatatcctcaacgaaaagacagagctggaggccactctcaaggaggccgagctcgtcacccactcagtcgagcttctcttacctctgtttaaggatactatcgaaaaaatcaacttcgagaacgcgaacctatcagctctcaaccttaagataagcgaacagaaggagattctcattaaagagctggataccttcaaatcagtgaaacttgctctggagcaccttctgcgtaaacgggactacaaacaaacaggagacaatttgagttctatgctgctcgaaaatcttaccgacaacgagagtgaaaacacaaatttgaagaaaaaggtgtttgagaaagaggcgcatatccaggagctaagctgcttattccagtcctag

SEQ ID NO: 17264 - DNA, 2376 bp, synthetic construct
  source 1..2376: mol_type = other DNA; note = Synthetic coding sequence
atgtcaaaccagcaggagaagtacgaagcccaaaatattgtgaactccaccgaggagtcagatgacgccttcgataccgtcaccatcccagtacctagtgaggagccccaggaaagcgatcagactgaggagcacgagtcaggcattgagcagtttagcgagtcccacgccatccatgtggaggagcagagcgatcagagcttcagctcactcgagcccgacaacgagcagctgatggaagaagtgatttcccccagacaagtcagctatactccccagcaccacgaaaaacagtacgcaatgcagcgccctaatgatgactctctggccttcctggataaaatcaaatcggtgaaagaaagcttgcaagaatctgtggaggactctctggccaccgtcaaggttgtgctgataccggtgggacaggaaattgttattcccttcaaggttgacacaatactcaagtacctaaaagatcacttttcacatctgctgggaatccctcattcggtcctccagattaggtactccggcaaaatcctgaagaataacgagaccctggtacagcacggcgtgaagcctcaggagattgtgcaagtggagattttctctaccaacccagatttatacccggtcagacgaattgacggcctgactgatgtctcacagataattactgtgaccgtgcagactggcctcgaccaataccagcaggtgcccgtagagatcgtcaagtccgattttcacaagccctttctgggagggttccggcacaaagtgaccggtgtggaatatcacaatgctggtacacagaccgtcccaaaacggatacctgagcgtctgagtatcttctgcagagacactcagactgtctttcaaaagaaaaacctccagcagaccactaacacaaccagcactcagatgacaaacatcggagtgtacgtgtccaacatgacagacaagctggtgactccaggtaaatacttcagcgcagcagaataccacgctcagcgcctgaaggccgttatagtgatccagacctactatcgccaatggcatgccaagattttcgtggagaatcttcgcaggcagaagtctctgagactggagtgggaaacgcagcaggaactgcgcaagatccgagaaaaagaagaatggatcaagttagactaccatcgccgacacaaccccaaaactaacgaagacttcgagttcctgtacaacgccctggagttttggcggcaagaagaactcactcggatcaatcaatcctttaccggagccgaaagaaaggccgctttatgcgagttactggaaaaggagacgcaaattatcgcctcaattgggaggcataggtatatcgcctatatggcaaatcaggaggctgcgattcaagccttcttagataaatgcagcgcccctaagatctggaggacgcccaatggcaaaacgatcgagatggatactcaattcaccattcgcgcccgcgaacttcagaatatttataagtgtataatgttaaaaaatatctcacaggacgaaaggttggacgtattgcttacccttaagcataccgtaaaagagcacgagtgcaagcttacccaggagatcctggaactcatcgatagggaggtggatctcatgatgcggggagtgaaacaccataacctggaaggactacgcaagaggatcgccaccttgttcttccactacattaagactcccctctttaatccagaggtcgcaaaatatttaaaggtgccccaggatcctcttaagttctacaaaaagatttatttttgccacagctgccagctctacttgccatcgaccgaattttccgtgtccagcacctcacgtcgcatctatcgctgcaggaactgtatcaacctgcagaatgaagcccaaaagcgggagagtttcctgaaatataagtgtctgctgcagcagctgtactacactgaagccgactacgaggacgattcaaagatcgcttttttaatgcaacttcaggacatccagtatctcaccgaaaatatttgggcctcacagtcagtcctgtctgcctgcgataatctgagcgatctggtgatggtgcgatggaataagtctttagagtggtctccttggaattgcattctcctgacgaaggacgaagctgccgctcatcttaagttgacatcaatcgaggaaggttacgaacgatctttcattcacaaaatcaaacacaagcatatcctcgccaagaactattttagtcaggtcccagttctggcctctttcatcctggatgatggggagatcgatgaaatcagatggaagtaccattctgacacaacaccaaaaattatagaatcccaacgccctcctcactag

SEQ ID NO: 17265 - DNA, 687 bp, synthetic construct
  source 1..687: mol_type = other DNA; note = Synthetic coding sequence
atgactgaccagacttactgcgatagattggtgcaagatacaccatttcttacaggacatggcaggttatctgagcagcaggtggacaggattatcttacagttgaaccgttactacccccaaattctgacaaataaagaggctgaaaaattccggaatccaaaggccagcctgagggtgaggctctgcgatcttttgagccacctgcagaggtctggggagagggactgccaggagttctacagagccctgtatatacacgcgcagccacttcactcccgtcttccctcacgccacgccctgaggaaattccacattactaaccatgcatgcctggtgctcgctcggggggggcacccatcactgcccttgatggcctggatgagttccatgacaactcaggtgtgttgctcgcccgggcttgccagtccactggcctctgcccctcctcaacgaccgccatccggacccgagggtcgagtttggcaggcccaggccgtgcagatgctggtgagcgtatcacatttcctcccactgcccccgtcgctcagtcacggatctttccacactgcctggggaatcctgtacgtgcactcctgtccctccttttcgaatctgattcccaggggctcactgcatgtgtgcgtggacagcaacttggtgcccacagccgcctggagaagctag

SEQ ID NO: 17266 - DNA, 948 bp, synthetic construct
  source 1..948: mol_type = other DNA; note = Synthetic coding sequence
atgcccggactttcctgtcgtttctatcagcacaagttccccgaggtagaggatgtggtgatggtgaatgtgcggtctattgcagaaatgggggcttatgtctctctgcttgagtacaacaacatcgaagggatgatcctgctgtccgagctgtcccgtcggagaattagaagcatcaataagttaatcagaatcggcagaaatgagtgtgtggtggtaattcgagtagataaagagaaaggttatatagatctatccaaacgccgcgtaagcccggaggaagctattaaatgtgaggataagttcacaaagagcaaaaccgtgtatagcatcctcaggcatgttgcggaggtgctggagtacacgaaggacgaacagctcgaaagcttattccagaggactgcctgggtgttcgatgataaatataagagaccgggctatggcgcttatgacgccttcaaacacgcagtatcagatccatccatcttagattctctcgatctgaacgaggatgagcgtgaggtactgattaacaatataaaccgacggctaaccccacaggcggtgaagattcgagcagatattgaggtcgcctgttatgggtacgagggtatcgacgccgtgaaggaggcgctgcgcgccggtcttaattgctcaacagagaatatgccaattaaaatcaatcttatagcccctccaagatatgttatgacaacgacgacacttgagagaaccgagggattgtctgtgctatcgcaggctatggccgtcatcaaggaaaaaattgaagagaaacgtggtgtgttcaatgttcagatggagccaaaagtggtcacggacaccgacgaaacagaattggcacggcaaatggaaaggctggagagagaaaacgccgaggtcgatggagacgacgatgcagaagaaatggaagccaaggctgaggattag

SEQ ID NO: 17267 - DNA, 1203 bp, synthetic construct
  source 1..1203: mol_type = other DNA; note = Synthetic coding sequence
atgaaccccgcttcagcacccccgcctttgcctcctccgggtcagcaggttattcacgtgacccaggacctggatacagatctcgaagcccttttcaatagtgtgatgaaccctaagccgtcctcctggcgaaagaaaatcctccctgaatcatttttcaaggaacctgattccggcagtcactcccggcagagctccacagacagttcgggaggccatcctggaccgagactcgctggtggagcgcagcacgtcagatcacactcatccccagcctcactgcagctgggcacaggtgccggggcagccggctccccagcacagcagcatgcccacttaaggcagcagagttatgacgttacagacgagctgccactaccccctggctgggaaatgaccttcaccgccaccggacagcgatattttctcaaccacatcgagaagataaccacctggcaggacccccgtaaggctatgaatcagccacttaatcatatgaacctccacccggccgtgtcctcaactccagtccctcaaagaagcatggccgtatctcagccgaacctagtgatgaatcaccagcatcaacaacagatggcacccagtactctctctcaacagaatcatcctacacagaatcctcccgctggattaatgagtatgcccaacgcattgacgactcagcagcaacagcagcagaagctgcgcctacagaggatacagatggaaagggaacgcatacgaatgcggcaggaagagctgatgcgacaagaagcagccctgtgtcgtcaacttcctatggaggctgagacactggcaccggttcaggctgctgtgaaccccccgacaatgactccagatatgcgctccattactaataattcttcagatccattccttaatggcggaccttatcactcaagagagcaatccaccgactcaggccttggtttagggtgttactccgtgcctactactcctgaggactttttgagtaacgttgatgagatggacaccggtgaaaacgccggtcagaccccgatgaacatcaatccccaacagacgcggtttcccgactttcttgactgcctgcctggtacaaatgtcgatcttggaaccctggaatcggaagacctcattccattatttaacgacgtcgaatcagctctgaataaaagcgagcccttcctcacctggctctag

SEQ ID NO: 17268 - DNA, 381 bp, synthetic construct
  source 1..381: mol_type = other DNA; note = Synthetic coding sequence
atggtgctgattctgggcagaaggctgaaccgagaggacctgggagtgcgggactcgccagcaaccaagagaaaagttttcgagatggatcccaaatccctgacaggtcacgaatttttcgacttttcctccgggtcttctcacgccgagaacatacttcagatcttcaacgaatttcgggactcgcggctcttcactgacgtcataatctgtgtcgaaggcaaggagttcccctgccaccgggcggtactctccgcatgcagttcctatttcagagccatgttttgtaatgaccaccgcgaatcccgggagatgctcgtagagatcaacgggatcctggcagaggcaatggagtgcttcctgcagtacgtgtacacatag

SEQ ID NO: 17269 - DNA, 312 bp, synthetic construct
  source 1..312: mol_type = other DNA; note = Synthetic coding sequence
atggcagagttaattcagaagaagctgcaaggcgaagtggagaaatatcagcagctgcagaaggacctgagtaagtctatgagcggccgtcaaaagctggaagctcagcttactgagaacaacatagtaaaagaggagcttgcacttctcgacggctccaacgtcgtgttcaagctactaggacctgtgctggttaagcaagagctcggagaggcccgagcaacagttggaaagcggttggattacatcacagctgaaatcttcctgcgcactatcccagacccaggggacgttcccgacagcttcttctag

SEQ ID NO: 17270 - DNA, 237 bp, synthetic construct
  source 1..237: mol_type = other DNA; note = Synthetic coding sequence
atggtacttatcctggggagacggctgaacagggaggacctgggcgtgcgggactcccccgcaacaaagcggaaagtgtttgagatggatccgaagtcactcacaggacatgaatttttcgacttcagctcaggctcaagccacgcagaaaatattttacagattttcaacgaatttcgggactcgagattgtttactgacgtgatcatatgcgtagaaggaaaggagtttccgtag

SEQ ID NO: 17271 - DNA, 1320 bp, synthetic construct
  source 1..1320: mol_type = other DNA; note = Synthetic coding sequence
atggcggccaatttgtcgcgcaatggccccgccctccaagaggcctatgtaagagtagtgactgaaaagagccccacggactgggccctgtttacatacgaaggaaactcaaacgacattcgcgtagccggcaccggcgaaggtggcctggaagaaatggtggaggagttgaatagcgggaaagtcatgtacgccttctgtagggtgaaggaccctaatagtggcctcccaaagtttgtcttaataaattggaccggggagggagtaaacgacgtgcgaaagggtgcttgtgcatctcacgtaagcacaatggcctctttcttgaagggagcacatgtgaccatcaatgcccgtgccgaggaggacgtagagcccgagtgtatcatggagaaagtggccaaggccagcggcgctaactactcattccacaaagagagcggtagatttcaggacgtgggaccacaggcccccgtggggagcgtgtaccagaaaacaaatgccgtgtccgagatcaaaagagtcggtaaggacagtttctgggccaaagctgaaaaggaagaggagaatagacgtctggaagagaagcggcgcgctgaggaggcccagaggcaactcgaacaggagaggagagaaagagagctgcgcgaggcggcccgcagggaacagcgttatcaagagcagggcggggaagccagcccacaatcacgaacgtgggaacagcaacaggaagtggtttcacgcaatcgtaatgaacaaggatccacctgcgcctccctgcaagagtcagctgttcatccaagagagatcttcaagcagaaggaaagggccatgtccacaaccagtatttcatccccccaacccggcaaactgaggtccccctttctgcaaaagcaattgactcagcccgagactcattttggccgcgagccagccgcggctatcagtaggcctcgtgccgacctgccagcagaggaacctgctccttccacccccccctgcctggtgcaggctgaagaggaagcagtgtacgaagagccgcctgagcaggagaccttctacgagcagccacccctcgtccagcaacagggcgctggttccgagcacatcgaccatcacatacaggggcagggtttgtcggggcagggtttgtgcgctcgggccctttacgattaccaggcagcagacgacactgaaattagttttgatcctgaaaaccttatcacaggcattgaagttatcgacgagggatggtggcgtggttacgggccagacggccacttcggcatgtttccagccaattacgtggaactgattgaatag

SEQ ID NO: 17272 - DNA, 219 bp, synthetic construct
  source 1..219: mol_type = other DNA; note = Synthetic coding sequence
atgagctaccagcaacagcagtgtaaacagccttgccagcctccaccagtgtgcccagcccccaagtgtccagaaccctgtcccccgcccaaatgccccgagccatgccccccttctaagtgccctcagtcttgccctccccagcaatgtcagcagaagtgccccccggtcacccctagcccaccgtgccagcccaagtgcccgccaaaatccaagtag

SEQ ID NO: 17273 - DNA, 342 bp, synthetic construct
  source 1..342: mol_type = other DNA; note = Synthetic coding sequence
atgtctgcaatccaaaacctgcactcatttgaccctttcgctgatgcctctaagggggatgacctcttgcctgccggaaccgaggactacatacacatcaggatccagcagcgtaacggccgcaaaaccttaacgaccgttcaggggatagccgacgactacgataaaaagaagttggttaaggcgttcaaaaaaaaattcgcgtgtaatgggaccgttatagagcaccctgagtatggagaggtgattcaattgcagggtgaccaacgaaagaatatctgtcaattcctggttgagatcgggctggccaaggatgaccagctgaaggtacacggattctag

SEQ ID NO: 17274 - DNA, 927 bp, synthetic construct
  source 1..927: mol_type = other DNA; note = Synthetic coding sequence
atggccagttctaatacggtgcttatgcggcttgtggcctctgcatacagcattgctcaaaaggctggcatgatcgtccgccgcgtaattgccgagggcgacctgggtatcgttgagaagacatgtgccacagatctccaaaccaaagctgatcggctggcccaaatgtctatttgttccagcctggcccgaaaatttcccaagctgacaataattggggaagaagaccttccgagcgaagaggtggaccaggagctgatagaggattcacaatgggaggagattctcaagcaaccctgtccttcgcagtacagtgctatcaaagaggaggacctggtcgtctgggttgaccccttagacggcactaaggaatacacagagggcctgttagataacgtgacagttctgatcggcatcgcctatgaaggcaaagcgatcgctggagtgatcaaccagccctattacaattacgaggccggacctgacgcagtgttgggtcgaactatatggggcgtgctggggttaggggcctttggctttcagctgaaggaagtacctgcaggcaaacatattatcacaaccacaaggtctcatagcaacaaacttgtaaccgactgtgtggcagcaatgaacccagatgccgtccttagggtcggcggagcaggaaataaaataatccaactaattgaaggaaaggcctccgcctatgtgtttgcctctcctggctgcaaaaaatgggacacatgcgccccagaggtcatcctgcacgcagtggggggaaaactgaccgacattcatggcaatgttctccaataccataaggatgtcaaacacatgaacagtgcaggcgtcctcgccactctacgcaactatgactattatgcctctcgtgtgcctgagtcaattaaaaacgcattagttccttag

SEQ ID NO: 17275 - DNA, 1809 bp, synthetic construct
  source 1..1809: mol_type = other DNA; note = Synthetic coding sequence
atgattgagaaaatgcaagggagcaggatggacgaacagaggtgctcgtttccaccaccactaaagaccgaagaagactatatcccctatccaagtgtacatgaagtcctggggcgggaggggccattccccctaattctgctgccacagttcggcgggtactggatcgagggcaccaaccatgagattacctcaatccctgagaccgaacccctccaatccccaaccaccaaagtgaaactcgaatgtaaccctaccgctcggatctatagaaagcactttctgggaaaagagcactttaattactactcactggatgcagcactgggccatcttgtgttctcgcttaagtatgatgtcataggtgaccaggagcacttgagactgttactccgtaccaaatgcaggacctaccatgacgtaatccctatcagttgcctaacagagttcccaaacgttgtccagatggcaaaattggtgtgcgaagacgtgaatgtagacaggttctatcctgtcctataccctaaagcctcaagattaattgtcacatttgatgaacacgtaatctcgaataatttcaaatttggagtcatttaccagaagctcggccagacttctgaggaagagctgttctcaacaaatgaagagtcgccagccttcgtggagtttctcgagtttttaggacagaaggtcaagctgcaggatttcaaggggttcagaggtggactggacgtgactcacggccagacgggaacagagtccgtttactgcaattttagaaataaggagatcatgttccacgtgagcaccaagcttccttacactgaaggtgacgcccagcagttacaacggaaaagacacattggcaacgatatagtggccgtagtctttcaggacgagaatactcccttcgtgcctgacatgatcgcatcaaacttcctgcatgcttacgtcgtggttcaggccgaaggaggcggacctgacggacccctgtacaaggtatcagtcactgcccgtgacgacgtcccttttttcggccctccgctgcccgaccccgcagtatttcgcaagggaccggaatttcaggagtttctgctcacaaagctgattaacgcagagtacgcttgttataaggcagagaaattcgcaaaattagaagaaagaaccagggctgcacttctcgaaaccctctacgaagaactccacatccattcccagtcaatgatgggcttgggcggcgacgaagacaagatggagaatgggagcggcggtggagggttctttgaatccttcaagagggtgattaggtcccgcagtcagagcatggacgccatggggctgagcaataaaaagcccaatacggtgagtacctctcattccggcagctttgcacctaataaccccgatctagccaaagccgccggaatttcgctgatagtgcccggcaaaagtcctactagaaagaagtccgggccttttgggagccgcagatcctcagcgatcggtatcgaaaatatccaggaagtccaggagaaacgcgaaagcccgccagcggggcagaagactcctgattctggccatgtcagtcaggagcccaaatccgaaaactcttcgacacagagctcgcctgagatgcctacaaccaaaaaccgagcagaaacagcagctcagcgagcagaggctctgaaggatttctctagaagcagtagctctgcttcctcatttgcttctgttgtggaggaaactgaaggagtggacggggaagatacgggcctgcatgtagctggcggacagtgccaacatcactag

SEQ ID NO: 17276 - DNA, 177 bp, synthetic construct
  source 1..177: mol_type = other DNA; note = Synthetic coding sequence
atgggtagggtgtgggacctccccggtgtgctgaaggtggaaggcttccgcgctaccatggctcagaggttagttagagtcctccagatttgcgccggccatgtccctggggtatctgccctgaacctgcttagtcttctgcgaagcagcgaggggccatctctcgaggacctttag

SEQ ID NO: 17277 - DNA, 2199 bp, synthetic construct
  source 1..2199: mol_type = other DNA; note = Synthetic coding sequence
atgctgccatgtgccgcaggggctagaggccggggggctatggtggtgttacgggcaggaaagaaaacgttcctgccacccctttgtagggcatttgcttgtaggggatgccagctggctccagagcgcggagctgagagacgagataccgctccttctggcgtctcaaggttctgtcctcctaggaaatcctgccacgactggataggtccacctgataagtactctaatctgcggccagtccatttttatatccccgaaaatgaaagtccactggagcaaaagctgcggaagttgcgccaggagacccaggaatggaatcagcagttttgggctaaccaaaacctaactttctccaaagaaaaagaggaattcatccattctagattaaaaacaaagggcttaggcctccggacagagtctggtcagaaggccacactgaacgcagaggagatggccgatttctacaaggagtttttaagcaaaaatttccagaaacatatgtactacaaccggatgtacgataacatgagcacaatggtctacatcaaggaagacaagcttgagaagctgacccaggacgagatcattagtaagactaagcaggttattcaaggactagaggcactgaaaaatgaacataacagtatcctccaatcgttgcttgagacactcaagtgtctaaaaaaggatgacgagtctaatctggtggaggagaaatcaaacatgatcaggaagtctctggaaatgctggaactgggcttgtccgaggcacaggttatgatggccctgagtaaccatctgaacgctgtcgagtcggaaaaacagaaattacgcgcacaggtgagacggctctgtcaagaaaatcagtggctgcgcgacgagctggccaatacgcagcagaaactgcagaaaagcgagcagtctgtggcccagttggaggaagagaagaagcacctggaattcatgaaccagcttaaaaagtacgacgatgacattagcccatctgaagataaagataccgatagcaccaaggaacccctagacgacttgtttcctaatgacgaggacgacccgggacaaggcatccaacagcagcactcgtcagctgccgcagctgcccagcagggcggatatgaaattcctgcacgcctgcggactcttcacaacctcgtcattcagtacgctagccaaggtcgatatgaagtcgccgtgcctctgtgcaaacaagcacttgaagacctggaaaaaacatccggccacgatcaccctgatgtagcaactatgttaaacattctcgccttagtgtacagagaccagaacaaatataaagacgcagctaatctcttgaacgatgccctcgccatccgggagaaaacactgggaaaggatcaccccgctgttgccgcgaccctgaataatctcgctgtgctctacggcaagcgtggaaaatacaaagaagcagagcccctgtgcaagcgggcacttgagataagagagaaagtgttggggaaggaccacccggacgtggctaagcagctcaataatttggccctactctgccagaaccaggggaaatatgaagaagtggagtactattatcagcgggcgctagagatctaccagaccaaactcggtcccgatgaccctaatgtcgcaaagacaaagaataacctggccagctgctacttaaaacagggaaagtttaaacaagccgagaccctgtataaagagattctgacaagagctcatgagagggagtttggcagcgtagacgacgagaacaagcccatttggatgcacgctgaggaaagggaggaatgtaaaggcaagcagaaagacggtactagttttggagaatacgggggctggtacaaagcctgtaaagtggattcccccacggtcaccacaacgctgaaaaacttgggggcgttgtatcgacggcaaggcaagtttgaggctgcagagaccttagaggaggccgccatgagatcccggaagcagggacttgacaacgtccataagcaacgggtggccgaggtccttaatgatccagagaatatggaaaaacgccgtagcagagagagcttgaatgtggacgtagtcaaatacgagtccggccccgacgggggtgaagaggtttccatgtctgtggaatggaatggcatgaggaagatgaaattaggacttgtgaattag

SEQ ID NO: 17278 - DNA, 249 bp, synthetic construct
  source 1..249: mol_type = other DNA; note = Synthetic coding sequence
atgagcggcctggttctgggtcaacgagatgagcctgccggacatcggctgtcacaggaggaaatcctgggcagcactcggctggtcagtcaggggctcgaagctctgcggagtgaacaccaggcagtgttacaaagcctgtcacagacaattgaatgtttgcaacaaggtggccatgaagagggcctcgtacatgagaaggccaggcagcttcggaggtctatggagaatattgagctgggactatag

SEQ ID NO: 17279 - DNA, 222 bp, synthetic construct
  source 1..222: mol_type = other DNA; note = Synthetic coding sequence
atggttctcattctaggaagaagattaaaccgagaagacttgggggtacgtgatagcccagccaccaagagaaaagtattcgagatggatcccaagtctctcacggggcatgagtttttcgatttctctagcggcagcagccacgccgaaaacattctccagatcttcaacgagtttcgtgacagtaggctgtttaccgatgtgattatttgtgtggaatag

SEQ ID NO: 17280 - DNA, 1191 bp, synthetic construct
  source 1..1191: mol_type = other DNA; note = Synthetic coding sequence
atgaatttccaagcgggggggggtcaatctcctcagcagcagcaaagtctggctgcccccggcgggggaggagccgcagcacaacagctggtgtgtggcggccagtttggcggggctggaccaggagccgggggggggggaggccccagccagcaactggctggtgggcctccgcagcagttcgccctgagcaattctgccgctattcgcgccgaaattcagcggttcgaatctgtacaccctaacatttatgctatttacgatctaatcgaaaggatagaagacctcgctcttcaaaaccagatccgcgagcatgttatcagcatcgaggacagcttcgtgaacagtcaggagtggactctcagccgctccgtgccagaactcaaagtcggcattgtaggaaatctgtccagcggaaagtcggccttagtccaccggtacctaactggaacctatgtccaggaggagtccccagagggcgggcgtttcaaaaaagaaatcgtcgttgacggccaaagctatctgctgctgattcgggacgaaggaggccctccggagttacagtttgcagcctgggtcgatgcagtggtcttcgtcttttcccttgaggatgaaatatcatttcagaccgtgtacaactacttcttgcggctatgcagctttcggaatgctagcgaagttcccatggttctggtggggacacaggatgcaatcagtgcagctaatccccgagttatcgacgactctagagcacgaaagctcagtaccgatctcaagcgatgcacttattatgaaacgtgcgccacctatgggttgaatgtcgagagagtttttcaggatgtggcccagaaggtcgtggcactgagaaaaaaacagcagctggccattgggccatgcaagagcctgccaaactcccccagtcacagcgctgtcagcgccgccagtattcccgccgtccacatcaaccaagccacaaacggcggaggctccgcctttagcgactatagttcctccgtcccatctacccccagtatatcacaacgggagctgcggattgaaaccattgccgcgtcctccaccccaacacccatacggaagcagtcaaagagaaggtctaatatattcactatctgtgccaccgtcagcaactttagcagtacaaagcgaccattccagctccttcctaactag

SEQ ID NO: 17281 - DNA, 1110 bp, synthetic construct
  source 1..1110: mol_type = other DNA; note = Synthetic coding sequence
atggattcatgtctcatggtttggcacatgaagccccagtcaagggcctaccgttttactggacacaaggatgcggtcacttgcgttaactttagcccctccgggcacctcctggcttccggatccagggataagaccgtccgcatctgggtccctaacgttaagggagaatccactgtgtttcgcgcacataccgctaccgtccggagtgttcatttttgctcggacggccagtccttcgtgaccgcttccgatgacaagactgtgaaagtatgggccactcataggcagaaattcctgttttcactgtctcaacatatcaactgggtaaggtgtgccaagttctcccccgacggccggctcatcgtgtctgcttctgatgataagacagtaaagctgtgggacaagtcttctagagagtgtgtgcactcctattgcgagcacggaggcttcgtcacctatgtggacttccaccctagtgggacatgcattgcagccgccggaatggataacacggtgaaggtctgggacgtaagaacacatcggttgctccagcattaccagctccatagtgccgcagttaatggcctcagcttccacccttctggcaactacttgattaccgccagctccgactccacgctgaagattctggacctcatggaaggcagactcctatacacactccacggacatcagggaccagccacaactgtcgcattctccaggaccggcgagtacttcgcctctggaggatcagacgagcaggtgatggtctggaagtccaacttcgatatcgtggaccacggtgaagtgacaaaagttccaaggccacccgccactctggccagcagcatgggaaacctgccagaggtggacttcccggttccgcctggccgaggtcgctctgtggagagcgtgcaatcccagcctcaggagcctgttagcgtgccccagactttgacctccacactggagcatatcgttggacagctggatgttttgacccaaactgttagtatcctggagcagcggctgaccttaacagaggacaaactaaaacagtgtcttgagaatcagcaactaattatgcaacgggccaccccatag

SEQ ID NO: 17282 - DNA, 312 bp, synthetic construct
  source 1..312: mol_type = other DNA; note = Synthetic coding sequence
atggctgagttaatccagaagaaactgcaaggcgaggtagagaagtaccaacagttgcagaaagacttgtcgaagtcaatgagtgggcggcaaaaactcgaggcccagcttacagaaaataacatcgtcaaggaagagttggcattgctggatggatcaaatgtagtctttaaactgctcggaccagttctagttaagcaggagctgggagaggcccgggcaaccgtgggaaaaaggctcgattacattaccgctgaaatcttcctgcgaactatcccagacccgggcgacgtcccagactcttttttctag

SEQ ID NO: 17283 - DNA, 270 bp, synthetic construct
  source 1..270: mol_type = other DNA; note = Synthetic coding sequence
atgagtgagcagggggacctgaatcaggcaatcgccgaagaggggggcaccgagcaggagaccgctacacctgaaaacggaatagtaaagtctgaaagcctcgacgaggaagagaagctcgagttgcagaggaggctcgaggctcagaatcaggagcgccgtaagtctaagagtggggccggcaagggcaagctaacaagatccctggccgtgtgcgaggaaagctctgcacggcctggcggtgaatccctgcaggaccaaactctatag

SEQ ID NO: 17284 - DNA, 1140 bp, synthetic construct
  source 1..1140: mol_type = other DNA; note = Synthetic coding sequence
atgtggcacttggattttgggctgcatacaggcaaaactttccagcctctcccctttatcatagtggtgtatccaggcgccggcagacgttggggccttgtactgtcactggcttcacaccggcggaggacggaggcgggtggtggaaccgggcccacaagtgacactggatggggatgtatgctgcgctgtggacaaatgatttttgcccaggctctagtgtgccgtcatctgggaagagattggcgctggacccagcgaaagaggcagcccgacagctacttttcagttctcaatgccttcatagaccggaaagattcctactacagtatccatcagatcgcacagatgggtgttggcgagggaaagagtatagggcagtggtatggacctaacacagtcgcccaagtgctgaaaaaattggcggtgtttgacacatggtcctcattggctgttcacatcgctatggacaatactgtggtgatggaagagattaggcgtctatgccggacgagcgtgccatgtgctggggccacagccttccccgccgattccgatcgacattgtaatggattccctgccggcgccgaagtaactaaccgaccctcaccttggaggcccctagttcttttgattccactgcgtttggggctaaccgacataaatgaagcctacgtagagacactaaagcattgctttatgatgccccaatctttgggagtcatcggcggaaagccgaacagcgctcactatttcatcggctatgtgggggaagagcttatatatctagacccccacacgacccagcccgcagtggaaccgactgacggatgtttcattcccgatgaatctttccactgtcagcaccctccttgccggatgtccatcgccgagctggacccgtctattgctgtcggatttttctgcaaaaccgaggatgacttcaacgattggtgccagcaggtcaagaagctgagcctactaggtggcgccttacctatgttcgagttagtggagctgcagcccagccaccttgcttgcccagacgtcttaaatctctcccttgactcaagcgacgtggaaaggctagagcgctttttcgactcagaagacgaggacttcgaaatcttgtcactgtag

SEQ ID NO: 17285 - DNA, 1683 bp, synthetic construct
  source 1..1683: mol_type = other DNA; note = Synthetic coding sequence
atgagcgagcacagccggaactccgaccaagaagagctcttggacgaagagattaatgaggatgaaatacttgctaatctgtcagctgaagaactcaaagaacttcagtctgaaatggaggtgatggcccccgatccctctctccccgttggcatgattcagaaggatcagacggataaaccgcccacaggaaacttcaatcacaaaagcctggtggattacatgtattgggaaaaggccagccgcagaatgttggaagaagaaagggttccagtaaccttcgtaaaatcagaggagaagacccaggaagagcatgaggagatagagaagaggaacaagaatatggcccaatacctgaaggagaaactgaataatgaaatcgtcgctaacaagcgggagagcaaagggtcaagcaacatccaggagaccgatgaagaagatgaggaagaggaggatgatgacgatgacgacgagggcgaggacgacggagaggaatcagaggagactaatcgcgaggaggagggcaaggcaaaggagcagattaggaactgcgaaaacaactgccagcaagtgacagacaaggcctttaaggagcagcgagacagacctgaggctcaagagcaatctgagaaaaagattagtaaactggaccctaagaagctggcgctggatacatccttcttaaaagttagcactaggccgagtgggaaccagaccgaccttgatggtagcctgaggagagtgcgaaaaaacgatcccgacatgaaagagctgaacttgaacaatatcgaaaacattccgaaggagatgttgcttgatttcgttaatgccatgaaaaaaaacaaacacatcaagaccttctccctcgcgaatgtgggggccgacgaaaatgtggcttttgcactggccaacatgctcagagagaataggtctatcactactcttaacattgagtctaatttcattaccgggaaggggatcgtggctatcatgcggtgtctgcagtttaacgaaaccttaaccgaactccgattccacaaccaacggcatatgttgggtcaccacgccgaaatggaaattgcacgcttgttgaaagccaacaatacactgctaaagatgggctaccacttcgaactacctggaccgcggatggttgtgacaaatttactcactaggaaccaggacaaacagaggcagaagcggcaagaggagcagaaacagcaacagctcaaagagcagaaaaagctcatagcaatgctggagaatggcctgggtttgcctccaggtatgtgggaactcctgggcggaccaaagcctgatagtcggatgcaagaattttttcagccccctccccctaggcctccgaacccacagaacgtaccttttagccaacgttctgaaatgatgaagaagccttcccaggctcctaaatatcgcaccgaccccgatagctttagagtagtcaaattaaagaggatacagcgaaaatctaggatgcctgaagcgcgtgaacccccagaaaagaccaatctgaaagacgtaatcaaaaccttgaagccggtgccacgaaaccggcccccccctctggtcgaaataactcctagagaccagctcctaaacgatatcaggcattcgagcgtggcctatctgaaacccgtgcagctcccaaaagagctcgcgtag

SEQ ID NO: 17286 - DNA, 330 bp, synthetic construct
  source 1..330: mol_type = other DNA; note = Synthetic coding sequence
atgaatcccgctagtgctcctcctccattgccacctcccgggcagcaggtcattcacgtgacccaggacctggatacggacttagaggcattattcaactccgtcatgaaccctaaaccgtcttcctggcgtaaaaagattctccctgagagctttttcaaagagcctgactcaggttcccactcaaggcagtcttctactgacagcagcggaggccaccccggcccacgtctcgctggaggggctcagcacgtgaggtcacatagttcccctgcatccctgcaactgggaacgggtgccggggccgccggtagcccagcccaacaatag

SEQ ID NO: 17287 - DNA, 609 bp, synthetic construct
  source 1..609: mol_type = other DNA; note = Synthetic coding sequence
atggggagccgcaaaaaggagatcgccttgcaggtgaacatctctacacaggagctgtgggaagaaatgctatcaagtaaaggcctcacagtagttgacgtatatcagggctggtgcggcccatgtaaacctgttgtcagcctctttcagaaaatgcgcatagaagtgggcctggacctactacattttgcacttgccgaagcagatcggctggacgtcctggaaaagtatcgggggaagtgcgagcccaccttcctgttttacgcaggcggggagctcgttgctgtggttaggggcgctaacgccccacttctccaaaaaaccattctcgatcagcttgaggccgagaaaaaagttttagctgaaggccgggaacggaaggttataaaggacgaagctctttcggacgaggatgaatgcgtcagccacggcaagaataatggagaggatgaagatatggtgagctcggaacgtacttgtactctggccatcatcaagccagatgcagttgcgcatggcaaaactgatgaaatcatcatgaagattcaagaagctggcttcgagatcctgaccaacgaagaacggacaatgaccgaagctgaggtttag

SEQ ID NO: 17288 - DNA, 195 bp, synthetic construct
  source 1..195: mol_type = other DNA; note = Synthetic coding sequence
atggccccgcaaaaagatagaaagccaaagaggtcaacatggcggtttaacctcgacttgactcatcccgtggaggacggtattttcgactccggcaactttggaacattcccttccgaatacttaggattctctagtctggtgctgcatttcttctgctttaagattggcgcaatctcaacgggggaaggctag

SEQ ID NO: 17289 - DNA, 372 bp, synthetic construct
  source 1..372: mol_type = other DNA; note = Synthetic coding sequence
atggagaacctgcagacaaacttcagcctggtgcagggctccactaagaaactcaatggcatgggagatgacgggagccctcctgcgaagaaaatgattactgacatccacgccaatggtaagacaatcaacaaagtgcccacagttaagaaggagcacctggatgactacggtgaagctcctgtcgagacagatggcgaacatgtgaaaaggacctgcacctcagtgcccgagactcttcatctcaatccaagcttgaagcataccttggctcagtttcatttgtccagtcagagcagtctgggcggccctgctgctttcagcgctcgccacagtcaggaaagtatgtcaccaacagtgtttttaccctag

SEQ ID NO: 17290 - DNA, 201 bp, synthetic construct
  source 1..201: mol_type = other DNA; note = Synthetic coding sequence
atgaaccctagtatgaagcagaaacaggaggaaataaaagagaacatcaaaaattcctccgtgcctcgccgcactttaaagatgattcagccatcggcgtcaggatccctcgtgggtcgggaaaacgagttgtcagctgggctttctaagaggaagcatcgtaatgatcacctcacctccacgaccagttccccagggtag

SEQ ID NO: 17291 - DNA, 1614 bp, synthetic construct
  source 1..1614: mol_type = other DNA; note = Synthetic coding sequence
atggtgttgattcttggacgcagattaaatagggaggacttgggggtgagggattcacccgccactaagcgcaaagtcttcgagatggatccgaaaagtctgacaggccatgaatttttcgactttagttcaggatcttcacatgcagaaaatatcctgcagatattcaacgagtttcgcgattctcgcctcttcaccgacgtcattatttgcgtcgaggggaaggaattcccctgtcaccgagcagtattatcagcttgcagcagctacttccgggcaatgttctgcaacgaccaccgcgagtcccgggaaatgttggtcgaaatcaatgggatactggcagaagcaatggagtgctttttgcagtatgtgtatacgggcaaggtgaagatcaccactgaaaacgtgcagtacttgtttgagactagtagcttgttccagattagtgtattgcgtgatgcttgtgctaagttccttgaagagcaattggacccctgtaactgtctggggattcagcgctttgcagatacacatagcctaaaaacgctgttcacgaaatgtaagaactttgccctgcagacttttgaagacgtgagccagcacgaggaattcctcgaactcgataaagatgagttgatagactacatttgctccgacgagcttgtgatcggtaaagaggaaatggtctttgaggcagttatgaggtgggtctaccgggctgtcgacctccgccgtcccctgctacacgaactcctgacacatgtaagactgcctctgcttcatcctaactattttgtgcagaccgtcgaggtcgaccagctgatccagaatagcccagaatgctatcagctcctacatgaagccagaagataccatatcctgggaaatgagatgatgagtccccggaccaggcctagacggagtactggctacagtgaagtgatcgtggtcgtcggcggctgtgagcgggtgggtggattcaatttgccatacactgagtgttatgatccagtaactggggagtggaaaagccttgcaaagctgcccgagtttacaaaaagcgagtacgctgtctgcgcactgagaaacgatattctcgtctcaggaggccggattaactccagggacgtgtggatctataattcccagctaaacatctggatacgtgtcgcgagcttgaataagggccggtggcggcacaaaatggctgtgttgctcggtaaggtctacgtggtcgggggctacgacggacagaaccgactcagcagcgtggagtgttacgattctttcagcaacaggtggacagaagtggcacctctgaaggaggccgtctcatcccctgccgtgacctcctgcgtgggaaaactttttgtaattggagggggaccggacgacaatacctgttccgacaaagtgcaatcttatgaccctgaaaccaattcctggctcctccgggccgctattcccatcgcaaagcggtgcatcaccgctgtcagtttgaataatctaatctacgtggccggaggacttactaaagccatctactgctatgaccccgtcgaagactactggatgcacgtgcagaatactttctctcgacaggtgataacttag

SEQ ID NO: 17292 - DNA, 1611 bp, synthetic construct
  source 1..1611: mol_type = other DNA; note = Synthetic coding sequence
atgaggctggaagaactgaagcggctgcagaatcccttggagcaagtcaacgacgggaagtactcgtttgaaaacatccagcgcgcatggagggaatatctccaaaggcaggaacctctggggaagaggtccccaagccccccaagtgtctcttctgaaaaattgagctctagcgtctcaatgaatactttcagtgattcttccacccccgactatagggaagacggcatggatcttggatcagatgccggctccagcagctctagcagtcgggccagctcacagtccaactcaaccaaggtgaccccttgcagcgagtgcaagagctcctcatcgcccggtggttccctggatctcgtgagcgcactggaagactatgaggagccttttcccgtgtaccagaagaaggtcatagatgagtgggcccccgaagaagatggcgaggaggaggaagaggaagacgagagggatcagcgaggataccgtgacgaccggtccccggctagagagcccggtgacgtctcggcccgcacgaggtccggcgggggggggggaagaagcgctacaaccgcaatgcccccaccagttccgaacggcaacctgcaccagcatgatccccaggacctgcggcataacggcaacgtggtagtggccggccgccccagttgtagccgcggacctaggagggctatacagaagccacagcccgcaggcggtcgacggagcggccggggtccggccgctggaggactttgtctccagccccctgacggtgggacctgtgtgcctgaggagcctcccgtgccacccatggattgggaagccctcgagaagcacctggcaggactccagttccgggagcaagaggtgaggaaccagggacaggcaagaactaattccacctcagcacagaaaaatgaacgcgaaagcataaggcagaaactggcccttggctcattcttcgatgatggacctgggatttatacttcatgcagcaagtccggaaagccttcgttgtcttctaggctgcagagcgggatgaatctgcagatttgttttgtcaacgattcaggttccgacaaagactcagacgcagacgactccaagaccgaaacgtccctggacacaccactgagtcctatgagtaagcagtcttcttcctattccgaccgggacacaactgaggaggagtccgagtctctggatgacatggacttcctcaccagacagaaaaagctgcaggcagaagctaagatggctttggccatggcaaagccaatggccaaaatgcaggttgaggtggagaagcagaatcggaagaagagccccgtggccgaccttttgccgcacatgccccacataagcgagtgccttatgaagcggtcccttaaacccaccgacctgagagatatgactattggacagctacaggtcattgtgaatgatcttcatagccaaatcgaatctttaaatgaagagcttgtacagctgctgctgatcagagatgagctccacactgagcaagatgctatgcttgtagatattgaggacctgacaagacacgcagaatcgcaacaaaagcatatggccgagaagatgcccgcaaaatag

SEQ ID NO: 17293 - DNA, 630 bp, synthetic construct
  source 1..630: mol_type = other DNA; note = Synthetic coding sequence
atgagtgagaacgcggctcccgggctgatctccgagctgaaactagctgttccatggggtcatatcgccgcaaaggcttgggggtcactgcagggccccccagtcttatgtctccatggttggctcgacaacgctagctcctttgacaggctgatcccattactgccacaggatttctactacgtcgccatggactttggcggacacggcttatctagccattacagccccggtgttccatactatctgcagacttttgtgagcgagataagacgtgtagtggccgccttaaagtggaatcggtttagcatcctcgggcatagctttgggggggtggttggcggtatgtttttctgcacatttcctgagatggtggacaaactcatacttctggacacacccctgttcctgcttgagtcagatgagatggagaacctccttacatacaaacgaagagctattgagcacgtcctgcaggtggaagccagtcaggaacccagccacgtcttttctttaaagcagctgctccagaggctcctgaagagtaacagtcacctttcagaggaatgcggcgaactcctgctgcaacgtgggaccacaaaggtcgctaccggacgtgagcagcactag

SEQ ID NO: 17294 - DNA, 201 bp, synthetic construct
  source 1..201: mol_type = other DNA; note = Synthetic coding sequence
atgccagaagatcaggtgggaaagctggaggccaccgaaaatacgatcagcgccatggcggcagcggctgctgagcaacagcagttttacctgctcctcgggaacctgctgtccccagataacgtggtgcgtaagcaggccgaggaaacttacgagaatattcctggccagtcaaaaatcaccttcctgctgcaagcatag

SEQ ID NO: 17295 - DNA, 2061 bp, synthetic construct
  source 1..2061: mol_type = other DNA; note = Synthetic coding sequence
atggctatttctcagcaccagttctatcttgaccgcaaacagagtaaggcgaagatccctagtgcaagatccctcgatgaaatagccatggacctgactgagactggcacccagagagcgagtaagttggtgaccttagagactaaatcgcagttcataatggctagtaacggcagccttatctcttcgggatctcaagattcagaagttagtgaagagcaaaagagggaaaagattctcgaacttaagaagaaagagaagctgctccaggagaagctccttaaaaaagtggaggagctcaaaaaaatttgtctgcgggaggccgagctcactgggaagatgccaaaggagtaccctctaaacatcggcgagaaacccccgcaggtgcgtcgaagagtgggaactgcctttaaactcgatgataacttgctgccatcagaggaggatcctgcactgcaggagctggagagcaatttcctgattcaacaaaagctagtggaggcagcgaagaagttagctaatgagcccgacctgtgcaagaccgtcaagaaaaaacgcaagcaggattatacagatgcaatgaaaaaactccaggaaatcgagaatgccatcaacgagtatcgaatcaggtgtggcaagaaaccttcccagaaagctactgtactgccagaagacatcatcccatcagaatcctcatcacttagcgacacaaccacatatgatgacccaagcgatgctttcactttccccggtcagagatcgtcctccgtgccacacagccctagaattctgccacctaaatcattagggattgagaggattcattttaggaaatccagcattaacgaacagttcgtggacacccggcagagtagagagatgcttagcacacacagcagcccctacaaaacactggagcggcgtccacaagggggccgttctatgcccactacccctgtactcacacggaatgcatactcatcctcacatttggaacctgaatcatctagccagcattgccgacaaagatccgggtccctggagtcccagtcccatttattgtctgagatggatagcgataaacctttcttttccctctccaagagccaacgctcgtcttccactgagatattggacgacggtagttcttacacttctcagtcatccacagaatattattgtgtgacaccagttaccgggccatattacacaacccagacactggacacaaggactagagggagacggcggagcaagaagcagaatgtgtctacttccaactctggaagcatgcccaacttggcccagaaagacagtctcaggaacggtgtctactccaagagccaagaaccaccctcaagcagttattatatcgccggctatactccttacgcagagtgcgacttttattattctggcggctatgtctatgaaaatgacacagaggggcagtattcggtaaatccctcgtaccggagtagtgcgcactacggatatgaacgccagagggattactcgcggagctttcatgaagacgaagtcgatagagtccctcacaatccctacgcaaccctgcgtctaccccgcaaggctgccgctaaatctgagcatattaccaagaatattcataaagccctagtcgccgagcacctgagaggatggtaccagcgagcatccggccaaaaggatcaaggccacagcccccagacctcattcgatagtgatcgtggcagtcaaagatgcttgggctttgcagggcttcaagtgccatgctccccttccagcagagctagcagttacagcagcgtatcaagcaccaatgcctctgggaactggcggacccaactcactatcggcttgtctgattatgaaacacctgcacacagctcctacacttcctgctacggcaatgtgtataacccgttaccctcccccagccggcaatacaccgaaattagccaactcgatggtaccgatggcaaccagctggaggacaacctggaaagctcagagcaaagactattctggcacgaggatagcaaacctggaactctcgtgtag

SEQ ID NO: 17296 - DNA, 219 bp, synthetic construct
  source 1..219: mol_type = other DNA; note = Synthetic coding sequence
atgatggaggaaatctctattatggtggcatacgatgcacacgtcttttcccagctgcacgatgaagatttcctgacaagtctggttgcaattagcaagcccaggagcatggtgcctacaaagaagcttaagaaatacgagaaggagtaccagactatgcgagaatctcaactgcagcaagaggatccaatggaccggtacaaattcgtatacctatag

SEQ ID NO: 17297 - DNA, 1965 bp, synthetic construct
  source 1..1965: mol_type = other DNA; note = Synthetic coding sequence
atggactcactgcccgatgaattctttgtacggcatcccgccgtcgaagaccagaggaaggaggagaccgagaacaagctggagaaaagcagcggccagttgaacaagcaagaaaatgacatcccgaccgatctggtgccagtgaacctcctccttgaggtgaagaagttactgaatgcaataaataccctaccaaagggcgtggtaccacacatcaagaagttcctgcaggaggatttcagcttccagactatgcaacgggaggtcgccgccaacagccagaacggtgaagagatcgtgccagccctgactctacgattccttatcacacagcttgaggcagctctccgtaatatccaggcgggcaactacacagcccaccaaattaacattgggtactatcttacattgctctttctatatggagtagcacttactgagcgtggcaagaaggaggactatacagaggccgagaataagtttctggttatgaaaatgatgattcaggagaacgagatttgcgagaactttatgtctttggtgtatttcggccgcggtctgctcagatgcgcacagaaacgctataacgggggattgctggagttccacaaatctttgcaggaaatcggagacaagaatgatcactggtttgacattgatcccactgaagatgaagatctccccaccacgttcaaggatctactgaataattttataaagaccaccgagtccaacatcatgaagcagacaatttgctcctacctggattgtgagcgttcttgtgaagcggatattctcaagaacacctcctataagggattcttccagctgatgtgctcaaagtcctgctgcgtttactttcacaaaatttgttggaagaaatttaagaacctcaaatatccgggagaaaacgaccagtcttttagcggcaaaaagtgcttaaaagaggggtgtaccggggacatggtgcgcatgcttcaatgcgacgtgcccggaattgtaaagattctcttcgaagtggtccggaaggacgagtatatcacaatcgagaacctgggcgcttcttacaggaagctcatttcgctcaaaatcaccgataccgacatccgacctaagatctctttgaagtttaatacaaaagatgagatgccaatcttcaaattggattataattatttttaccatctgctccacattatcattattagcggaactgacatcgtgcgccagattttcgatgaggcaatgcctccgcccttactgaaaaaggagctgttgatccacaaaaacgtcttggagtcctattataaccacttgtggacaaatcaccctctgggagggtcctggcatctcctgtatccgccaaataaggagctgccacagtccaaacagttcgacctgtgcctgttgctagccttgattaagcacctgaacgttttcccagcccctaagaaaggttggaacatggagccaccctcttccgacataagcaagtccgccgacatcctacgtctgtgcaagtaccgagatatccttctgagtgaaattcttatgaacgggctcactgagtcccagtttaactcaatttggaaaaaagtgtcagacatcctgctgaggttgggaatgatgcaggaggacattgataaagtgaaagaaaaccctattgagaatatatctctagattatcaccagctgtcagtatatctggggattccagtgccagagattatccagcggatgctgtcctgttaccagcaggggatcgcgctgcagtccattactgggtcacagcggatcgaaatcgaagaactccagaacgaagaggaggagttgtcaccccctctcatggagtataacattaatgtgaaatcccatccagaaatacagtttgccgagattaacaaagatggcacatctataccatctgaatcatcaactgagagcttgaaggaccttcaggagtag

SEQ ID NO: 17298 - DNA, 570 bp, synthetic construct
  source 1..570: mol_type = other DNA; note = Synthetic coding sequence
atgaatcccgccagcgcaccaccacccctccctccacctggccaacaggtgatacacgtgacccaggacttggacacagatctggaggcactgttcaatagtgtgatgaaccccaagccaagctcgtggcgcaaaaagatcctgccagaaagtttttttaaggaacccgattctggatctcactcaaggcagtccagcacagactcttcggggggacatcctggaccacgcctggcaggcggggcccagcatgtgcgcagtcatagttcccccgcaagcctgcagctcggtacaggtgccggcgccgctggctcccccgcacagcagcacgctcacctgcgtcagcagagctacgatgtcaccgacgaactgcccttgccaccagggtgggagatgacctttacagcgactggacagcggtacttcctcaaccatattgagaaaataacaacatggcaggatcctcggaaggccatgaaccagcctttgaaccacatgaacctccaccccgcggtgtcatcgacaccagtcccacaaaggtccatggccgtttctcagcctaacttatag

SEQ ID NO: 17299 - DNA, 849 bp, synthetic construct
  source 1..849: mol_type = other DNA; note = Synthetic coding sequence
atgggacctctcccccggaccgtggagctgttctacgacgtgctgagtccctacagctggctcggcttcgaaattctctgccgctaccagaatatatggaacatcaaccttcagctaaggcccagtctcattaccggcatcatgaaggacagcggaaataaaccccctggactactccctagaaagggtttgtatatggcaaacgacctaaaattgcttagacaccatttacagatacccattcacttccctaaggatttcctgtcggtgatgctagagaaggggtccttgtcagctatgaggttcctgaccgccgttaatctcgaacatcctgagatgctcgaaaaagcctccagagaattgtggatgcgagtttggtcgcgtgtgagcgtgggcctctgggagtcttcaggtaggaccctagatgattttctgacatttcccagacacgttttcagagtgatgattctgcccccacccgggggatcgaccgtgctgcctgtgacccccctttccccacaccggcttcctgctgtgttcagtagctcacaaaacgaggatatcaccgagccacagagcatattagccgctgctgagaaagccgggatgtcagccgagcaggcgcagggactgctggagaagattgctacccccaaggttaaaaaccagctcaaggaaacaaccgaggccgcttgccggtacggagctttcggactgccaattacagtggctcacgttgacggtcagacccatatgcttttcggctccgatcgtatggagttgctggctcatcttttgggggagaaatggatgggtcccattccgcccgcagttaatgctaggctgtag

SEQ ID NO: 17300 - DNA, 1221 bp, synthetic construct
  source 1..1221: mol_type = other DNA; note = Synthetic coding sequence
atggatcagttggagaacgccaaaatggagcatacaaatgccagttttgacacattcttctgtgagaccagggcaggaaaacacgtccctagggcactctttgtcgacctggagcccacggttatcgatggcattcgaacagggcagcatcggtcactgttccacccagaacaacttttgagcggcaaggaggatgctgccaacaattatgcccgcggcaggtactcagtcggctcagaagtgatcgatcttgtactggagagaactaggaaactcgctgaacagtgtggggggcttcagggctttcttattttccggtcttttggaggggggactgggagtggattcaccagccttttgatggaaaggctcactggcgagtatagtcgcaaaaccaaactggaatttagcgtctacccggcgcccagaattagtacggcagtcgtcgagccgtacaacagcgtccttactactcacagtacaacagagcacacagattgcacatttatggtggataatgaagccgtgtacgacatctgtcacagaaagctgggggtggaatgcccaagccacgctagtatcaatcgcctggtggtccaagtggtctcatctattacagcctctttgagattcgaaggaccgctcaacgtagacctaattgagttccagacaaacctggttccttacccgcgaatacatttccctatgacagcctttgctccaattgtctccgccgacaaggcttatcacgaacagttctccgtgtccgacattaccaccgcctgtttcgagagttccaatcagcttgtgaaatgtgaccctagactcggtaagtacatggcatgttgcctgctgtacaggggggacgtcgtccccaaggaagttaatgccgcaatcgccgcgaccaaaagccggcattcagtacagttcgttgactggtgcccgaccggtttcaaggtcggtattaataacagaccacctactgtgatgcctggaggagatctggccaaagtgcaccgaagcatctgtatgttgtcgaataccactgctatagtcgaagcctgggctcgtctcgatcataagtttgatctgatgtatgccaaacgagcgttcttgcactggtatctgcgcgagggaatggaagaggctgaatttctggaggcaagagaagatctcgccgctctcgagcgagactacgaggaggttgcccagagcttctag

SEQ ID NO: 17301 - DNA, 1860 bp, synthetic construct
  source 1..1860: mol_type = other DNA; note = Synthetic coding sequence
atgtccggcttggtgctaggtcagcgtgatgaaccggctggccaccggctgtcacaagaagaaatactgggcagtactcgccttgtctctcaggggctcgaagccctccgaagtgagcaccaagccgtcctgcagagcttatcccaaaccatcgagtgtctccagcaagggggacacgaagagggccttgtgcatgaaaaggcccgccagctcagacgctcaatggagaacatcgaactcggactatcagaggcacaggttatgctggccttggccagccacctgtcaaccgtcgagtcagagaagcagaaactgagagcccaggtgcgacggctttgccaagaaaaccagtggctgcgagacgagctggccggtactcagcagagacttcagcgtagcgagcaagccgtcgcgcagctcgaggaagagaagaagcatttggagttcctcggtcagctgaggcaatatgacgaggacggacacacttctgaggagaaggagggcgatgctactaaggactccctggacgatctgttccctaacgaggaagaggaagatccttcaaatggcttgtcacgcggtcagggggctactgctgcccagcagggcggatatgagatccctgcccggctaagaaccttacataacctagtgattcagtacgcagcccaagggagatatgaggtcgctgtcccattatgcaagcaggccctggaagatttggaacgaacttctgggcgggggcatcccgatgtggcgacaatgttgaatatcttggccttggtgtacagggaccagaacaaatataaggaggctgctcacttactcaacgacgctctgtcaatacgcgagtcgaccctgggcccagaccacccagctgtggccgctacccttaataaccttgcagtgctgtacggcaagagggggaaatataaagaggccgaacccctgtgccaaagagccctggagattagagagaaagtactgggcaccaaccaccccgatgtggccaagcagcttaacaatctcgcactgctgtgtcaaaatcaggggaaatacgaggccgtggagaggtattatcagcgcgcactggcaatctatgaaggacagttgggacccgacaatccaaacgtagctcgtacaaaaaataatctggcctcgtgctatctcaagcaagggaagtatgctgaagctgagaccctatacaaagaaatcctgacacgggcccatgtgcaagagttcggctctgtggatgacgatcacaagccgatctggatgcacgccgaagagcgtgaggagatgtcaaaaagtcgtcaccacgaaggtgggactccctacgccgagtatggcggttggtacaaggcctgcaaagtctcgtcccctacggtcaatacaactctgcgcaacctcggggccctctatcggcgccaggggaaattggaggccgcagagacactggaagagtgcgcccttcggagcaggagacaaggaacggaccccatctctcagacaaaggtggcggaactgctgggggagtcggacggccggagaacctctcaggagggacccggcgactcagttaaattcgaaggtggagaggacgcctctgtggcggtggaatggagcggcgacggaagcggcacactccagcgctccggatctctgggaaagatccgggatgtccttaggcggtcctcggaattgttagtcaggaaactccagggcacagaacctcgtcctagcagctctaatatgaagcgcgctgcctctctgaattacttaaaccagcctagtgccgcccctctgcaggtctctagggggttgagcgcgtccacaatggatctcagttcatcatcctag

SEQ ID NO: 17302 - DNA, 294 bp, synthetic construct
  source 1..294: mol_type = other DNA; note = Synthetic coding sequence
atggggaaaagttgcaaagtggtcgtctgtggtcaagctagtgttggaaaaacctctattttggagcagcttctgtacggtaaccatgtcgtgggctccgagatgatcgaaacgcaggaggacatatacgttggaagcatcgaaacggacagaggggtaagggaacaaatagccgagtcactgttctctgtttggtcttgcagtagacggcggcttacgaatccaaggacaaggaggaggtcccctagctggtccttggctaccagcgtcacctatagaagcagtggtgtatag

SEQ ID NO: 17303 - DNA, 387 bp, synthetic construct
  source 1..387: mol_type = other DNA; note = Synthetic coding sequence
atgactgacctggtggctgtatgggatgtggctttgagcgacggggtccataaaatagagttcgagcacggaaccacatccggtaaaagggtggtctacgtagatgggaaggaagaaatcagaaaggagtggatgttcaagctcgtcggcaaagaaacattttatgttggtgccgctaaaaccaaggctacaataaacattgatgctatctcaggctttgcctatgagtataccctggaaatcaatgggaaaagcctcaaaaagtacatggaagataggagcaagacaacaaacacctgggtgctccacatggatggagaaaactttcgcatcgtgctagaaaaggacgcgatggatgtgtggtgtaacggaaagaagctggagtag

SEQ ID NO: 17304 - DNA, 879 bp, synthetic construct
  source 1..879: mol_type = other DNA; note = Synthetic coding sequence
atgaccgtgtctaaattcatggcgatccaaaaggccctccagcctgactggtttcagtgtctttccgatggagaagtttcttgcaaagaggctaccagtatcaagcgagtcaggaagagcgtggatcgctctctgttatttctcgacaattgcctcagactccaggaagaatctgaggtgctgcagaagagcgtaattatcggtgtcatcgaaggaggcgacgtcatggaagagcggctaagaagcgcacgggagacggcaaaaagaccggtgggggggtttctgctcgacgggttccagggcaatccaaccactttagaggccagattgcggctgctcagctccgttacagcggaattgcccgaagataaaccgaggctcatatctggcgtgtctcggccagacgaggtgttggaatgtattgaacggggggtggacctatttgaaagcttctttccataccaagtcactgagagggggtgcgccctaacgttttcttttgactaccagcctaaccctgaagagactctcctgcagcagaatggcacccaagaagaaatcaagtgcatggaccagatcaagaagatagaaaccactgggtgcaaccaagaaattacttcctttgagataaatcttaaggagaagaaataccaggaagacttcaatccgctggtaagggggtgcagctgctattgctgcaagaaccacacacgggcttacatccatcatctgctggtgacaaatgagcttctggctggggtcctactgatgatgcacaacttcgagcactacttcgggttcttccattacatcagagaggccctcaagagcgataaactggcgcagctcaaggagctgatccaccgccaggcttcctag

SEQ ID NO: 17305 - DNA, 600 bp, synthetic construct
  source 1..600: mol_type = other DNA; note = Synthetic coding sequence
atgcggtttaggttttgcggagacctcgattgcccagattgggtgttagccgagatctcaacgctagctaaaatgtcctcagtgaagctgaggctgctctgttctcaggtgctgaaagaactgctaggccaggggatagactacgaaaagatcctgaagcttaccgcagatgcaaagtttgaaagcggggatgtgaaggccactgtcgccgtcctcagcttcatcctctcatccgcagccaaacacagcgtcgacggcgagtccctgagctctgaactgcagcagctgggtctgcctaaagagcacgcagcatccttgtgcagatgttatgaagagaaacaaagcccactccagaagcacctgcgggtgtgctcacttcggatgaatcgactcgctggcgtcggatggagggtcgactatactcttagctcttctctgctgcagagtgtggaagagcctatggtacaccttcgtctagaagtggccgctgcacctggtacgccagcacaacccgtggcaatgtcactgagtgctgacaaattccaggttttacttgctgagctgaaacaggcacagacactgatgagcagcctcgggtag

SEQ ID NO: 17306 - DNA, 354 bp, synthetic construct
  source 1..354: mol_type = other DNA; note = Synthetic coding sequence
atgcccgaggatcaggtgggaaagttagaagctaccgaaaataccatcagtgcaatggctgcggccgccgccgagcaacagcagttttacctgctcctcggaaacctcctttctcctgacaacgtggttcgtaagcaggccgaggagacctacgaaaatattcccgggcagtcaaagattacctttctgttgcaagccatcaggaacactaccgccgcggaagaggcgcgacagatggccgccgtcctgctgagacgcctgctgtcatccgcatttgacgaggtgtatcctgccctcccgtccgacgtgcagactgcaattaagagcgagctcctgatgatcattcagatgtag

SEQ ID NO: 17307 - DNA, 888 bp, synthetic construct
  source 1..888: mol_type = other DNA; note = Synthetic coding sequence
tgaacgaagctggctacggggtccaaagacaccaccgtgatcatctggcaggtggatcctgacacccacctgttgaagctgctgaaaactttggaaggccatgcatatggcgtgtcctacattgcctggtccccagatgacaactaccttgtagcctgtgggccggacgattgcagcgagttgtggctctggaacgtccaaacgggggaactacggacaaagatgtcccagtctcatgaagattctctgacatcagtagcgtggaatcctgatggtaaaaggttcgttaccggtggccagagggggcaattctaccagtgcgatctggacgggaatctgctcgattcatgggaaggggtccgcgtccagtgtctctggtgtctgtcagatggaaagaccgtcctagcatctgacacacatcaacggatcagggggtacaacttcgaagacctgacggacagaaacatagtgcaggaagaccacccaatcatgtccttcacaataagtaaaaatggtcggctggcacttctcaacgtcgccactcaaggcgtgcacctctgggatctgcaggatcgggtgctcgttagaaaataccagggtgtcacacaaggcttttacacaattcattcttgttttggcggacacaatgaggactttattgcatccgggagcgaagaccacaaggtttatatctggcataagagaagcgaattgccaatcgccgagcttaccggccatacgaggacagtgaactgcgtgtcctggaacccacagattccctcaatgatggcctccgcgtcagacgacggaacagtgcgcatctggggcccagcaccctttattgatcaccaaaatatagaagaggaatgcagctccatggattcttag

SEQ ID NO: 17308 - DNA, 1053 bp, synthetic construct
  source 1..1053: mol_type = other DNA; note = Synthetic coding sequence
atggcgcgttggatccccaccaaaagacagaaatacggggttgccatctacaactataatgctagccaagacgtcgagctttccctccagatcggggataccgtgcatatcttggagatgtatgagggatggtatagaggatatacactgcagaacaagtctaagaagggaatctttcctgaaacatacatccatctgaaggaagctactgtggaggacctcggccagcacgagacagtgatccccggggagctccctctggtacaggaactgactagcacactgcgtgagtgggctgtgatctggagaaagctgtatgtgaacaataagctgaccttgtttcgtcagctgcagcagatgacttatagcctcatcgagtggaggtctcagatccttagtggaacattgcccaaggacgaactggcagagctgaagaagaaggttacagccaaaatagatcacggcaacaggatgctggggctagatctcgttgtccgagacgacaatgggaatatactagatcccgatgaaacgagcactattgccctgtttaaggcccatgaagtggcttcgaaacgcatagaagagaagattcaagaggagaaatctatactgcagaatctggatctccgggggcagtctattttttcaactatccacacctatggcctgtatgtgaacttcaagaacttcgtttgtaatataggagaggacgctgagcttttcatggccctgtacgatcccgatcaatctacattcatctccgagaactacctgataaggtggggatccaatggcatgcccaaggagattgagaagctgaataatctccaggctgtgtttacggacctcagcagtatggacctcattaggccccgcgtcagtttagtctgccagatcgtgcgtgtcggccacatggagctgaaggaggggaagaaacacacatgcggcctgcgcaggccctttggcgttgccgtaatggatatcactgacatcatccacggtaaggtggacgacgaggagaagcagcatttcatccccttccagcagtag

SEQ ID NO: 17309 - DNA, 360 bp, synthetic construct
  source 1..360: mol_type = other DNA; note = Synthetic coding sequence
atgccggaggatcaggtgggtaagctggaagccaccgagaacaccatctcagcgatggcagcagctgcggctgagcagcagcagttctatctgcttctcggcaatctactcagtcccgacaatgtggtgagaaaacaggctgaggagacatacgaaaatatcccaggacagtccaagattacgttccttctacaggcaattagaaatacgacagctgctgaggaggcaagacagatggccgccgtccttctgaggcgtctcctcagctccgcttttgatgaagtgtatccagcgctgccatccgatgtgcaaacagccattaaatctgagctgcttatgattatacagatggaaacatag

SEQ ID NO: 17310 - DNA, 279 bp, synthetic construct
  source 1..279: mol_type = other DNA; note = Synthetic coding sequence
atgtccgggctcgtgcttggtcagagagatgaacccgcaggccatcgcctgagtcaagaagagatactcgggtccactcgcttggtgtcccagggcctggaagccctccgctctgagcaccaggccgtactccagagtctgtctcagactatagaatgtctacagcagggtggacatgaggagggtctggtgcacgagaaggcccgccagctgagacggagcatggagaacatcgagttagggctctccgaggcccaggtgatgctggcgcttgcctag

SEQ ID NO: 17311 - DNA, 405 bp, synthetic construct
  source 1..405: mol_type = other DNA; note = Synthetic coding sequence
atggtgctgatcctgggtagaagactgaacagagaggatctgggggtgcgagatagcccggctacaaaacgaaaggtgttcgaaatggatcctaagtccctgacgggtcatgagttcttcgatttctccagtggctcctcgcacgccgagaatatcctgcagatttttaacgagttccgggattccagattgtttactgatgtaatcatctgtgtggagggtaaggaatttccttgtcaccgcgccgtgctatcggcatgcagtagttatttccgtgctatgttttgcaatgatcaccgggaaagccgtgagatgcttgttgagatcaacggaatcctcgcagaagccatggaatgttttctgcagtatgtttatacaggaaaggtcaaaataacgactgagtag

SEQ ID NO: 17312 - DNA, 312 bp, synthetic construct
  source 1..312: mol_type = other DNA; note = Synthetic coding sequence
atggcagagctgatccagaagaaactgcagggtgaagttgagaaatatcagcagctgcagaaggacctgagtaagagcatgagcggacgacaaaagctggaagctcagcttacagagaataacattgttaaggaagaactcgcgttgctcgacggttccaacgtggtgtttaagttactcggccccgtcttggttaagcaagagttgggagaagcccgcgcaactgttggcaagcggctcgactacattacagctgagattttcttaagaaccatcccagatcctggagatgtccccgatagtttcttctag

SEQ ID NO: 17313 - DNA, 1923 bp, synthetic construct
  source 1..1923: mol_type = other DNA; note = Synthetic coding sequence
atggggaggagatccggcctgctgggactgaggccaggaccggaacccgtggctctggagagagttataaacaaggtccatctgaaggcaaaccacgtggtgaagcgagacgtggatgaacacctcagaattaagacagtttatgacaagagtgtagaggaactgctgcccgaaaaaaaaaatttggtcaagaacaagcttttccctcaagcaatctcatacttggaaaagaccttccaggtcagaagacccgctggaaccattctgctgagtcgtcagtgcgccactaaccaatatctgcgcaaggagaacgacccccaccgttactgtaccggcgagtgcgccgctcatacaaagtgcgggcccgtgatcgtgcctgaagagcatctgcagcaatgtcgggtctacagggggggtaagtggcctcatggcgccgttggtgtaccggaccaggagggtatctccgacgccgatttcgtactatacgtgggagctctggcaaccgaacgatgttctcacgaaaacatcatctcctacgcggcttattgccagcaggaggcaaacatggatcggcctatcgccggctacgccaacttgtgccctaatatgatctccacccaaccacaagaattcgtagggatgctctctaccgtgaaacacgaggtgattcatgctctgggattttctgccggtctgttcgctttttaccatgataaagatggaaatccgctcacatctagattcgccgatggtctgcccccattcaattacagcttaggcctctaccagtggagcgataaggtcgtgcggaaagtggaacgcttgtgggacgtgagagataacaagatcgttaggcacaccgtgtatctgctggtcacaccaagagtcgtcgaagaggcgcgcaagcattttgactgccctgtcctggagggtatggaattggaaaaccaaggcggggtgggcaccgaactgaatcactgggaaaagcgactgttggaaaacgaggcaatgaccggatcccacacccaaaatcgcgtgctctccaggattactctggctctcatggaagataccgggtggtataaggccaactattccatggctgaaaagctggattggggccggggcatgggatgcgactttgtgaggaaaagttgtaaattctggatcgaccagcagaggcaaaagcgccagatgctatccccttactgcgacacactgcgatcaaacccactgcaactgacctgtcggcaagaccagcgggccgtggctgtctgtaacctacaaaaatttcctaaaccactgccgcaggaatatcagtattttgatgagctgtctggcattcctgcggaggacctcccttattatggaggcagcgttgagattgctgattactgcccattctcccaggagttctcatggcatctgtcaggcgaataccagcgctcatccgactgcagaattctggaaaaccagccagaaatctttaaaaactacggtgctgagaaatatggacctcactctgtgtgcttaatacagaagtccgcttttgtgatggagaagtgtgagagaaaactctcataccctgattggggctccggatgttatcaggtatcgtgctcaccgcaaggcctcaaggtctgggtgcaggacacgagttatctgtgctccagggctggacaggttctgccagtgagcatccagatgaacgggtggattcatgatggcaacctgctctgtccgtcctgctgggacttttgtgaattatgtcctccggagacggatcctcctgcgacaaacctgactcgggccctccctttagacctgtgttcctgttctagttccctggtggtgactttatggctgcttcttggaaacttattccccctgctggccggtttcttactctgcatatggcattag

SEQ ID NO: 17314 - DNA, 783 bp, synthetic construct
  source 1..783: mol_type = other DNA; note = Synthetic coding sequence
atgaaccttgactctgatggtatggacgacataatatcacaggaatccagcctcgatatggaaggtaactacaagaaagcccaaaaaaatgaaagggagtctatacgccagaaacttgcccttggatccttttttgatgatggccctggaatctacacatcgtgctctaagtcagggaagccgagcctgtcctcacgactacaatccggaatgaacctgcagatatgtttcgtgaatgactctggcagcgacaaggactcagacgctgacgactcaaagaccgaaacaagtctggacacccctctgtctcctatgtccaagcagtccagcagctatagtgaccgagataccaccgaggaggaaagcgagtctctcgacgacatggattttctaacacggcagaagaaactccaggccgaagccaaaatggccctggcaatggcgaaacctatggccaagatgcaggtggaggtggagaaacagaatagaaagaagtcccccgtggcagacctgttgccccacatgccccacatttccgagtgcctgatgaaacggagcttaaaacctactgatctgcgagacatgaccattggccagctgcaggtaatcgtgaacgacctccattcacagatcgaatccctgaacgaagaactggtgcagctgttgcttatcagggatgagctccatacagaacaggacgcaatgctcgtggatattgaagatctgacaaggcacgcagagtcccagcagaagcatatggccgaaaagatgcctgctaagtag

SEQ ID NO: 17315 - DNA, 633 bp, synthetic construct
  source 1..633: mol_type = other DNA; note = Synthetic coding sequence
atggccgcatctgtcgaacagagagagggcaccattcaggtgcagggccaggccctgtttttcagggaagctctgcctgggagcggtcaggcccggttcagcgtcctcctcttacacggcatccgtttcagctcagaaacttggcagaacttgggcactctacatagactggcccaggcaggctatcgggctgtggctatcgatttacctggcctggggcactccaaggaagccgccgctcccgcgccaataggtgaattagcacctgggtctttcctcgcagccgtggtggacgccctcgaactcgggcctccagtggttatttctcctagcttatcaggcatgtattctctgccattcttgactgccccgggttctcagttgcccgggtttgtgcccgtggcgccaatttgcaccgataagataaatgccgccaactatgcctccgttaaaacccccgcccttattgtttatggcgaccaggatccaatgggccagaccagtttcgaacatctgaaacaactccccaatcaccgggtactgataatgaaaggagcaggccacccgtgctacctggataagcccgaggagtggcatacaggactgctggatttcttgcaggggcttcagtag

SEQ ID NO: 17316 - DNA, 381 bp, synthetic construct
  source 1..381: mol_type = other DNA; note = Synthetic coding sequence
atgaaccagagatcgcacctgggaacgacttatctcgacactgctaaaggggcggttgagacatttatgaagctccgggcccgtgaccccgcctccagaggagaccggtatatgcttgtgacattcgaggaacccccttacgctatcaaggctggatggaaggaaaatcacgcgactttcatgaatgaactaaaaaatctgcaggccgagggactaacaactctggggcagagcctcagaacagccttcgacctgctaaacctgaatcggttggtgaccgggatagacaattatggccaggggagaaacccgttctttctagagcccgcaataattatcacaattaccgatggatcaaagctcactactacatcagggtag

SEQ ID NO: 17317 - DNA, 1188 bp, synthetic construct
  source 1..1188: mol_type = other DNA; note = Synthetic coding sequence
atggccaatgaccctttggagggcttccacgaggtgaacctcgcctctcctactagtcccgatcttctcggcgtctatgaaagcggcactcaggagcaaactacctccccaagcgtgatttataggccccacccctccgcccttagctccgtgccaatccaggccaacgccctggacgtatccgaactccccacccagcccgtgtactctagcccgcgacgtcttaactgcgctgagatatccagtatctcttttcatgtgacagaccccgcaccatgttccacttctggagtcaccgctggcttgacaaaattgaccactcgcaaggataactataatgctgaaagggagttcttgcaaggagctaccattaccgaggcctgtgatggcagcgacgacattttcggactcagcactgatagcctcagcagactgagatctccttcggtgcttgaggtgcgggaaaaagggtacgaacgcctcaaggaggaactggccaaggcgcagcgagagctgaagctgaaggacgaagagtgcgagcgcctgagtaaggtcagagatcagctgggccaagagcttgaagagttgacagcttccttgttcgaggaggctcacaaaatggtccgagaggctaacattaagcaggctaccgccgagaaacagctgaaggaggctcagggaaaaatcgacgtgctgcaagctgaggtagccgccctcaagacactggtgctgtcaagttctccaacctcacccactcaggaaccactccccggtggcaagacccccttcaagaaggggcatactcgaaataaaagcacatcttcagcaatgagtggatcacatcaggacttatcggtgatccagcccattgtcaaagactgtaaggaagcggatctgtcactctacaatgaatttagattgtggaaagacgagccgacaatggataggacctgcccgttcttggataagatatatcaggaggacatctttccctgcctgaccttctcaaaaagtgagctggcatctgccgtcctggaggcggtggagaataatacgctgtccatcgagcctgttggtctgcaacctatccggttcgtcaaggcaagcgcagtggagtgcggggggcccaagtctttactctacgtgaccttccttcacacatttgatacattctccagagactcttag

SEQ ID NO: 17318 - DNA, 786 bp, synthetic construct
  source 1..786: mol_type = other DNA; note = Synthetic coding sequence
atgggcagcagaaaaaaggagatcgcactgcaggttaatataagtacacaagaactctgggaggagatgctgtcttctaagggactgacagtcgtcgatgtttatcagggctggtgcgggccttgcaaaccagtcgtgagcctcttccagaagatgagaatcgaggtgggccttgatctcctccatttcgccctaataaaggatgaggctctctcagatgaggatgagtgcgtttctcacggaaagaacaatggagaggacgaagatatggtgagctccgagcggacatgtactctagcaataattaaacccgatgcggttgcccatgggaagaccgatgagatcatcatgaaaatccaagaggcgggtttcgaaattctaaccaatgaggaaaggactatgaccgaagcagaggtaagactgttttaccagcacaaggctggagaagaagctttcgaaaagctggttcaccatatgtgcagcgggccatctcatctgttgatattgacccggaccgaggggtttgaggatgtggttactacatggcgcactgtcatggggccccgcgatccaaacgtagccaggcgcgaacagccagagtcccttcgggcccaatacggtactgagatgcccttcaacgctgtccacgggagcagggaccgggaagatgccgatagagaacttgccctgctatttccctctctcaagttctccgacaaagacaccgaagccccacagggagagagctctactcagccccgcttgaagatcaccgacctcgactag

SEQ ID NO: 17319 - DNA, 1284 bp, synthetic construct
  source 1..1284: mol_type = other DNA; note = Synthetic coding sequence
atggtatgttggcaggatctggaggagagccttaggatgaaactgagccttacgaaggtagttaatggatgtcgtttgggaaaaatcaaaaacctcgggaagactggcgatcacaccatggacattcctggatgtctgctgtacacgaaaacagggtctgccccccatttgacacatcataccctacacaatatccacggtgtccctgccatggctcagttgactctgtcttccttggccgaacaccatgaagtgctgacggaatacaaggaaggggtcgggaaattcatcgggatgccagagtcattgttgtactgttccttgcacgatccagtgtctccttgccctgccggatacgttaccaataaatcagtgagcgtgtggtcagtggctggacgggtggagatgacagtatcgaaattcatggccatacagaaggccctgcagcctgattggtttcaatgtcttagcgacggcgaagtttcttgtaaggaagctacctcaattaagcgcgttagaaaatctgtggaccgctccctgctgtttcttgataactgcctgcgactacaagaggagagcgaagttctgcagaagtcagtcatcatcggggtgattgaaggcggcgatgtaatggaagagcggctgcgcagcgctcgggaaacagccaaacgccccgtgggtggattcctgttggacggcttccagggaaatcctactacccttgaagctaggctgagactcctgtccagcgtgactgctgagttgcccgaagataagcctaggcttatcagcggggtctctagacccgatgaagtactggaatgcatcgaacgcggagtggatctgttcgagtccttctttccatatcaggtgactgagcgcggctgcgctcttactttctcttttgattaccagcctaatcctgaggagacactcctccagcagaatggcactcaggaagagattaagtgcatggaccagattaaaaaaatagaaaccacgggctgcaaccaggagattacttcatttgagatcaacctcaaggagaagaagtaccaggaagacttcaatcctctagtgaggggatgtagttgctactgctgcaagaaccacacaagggcctacattcatcatctgctggtaacaaatgaactgctcgctggcgtgctgctaatgatgcacaactttgaacactacttcggcttctttcactatatcagggaggccttgaagtccgataagctggcccagctcaaagaactgatccacaggcaggcgagctag

SEQ ID NO: 17320 - DNA, 393 bp, synthetic construct
  source 1..393: mol_type = other DNA; note = Synthetic coding sequence
atgaaccagagatcgcacctgggaactacatacctcgacactgcaaaaggtgccgttgagacgttcatgaaactacgcgcccgcgaccccgcctcaaggggcgacaggtacatgctggtcactttcgaggagcccccctacgccatcaaggctgggtggaaagaaaatcatgctacttttatgaatgagttaaaaaacctgcaggccgaaggtctgactaccctgggccagagcctcaggaccgcgtttgaccttcttaatcttaatcgcctcgtcactggcatcgataactatggacagggaaggaaccccttttttctggaacctgccatcatcattactattacggatggctcaaagttgaccacgaccagtggtgttcaggacgagtag

SEQ ID NO: 17321 - DNA, 417 bp, synthetic construct
  source 1..417: mol_type = other DNA; note = Synthetic coding sequence
atgaacccagcatccgcaccgccacccctgcctcctcctggccaacaagtgatccacgtcacccaggatctggatactgacctcgaagccctattcaacagtgttatgaatcctaagccctcctcctggaggaagaagatcctgcctgagtcgttcttcaaagaaccagatagcggcagtcacagtcgtcagtcctcaactgatagctctgggggacaccctgggccacgcctggccggtggggctcagcacgtacgatcccactccagccccgcgagtttacagttaggcacgggcgccggtgctgccggtagccccgcccagcagcacgcgcacctgaggcagcagtcatacgatgtcaccgacgagttgccactgcccccgggttgggaaatgacttttactgcgactgggtag

SEQ ID NO: 17322 - DNA, 1692 bp, synthetic construct
  source 1..1692: mol_type = other DNA; note = Synthetic coding sequence
atgcggctggaggagcttaagagacttcagaaccccttggagcaggtcaatgatggcaaatattcatttgagaaccaccaattggctatggatgccgaaaacaatattgagaagtaccccctgaaccttcaacctctggagagcaaggtgaagatcatacagagggcctggagggagtatctccaaagacaggagcctctgggcaagagatctccctccccgccttccgtgtcttcagagaaactgagtagctccgttagcatgaataccttctctgactcatccacaccagactatcgcgaagatggtatggacctgggatccgacgctggctcaagttctagcagctctcgggcttcctctcagtcgaattctacgaaagtgaccccttgctctgaatgcaagtctagctctagcccgggggggagtctggatttggtctctgcgctagaggactatgaggagccatttcctgtgtatcagaagaaagtgattgatgagtgggccccggaagaggacggagaggaggaggaggaggaggatgaacgggaccagcgcggatatagggatgaccgctcgcccgcgagagagcccggcgacgttagcgcacgcactcggtccggagggggaggcggccgcagcgctaccacagctatgccacctcctgtgccaaacggcaatctgcatcagcacgatccacaggatctgcgacacaacggcaacgtggtagttgccgggcgaccatcatgttccagagggccccgcagagccattcaaaagccccagcctgctggaggtagacgctctggcaggggccccgcagccggaggcctctgtctgcaacccccagacggaggcacctgcgtgccagaggaaccaccagttcccccgatggattgggaagccctcgaaaaacacctagcgggtttacagttcagagaacaggaagtgcgcaatcagggacaagcaagaactaactctacctcggcccagaagaacgagcgggagtccatcaggcagaaactggcccttggttcattcttcgatgacggaccagggatatacacaagttgttccaaaagcggtaagccatctcttagctcccgtcttcagtccgggatgaatttacagatatgcttcgttaacgacagcgggagtgacaaggattctgatgccgacgacagcaagaccgaaacctcactagatactcctctgtcccctatgtcaaaacaatcatccagctacagcgatagagacacgaccgaagaagagtctgagtccctggacgacatggacttcctgactcggcagaagaagctgcaggctgaggctaagatggcactcgctatggctaaaccaatggcgaagatgcaggtcgaggtggaaaagcagaataggaaaaagtcccccgttgccgacctcctgccacacatgccacacatctcggagtgtttgatgaaaaggtcacttaagcccactgatttaagagatatgactatcggccagctccaggtaatagtaaatgatttgcattcccagatcgagtcgctgaacgaggagcttgtgcaactgcttttgatacgcgatgagctccacactgaacaggatgctatgttagtggatatcgaagaccttaccaggcacgccgaatcacaacagaagcatatggctgaaaaaatgcctgctaagtag

SEQ ID NO: 17323 - DNA, 228 bp, synthetic construct
  source 1..228: mol_type = other DNA; note = Synthetic coding sequence
atgccagaggaccaggtaggaaagctggaagcaacagagaacacaattagtgctatggctgccgccgctgcagagcagcagcagttctaccttcttttggggaacctgctgtctccagataacgtggtgcgaaagcaggccgaagagacatacgaaaacatccctggacagtcaaagattacctttctattgcaagccatccgaaacaccaccgccgccgaagagtag

SEQ ID NO: 17324 - DNA, 2712 bp, synthetic construct
  source 1..2712: mol_type = other DNA; note = Synthetic coding sequence
atgcccgagcagttcagcgtggctgagttcctagcagtgactgccgaagatctgagtagccctgccggggctgccgcattcgcagctaagatgccgaggtatcggggtgcagctctggcccgtgaagagatcctggaaggggaccaggccattcttcagagaataaagaaagccgtccgggccatccactcgtctggcttagggcatgtggaaaacgaggagcagtaccgcgaggccgtggagtcactaggtaattctcacttatcccagaattcacacgagctcagcacaggatttctgaacctggcagtctttaccagagaggtcgccgccctgttcaaaaatttaattcagaaccttaataacatagtatcctttcccctggactcccttatgaagggccagttaagagatggaaggcaggactcaaaaaagcagctggagaaggcctggaaggactatgaggctaaaatggcaaagctggaaaaagagcgggatcgtgccagagtaacaggagggatcccaggggaagtggctcaggatatgcagcgcgagaggagaatcttccaactccacatgtgcgaatatttattaaaagcaggggagagccagatgaaacagggacccgattttcttcagtctctgatcaaattttttcacgcccagcataactttttccaagatggatggaaagcggcccaatccttgtttccctttatagagaagttagctgcaagcgtgcatgctctgcatcaggcccaggaagacgagctccagaagctcacacagctgcgggattctctgcgcggcacgttgcaactcgaaagccgagaggagcatctgtccaggaaaaattcaggctgcggctattccatccaccaacaccagggcaataagcagttcggaaccgagaaggtgggctttttgtataagaaatccgatggaatcaggcgggtttggcagaagcggaagtgcggtgtcaaatacggctgtcttactatcagtcatagtactatcaacaggccacccgtgaaactcactcttctgacgtgtcaggtgcgacccaaccccgaggagaagaagtgtttcgacctagttacccacaaccgcacataccactttcaggctgaggacgagcacgagtgtgaagcgtgggtttctgtgctacagaactccaaggacgaagccttgagtagcgcgttcttaggcgaaccctccgccgggccaggttcctggggatccgctgggcatgatggagagccacacgatcttacaaagctgcttatcgccgaggtgaagagtagaccggggaattcccagtgttgtgattgtggggccgcggatccgacttggttatcaactaatcttggcgtgctgacatgtattcaatgcagcggtgtccatagagaactgggcgtccggtttagcaggatgcagtctctaacactcgatctgcttgggccatccgaactgctactcgcgctgaacatgggtaatacttcctttaatgaggtcatggaggcccagctgcccagccatggggggcccaagccatccgctgagagtgatatgggtaccaggagggattacataatggccaagtatgtggagcacagattcgccaggcggtgcactcctgaacctcagcggctgtggacggccatttgtaatcgagacctgttatccgtgctggaggcttttgccaacggccaggactttgggcagccccttcccgggcccgacgcgcaggctcccgaagagttggtcctccatctggctgtgaaagttgcaaaccaggcaagcttgccattagtggacttcattatccagaatggcggacacctggacgccaaggcggccgacggcaacaccgcgctgcactacgctgctctgtacaaccagcctgattgcttaaaactcctgctgaaaggtagagccctagtgggcaccgtgaatgaagctggtgagaccgccctcgatatcgcgcgtaagaaacaccacaaagaatgtgaggaactgctggagcaagctcaggccggcaccttcgcatttccactacacgttgactactcatgggtgattagcactgagcccggctccgactcagaagaggatgaggaggaaaaacggtgtcttctcaaactgccagcccaggcacattgggccagcggtcggctggatatttcaaataagacatatgagaccgtggcctcactgggggcagccactccccagggggaatccgaagattgcccaccaccactgccagtgaagaattccagtcgcacactcgtgcaggggtgcgctcgtcatgcgtctggtgataggagcgaggttagttcactcagtagcgaggcgcctgagaccccagagagccttggttcccccgcttcctcaagctcgctcatgtcacctctagagcccggggacccaagccaggccccacctaacagcgaggagggcctgagagagccccctggcacgagccgacccagcttgaccagcgggacaacacccagtgaaatgtacctgccagttaggttctccagtgagtccaccaggtcatacaggcggggggcacgttccccggaggacggaccttctgccagacagcccctcccgaggagaaacgtcccagtgggcatcacagagggcgacgggagcagaaccggatctttaccagcttcttctgtccagttactccaggactag

SEQ ID NO: 17325 - DNA, 522 bp, synthetic construct
  source 1..522: mol_type = other DNA; note = Synthetic coding sequence
atgccaagaaaggggacacaacccagcaccgccaggagacgcgaagagggcccaccacctccctccccagacggagccagctccgatgctgagcctgaaccacccagcgggagaacagagtcaccggccactgcagctgagacggcctcagaagagttggacaataggtccctggaagaaatcctgaattccattccacctccacctcctcccgctatgactaacgaggccggagcaccaagactgatgatcacccacatcgtgaatcagaactttaaaagttacgcaggagagaagatcctgggccctttccacaagaggttttcatgcattattgggcctaacggctccggaaagagtaacgttatagattccatgttgtttgtgtttggttacagggcacagaagattagatccaagaaactctctgtgctgattcataatagtgacgagcacaaagacatccagtcatgcaccgtcgaggtgcactttcagaaaatcatcgataaagaaggcgattag

SEQ ID NO: 17326 - DNA, 2262 bp, synthetic construct
  source 1..2262: mol_type = other DNA; note = Synthetic coding sequence
atgtactcccctataatctatcaggctctctgtgagcacgtgcaaacacagatgagcctcatgaatgatttaacctctaagaacattcctaatggcatcccagctgtaccttgccatgcacccagtcactcagaatcccaggccacaccacatagctcctatggcttgtgtacttcaactcccgtctggtctttgcagcgtcctccttgccctccaaaagtccattcggaggtgcaaactgacggaaactcccagttcgcaagccaggggaagacagtgagtgccacttgtacggatgtgctaaggaattcatttaacaccagtccgggagttccttgctctctgcccaaaacagatatttctgccatcccaacattgcagcaattgggcctagtcaacggcattttgccccagcagggcatccacaaggagaccgacctactgaaatgtatccagacatacttaagcctgttcagaagtcatgggaaggagacccatcttgacagccaaacacaccgcagtcccacccagtcccagcctgccttcctggccacaaacgaggagaaatgtgcacgggagcagatccgtgaggctaccagtgaacgaaaggatctcaatatccacgtcagggataccaagacagtcaaagatgtccagaaggctaagaatgtcaataagacggcagagaaagtgaggatcatcaaatatctgttgggagaactaaaggcacttgtggcggaacaggaagattccgagatccagaggctgatcactgagatggaagcctgcattagtgtactccccaccgtgtccgggaacaccgatatacaagtagaaattgccctggcaatgcaacctctccgcagcgagaacgcacagttgaggcggcagctccgcatcctcaatcaacagcttagggagcagcaaaaaacacaaaaaccaagcggcgctgtggactgcaacctcgagctgttttcgctccaatccttgaacatgtctctgcagaaccaactagaggagagtttaaaatcgcaggagctgctgcagagcaaaaacgaggaattattaaaggtcattgaaaatcagaaggacgaaaacaaaaagttctccagcatttttaaggataaggatcaaaccattttagaaaacaaacagcaatatgatatcgagatcaccagaatcaagatagagcttgaagaggccctcgtgaacgtgaaaagcagccagttcaagctggaaacggccgagaaagagaaccagattctgggcatcacgctgcggcagagagacgctgaagtgacaagactgagggagctgactaggacactgcagacctctatggctaagctgctcagcgatctgtccgtggattctgcacgttgcaagccgggtaataatctcactaagtccctgctgaacatccacgacaaacaactccagcatgatccagccccagcacatacttctatcatgagttacctgaacaagcttgagacaaattattcctttacccatagcgagccgctttctacaatcaaaaatgaggagacaattgagcctgacaagacctatgagaacgtcttgtcgtctcggggccctcaaaattccaacactagaggcatggaggaagcttccgcaccgggtattatatcagccctctctaagcaggacagtgacgagggctccgaaaccatggccctgatagaggatgaacataatctggacaacacgatctatatcccgttcgccaggtccacccccgaaaagaagagtccactctcgaagagactaagtccacaacctcagattcgcgctgccacaacacagctggtttctaactccgggcttgctgtgtcaggcaaggagaacaagttgtgcacgcctgtgatctgtagcagctccacaaaagaggcagaagacgcgcccgagaagctgtcaagagccagcgacatgaaagacacccagctgctcaagaaaatcaaggaggccatcggaaaaatccctgcagcaaccaaagagccagaagagcaaacagcatgtcatggtccatccggctgcctctccaacagcctgcaagtgaaggggaatacggtgtgtgatggctcagtcttcacttctgacctgatgtccgactggtcaatttccagcttctctacattcacaagccgggatgagcaggattttcggaatggccttgctgctcttgacgccaacatcgctcgtctgcaaaagtcccttagaacaggcctgctagaaaagtag

SEQ ID NO: 17327 - DNA, 219 bp, synthetic construct
  source 1..219: mol_type = other DNA; note = Synthetic coding sequence
atgatggaagaaatctccataatggtggcatatgatgcccacgttttctctcagctccatgacgaggactttctgacaagtctcgtggcaatttccaaacccaggtcaatggtcccaacaaaaaagcttaaaaagtacgagaaggagtatcagaccatgagagaatcccaactacagcaagaagacccaatggaccgatataaatttgtttatttgtag

SEQ ID NO: 17328 - DNA, 588 bp, synthetic construct
  source 1..588: mol_type = other DNA; note = Synthetic coding sequence
atgtggcacatgaccaggaattggccactcgtgggtaaaacatctctgatcacccggtttatgtacgattcttttgacaacacctaccaggcgacgatcggaatcgatttcctaagcaagacaatgtatcttgaagacaggaccgtgagactgcagttgtgggatactgctggccaagaacggtttagatctctgataccatcttacatccgagactccaccgtagcagtcgtggtttacgacattactaacttgaacagcttccaacagactagcaagtggatcgacgacgtgcgaacggagcggggctcggacgttatcatcatgctggttggcaataaaactgatctggcagataaacgccagattacaattgaggaaggagagcagagggcaaaagagctttctgtaatgtttatcgagacctctgcgaaaaccggctataatgttaaacagttgttccggagggtggcttccgccctccctggaatggagaatgtgcaggaaaagagcaaggaaggaatgattgatattaagttggacaagccgcaggaaccccctgcttcagagggaggctgctcctgttag

SEQ ID NO: 17329 - DNA, 1047 bp, synthetic construct
  source 1..1047: mol_type = other DNA; note = Synthetic coding sequence
atgagcttgcctcgctttcaaagagtgaattttgggccctacgataattacatcccagtaagcgaactgtccaagaagagttggaaccagcagcactttgccctcctgtttcctaagcctcaacgacctggtacaaaaagacggtcaaagcctagtcaaattagagataacaccgtcagtattattgacgaagagcagttgcgcggggacaggcggcagcctctctggatgtacaggagtctgatgcgcattagcgaaagaccttccgtttatctggccgcaagacgccaacccctaaaacctacgcgaactgtcgaggtcgactcaaaggctgccgagatcgggaagaaaggagaagataaaaccacacagaaggacacgacagattctgagtcggaattgaaacaggggaagaaagactcaaaaaagggaaaggatatcgagaaaggaaaagaggaaaaactggatgccaagaaagattcaaagaaaggaaaaaaagacgctgagaagggcaaggactccgccacagagagcgaagacgaaaagggcggagctaagaaagacaacaagaaggacaaaaaggactcaaacaaaggcaaagattctgcgacagagtccgagggcgaaaagggagggacagagaaagactctaaaaaaggaaaaaaagactccaaaaaagggaaggatagtgcgatagaactgcaggcggttaaggctgacgagaagaaggacgaagacggaaagaaagatgcaaataaaggggacgaatctaaagacgccaagaaggacgccaaggaaataaagaaaggaaagaaagacaagaaaaaaccctcatccaccgacagtgactcaaaagacgatgtcaagaaagagagcaagaaggatgctaccaaagacgctaagaaagtcgcgaagaaggatactgaaaaagagagtgctgatagcaagaaggacgcgaaaaagaatgccaaaaaggacgccaaaaaagatgccaagaaaaacgccaaaaaggacgaaaaaaaagacgccaaaaagaagggcaaatag

SEQ ID NO: 17330 - DNA, 2862 bp, synthetic construct
  source 1..2862: mol_type = other DNA; note = Synthetic coding sequence
atgaaaaggggcattcgacgcgacccttttaggaaacgcaagctaggagggagggctaagaaggtgcgagagcccactgcggtcaacagcttttatcgggaagcttctcttcccagcgtgtgggccagcctccgccgcagggagatggttcgctcgggagccagaccaggccaggtgctgtcttctggacggcacaccggaccagcgaaactgaccaatggaaagaaagcaacatacttgagaaagatcccacgattcaacgcagactcagggtatagtatccatagcgactcagagtcacaggccgaaaccgtgcacggccttgacggttgtgcatcactactgcgggatatcctgagaaatgaagacagtggtagtgagaccgcctatctcgagaatagaagtaatagcagacccctagagtccaaaagatacggatcaaaaaaaaagcggcatgaaaaacatactatacccctcgtggtccagaaggagacatcaagtagcgataacaaaaagcagatcccaaacgaagccagcgcacggtccgaaagggatacatcagatctggagcagaattggagtctgcaagaccactaccgtatgtacagcccaattatttaccaagccctctgcgaacacgtgcaaactcagatgagcctgatgaacgacttgacgtccaaaaacattccgaatggcatcccggccgttccttgtcacgcacccagccactccgaatcacaagctaccccccatagcagttatggactctgcacttctacccctgtctggtcactccaacgtcctccctgtccacccaaggtgcatagcgaggtacagaccgatggaaacagccagtttgcctcgcaggggaaaacggttagcgcaacctgcaccgacgtcctgcgcaattccttcaacaccagtccaggagtgccctgttctctcccaaagaccgacatctctgccattccaaccttgcagcagttgggactggtgaatggaattctcccccagcaaggtatacacaaagagactgacttactcaagtgcatccagacctatctgtctctgtttcgctctcatgggaaagaaacccatctcgacagtcagacccatagaagcccaacacaatctcaacccgcttttctcgccactaacgaggaaaaatgcgccagagagcagatccgcgaggctacaagtgaacgaaaagacttgaacattcacgtaagagacacaaagaccgttaaggacgtgcagaaagcgaagaatgtgaataaaacagcagagaaagtgagaattattaagtacctcctcggggagttgaaggcacttgtggctgaacaggaagatagcgaaatccagagactcatcaccgaaatggaggcttgcatcagtgtactccccaccgtcagcggtaatacagacatccaagttgagattgccttggctatgcaaccattgcgtagcgagaacgcccagctgcgaagacagctgcggatcttgaatcagcaactcagagagcagcagaagactcagaagcctagtggcgctgttgactgtaacctggagttgttttcgcttcagagtttgaatatgagtctgcagaatcaactcgaggaatcactgaagtcacaagaactgcttcagagcaaaaacgaggagttgctgaaggttatcgaaaatcagaaagacgagaataagaagttctccagtatcttcaaagataaagatcagaccattttggagaacaagcagcaatacgatattgaaattacccggatcaagatcgagttagaggaggctctggtcaatgtaaaatctagccaatttaagctagaaactgcagagaaagaaaaccagattctcggcataacactcagacagcgggatgctgaggtgacacggctccgggagctaacccgaactctgcaaacctccatggccaagcttctcagcgatttaagtgtcgatagcgctaggtgcaagccaggcaacaacctgactaaatctctgctgaacatccacgataaacagctgcagcatgatccagcccctgcccacacatcgataatgtcatatttaaacaagttggaaaccaattactcctttacacacagtgaacccttgagcacaataaaaaacgaagagaccattgagcctgataagacctacgaaaatgtgcttagtagtcggggaccccagaattccaacaccagagggatggaggaggcttctgctcctgggattattagcgcactttcaaagcaagattcggacgagggatccgagacaatggctttgatcgaggatgagcacaaccttgacaataccatctacattccctttgcccgatccacaccagaaaaaaagtctccgctcagcaagcgactttctcctcagccccagatccgtgccgctaccactcaactcgtgagtaacagtggtctggctgtttccggcaaagaaaacaagctgtgcaccccagtcatctgcagttcttcaactaaagaagcagaggatgccccggagaaactatccagagcgagcgacatgaaggacacccagctgctcaaaaagattaaggaagctattggaaagatcccggcagccacaaaagagccggaggaacagaccgcgtgccacggccctagtggctgtctgtctaacagtcttcaggtaaaagggaatactgtctgcgacgggagcgtttttacttccgacttaatgagtgactggagcatttcgtctttcagtacatttacctcccgcgatgagcaggatttccgcaacggacttgccgctctggatgccaatattgcgagacttcagaaatctctgcgcaccggtttgctggagaagtag

SEQ ID NO: 17331 - DNA, 1683 bp, synthetic construct
  source 1..1683: mol_type = other DNA; note = Synthetic coding sequence
atgtccgaacatagccggaattccgaccaggaagaactgcttgacgaagagatcaacgaagacgaaatcctggcaaatctatccgcggaggagctgaaggagcttcagtctgaaatggaagttatggctccggacccatccctcccggtgggcatgattcagaaagaccaaacagacaagcctccaacaggaaacttcaatcacaaatcactagtggactatatgtattgggagaaggcctctcgcaggatgttggaggaggagcgggttcctgtgacctttgtgaagagcgaggaaaaaacccaagaggagcacgaggaaatcgagaaaagaaataaaaatatggcccagtaccttaaagagaaattaaataatgaaatcgtggccaacaagcgagagtctaagggcagctccaatatccaggagactgacgaggaagatgaggaggaggaggacgatgatgacgatgatgagggagaggacgacggtgaggagagcgaggagactaaccgagaagaagaagggaaggccaaggagcagattcgcaactgtgaaaataactgtcaacaagttacagacaaagcattcaaggaacaacgggacagaccggaagcacaagagcagtcggagaaaaaaatcagcaaattggaccccaagaagcttgccctagacacatctttccttaaggtgtccacccgaccttctggcaaccagacagacttggacggctcattgagaagagtgcgaaagaacgacccggacatgaaagagctaaacctgaacaatattgagaacattccgaaggaaatgctcttagactttgtaaatgccatgaagaaaaacaaacatataaaaacattttctctggccaacgtgggggcagatgaaaacgtagcctttgctcttgccaacatgctacgggagaaccggtcaatcacaacgttgaacatagagtcaaatttcattacagggaaaggaatcgtagctataatgcgctgcttgcagttcaacgaaacgttgacagaactcagatttcataaccaaagacatatgctgggtcaccatgcagagatggaaatcgcacgcttgctgaaagcgaacaataccctgctcaagatggggtaccatttcgagctgccaggaccccggatggttgtgactaacttgctcactcgaaaccaggataaacagaggcagaaaaggcaggaggagcagaagcagcagcagctgaaggaacagaagaaactgatcgcgatgctcgagaacgggcttggcctaccacctggtatgtgggaactgctgggtgggcccaagccagactctaggatgcaagagttttttcagccaccaccacctaggcctcccaatccacagaatgtgcccttctctcaaagatcagaaatgatgaaaaagccctcccaggctccgaagtatagaaccgatcccgacagcttccgagtcgtgaagttaaagaggattcagcgcaaaagccgaatgcccgaggccagagagccccctgaaaagactaacctgaaggatgtcatcaaaacacttaagccagtgcccaggaaccggccccctcccttagtcgagatcactccacgggaccaactgcttaatgatatccggcactctagtgtagcctacctgaagccagtacagctaccaaaagagctcgcctag

SEQ ID NO: 17332 - DNA, 153 bp, synthetic construct
  source 1..153: mol_type = other DNA; note = Synthetic coding sequence
atgccagaggatcaggtcggcaaacttgaggccacagagaacacgatctccgccatggcagccgccgccgctgagcagcagcagttctatctccttttaggtaacttgctttccccagacaacgtcgtgcggaaacaagccgaggttacctag

SEQ ID NO: 17333 - DNA, 288 bp, synthetic construct
  source 1..288: mol_type = other DNA; note = Synthetic coding sequence
atggccataggcaaacggctggccacattgccaactaaagaacagaagacacagaggctgatttcagagctcagtctgctcaatcacaaactcccggcccgtgtttggctgcccaccgctgggtttgatcatcatgtagtccgcgtgccgcacacacaggccgttgtgctcaactcgaaggacaaggccccctatcttatatacgtcgaggtgttagaatgtgagaacttcgacactacatccgtgccagccaggattccggagaacagaatacgttcaaccagatag

SEQ ID NO: 17334 - DNA, 1260 bp, synthetic construct
  source 1..1260: mol_type = other DNA; note = Synthetic coding sequence
atggctggctctggatgcgcttggggggcagagccgcccagattcctcgaagcatttggaaggctttggcaggtgcagtccaggctcggcagcgggtcttcggctagcgtgtatcgcgtgcgttgctgtggaaaccctggctctcctccaggcgctcttaaacagtttctgccccctggtaccaccggagccgcagcatccgcagctgagtacggcttcaggaaagaaagagcagctttggaacagcttcagggccaccgcaatatagtcacactctacggcgtgtttactattcacttctccccaaatgtgccaagccggtgtctgctccttgaactcctggatgtctccgtgtcggagctccttttgtactcgagccatcaaggttgtagtatgtggatgatccagcactgcgcacgcgacgtcctggaggctctcgccttcttacaccatgagggctacgttcacgccgatctcaaaccccgtaacatactttggagcgccgaaaacgagtgcttcaagctgatcgatttcgggctgtcttttaaggagggaaaccaagacgtcaagtacattcagactgacggctaccgcgcccctgaggccgagctgcaaaactgcttggcgcaggccggtctccagagtgacactgagtgcacaagcgctgtcgatctctggtcattgggcattatcctgctcgagatgttttccgggatgaaattgaaacacacagtcaggtctcaggaatggaaggcaaatagctcagctatcatcgaccacatcttcgccagcaaggctgttgtcaatgccgctatccctgcctaccacttgagagacttaatcaaatcaatgctccatgatgacccatctcgtcgaatccctgctgaaatggccctgtgcagcccatttttttcaatcccctttgcgccgcacatcgaggacctcgtcatgctgcccaccccagtactgcggctgttgaatgtcttggacgacgactatttagaaaatgaagaagaatatgaggacgtggtcgaagatgtcaaggaggagtgccagaagtatggacccgtcgtgtctctactggtgccgaaggaaaacccggggcgcggccaggtgttcgtggagtacgccaacgccggggattctaaggccgcacagaagctcctgacaggaagaatgttcgacggtaagtttgtagttgccaccttttatcctctgagcgcctacaaacgcggctatctgtatcagacactgctgtag

SEQ ID NO: 17335 - DNA, 1272 bp, synthetic construct
  source 1..1272: mol_type = other DNA; note = Synthetic coding sequence
atgccccgcaaaggtacacagccatccacagcccgccgccgggaggagggtccaccaccaccttcaccggacggggcctcatccgacgcagagccggagcctcctagcggccgcacagaaagtccggccacagccgcggagaccgcatctgaagaactggataaccgcagtttggaggagatcctgaacagtatcccccccccccctcctcccgccatgaccaacgaagcaggagcgcctcggctgatgattactcatatcgttaaccaaaacttcaaaagctacgccggcgaaaagattctcggaccattccataaacgattcagttgcataattggtccaaatggttctgggaagtctaacgtgatagattcaatgttattcgtgttcggctacagagctcagaaaattagatctaagaagctttccgtacttattcacaatagcgacgagcacaaggatatacagtcttgcaccgtagaggtccacttccagaaaatcatagataaggagggggacgattatgaggttattcccaacagtaatttctatgtttctaggaccgcttgccgggacaacactagcgtgtatcacattagcggaaaaaagaagacattcaaggatgtgggtaatctacttcggtctcacggtattgacttggaccataaccggttcctaattctgcagggcgaggtggagcagatcgcaatgatgaagcccaaagggcagacagagcatgacgaaggcatgctggagtatctggaagatatcattggatgcggtcggctcaacgagcccatcaaagtgttatgtcggcgggttgaaatactgaatgagcataggggcgagaaactgaatagagtgaaaatggttgaaaaggagaaggatgccctcgagggcgaaaagaacatcgccattgaattcttgactctggaaaatgagattttcagaaaaaagaatcacgtgtgtcagtactacatctacgagctgcaaaagagaatcgcagagatggagacgcaaaaagaaaagattcacgaagatacaaaagagattaatgagaaatccaatatcctgagcaacgaaatgaaagcgaagaataaagatgttaaagacaccgaaaagaaactgaacaagattacaaagttcatcgaagaaaacaaggaaaagttcacccaactagacctggaagacgttcaagttcgtgagaagcttaaacacgcaacctccaaggcaaagaaattggaaaagcagctgcagaaggataaggagtag

SEQ ID NO: 17336 - DNA, 1113 bp, synthetic construct
  source 1..1113: mol_type = other DNA; note = Synthetic coding sequence
atggaagagggagtgccatgtcctgccccagctgcaaagctcactcccccagtgaagaagtcacaggatatgcacgatgagagatctaagctggtgaatgaatacgcatgccgagttctcgagctgctcggtatgggtcatagattgtttgtaccacgcctgctggccactagtaaggaggatcttctccaggccgattttgagggagccctgaagtttttccgcgtccagttgccaaagcggtaccgcgccgaagagaacgcacggcgccttatggagcaagcatgcaacattaaggtgccaactaagaagcttaaaaaatatgagaaggaataccaaaccatgagggaatcacagctgcagcaggaggatcctatggatcggtataagagggagaatcgcaggctccaagaagcttccatgagactggaacaggaaaacgatgacttggcacatgagctagtgaccagcaagatcgccctgcgcaatgatttggatcaggccgaggacaaggccgacgtgctgaataaggaacttttgctgacaaagcagagactggtggaaactgaagaggagaaacgaaagcaggaggaggagacagctcagttaaaggaggtgttcaggaaacaactcgagaaagcagagtacgagataaaaaaaactacagctattattgcggagtacaagcagatttgcagccaactttcaacacggctcgaaaaacagcaggcagcttcaaaggaggaactggaagtggtgaagggcaaaatgatggcgtgcaaacactgttccgatatcttcagcaaagaaggagcactaaaattggcagccaccggcagagaggaccagggcattgagacggacgacgagaaggatagcctgaagaagcagcttagagaaatggaactggagttggctcagactaaattgcagctggttgaggcaaaatgcaagatccaggagctcgagcatcagagaggtgctctgatgaacgaaatccaggctgccaaaaattcttggttctcaaaaaccctgaacagtattaagaccgctacaggcactcaacccctccagccagcgcccgttacacagccgcccaaggaatctacctag

SEQ ID NO: 17337 - DNA, 2262 bp, synthetic construct
  source 1..2262: mol_type = other DNA; note = Synthetic coding sequence
atgtactcccccataatttaccaggcattgtgcgaacacgtacagacacagatgtccttgatgaatgacctgacttccaaaaatatcccaaacgggatacctgctgtgccgtgtcatgccccctcacactcggagtcgcaagcaactccccacagcagctacggactgtgcacttccacacctgtgtggagtctacagcggcctccttgtccaccgaaggttcattccgaggtgcagaccgacggaaactcccagtttgccagtcaagggaagacagtaagcgctacgtgtacagacgtgctgagaaattcatttaacacttccccaggggtgccttgttcactgcctaagactgacatctctgccatacctaccctgcagcagctcggcctcgtgaacggaatcctaccacagcaaggcatccacaaggagacggatcttttgaagtgtattcagacctacctgagccttttcaggtcccacgggaaggaaacccacttggactcacagacacaccgctctcccacacagagtcagcctgcgtttctggctactaacgaggagaagtgtgccagagaacagatccgtgaggctacatcggagagaaaggatctgaatatccacgttcgcgacacaaaaactgtaaaggacgttcagaaggcaaaaaatgttaataaaaccgccgaaaaagtcaggatcatcaagtatttgcttggggaactgaaagctctggtcgcggagcaggaggactcagagatccagcggctaattacagagatggaggcatgtattagcgtgctaccaacagtgtccggcaacactgatatacaggtcgaaatcgctcttgcaatgcaaccactgcgtagcgaaaatgcgcagctgagaagacagcttcgtatccttaaccagcagttgagagaacagcagaagacccaaaagccttctggagcagtggactgcaacctggagctgttttccctacagagcctgaacatgtctctgcagaatcagttagaggaaagcttgaaaagccaggaattgcttcaatctaagaacgaagaactgctgaaggtgatcgagaaccagaaggacgaaaataagaaattctccagcatctttaaggataaagaccaaactatcctcgagaacaaacagcagtacgacatcgagatcacccggatcaagatagagctcgaagaagcactggtcaacgttaaaagcagccagttcaaactagagaccgccgaaaaagagaaccaaatcctggggatcacactcagacaacgggatgctgaggtgacgcggctaagagagctaacccgaaccctgcagacatcaatggccaaactcctgagcgatctttcagtcgatagcgcgagatgtaagcccgggaacaatctcaccaagagccttctgaacatccacgataaacagttgcagcatgatcctgcccctgcacatacatctattatgtcctatctgaataaactagagacaaattacagctttacacattcagagcccctctctacgataaagaatgaggagactatcgagcctgataagacctatgagaatgtcctttcaagcagaggtccacagaattccaacactagaggcatggaggaggctagcgctccgggaataatttcagccttaagcaaacaggatagcgatgagggctctgaaactatggctctgatcgaggatgagcataatctggataacactatatacatcccattcgctaggagcaccccggagaagaaatcaccactatcgaagaggctttccccacagcctcagattcgtgctgccaccacacagctggtctccaactctggtctggccgtgagcgggaaggagaacaagctgtgcaccccagtcatctgttcaagctctacaaaggaggcagaggacgcacccgaaaaactaagccgggcgagtgatatgaaagacacccagctgcttaaaaagatcaaggaagctatagggaaaatcccagctgctacaaaagaacccgaggagcagactgcttgtcatgggccaagcggatgcctgtcaaactctctccaggtgaaaggcaacaccgtttgtgatggatccgtcttcaccagtgatttaatgagcgactggtcaatttcctctttcagcacttttacttcaagagatgaacaggattttaggaatggattagccgccttggatgccaacattgcccgactgcagaagtctctcagaactggccttctcgaaaagtag

SEQ ID NO: 17338 - DNA, 2067 bp, synthetic construct
  source 1..2067: mol_type = other DNA; note = Synthetic coding sequence
atgagcgtcaatagtgagaagagttcctcttcggagaggcctgaacctcagcagaaagccccacttgtgccccctccgccaccaccacctccaccacctccaccgccgctccctgaccccacaccaccggagcctgaggaggagatactcggcagcgatgatgaggaacaggaggaccctgcagactactgtaagggtgggtatcacccagtcaaaattggagacctgttcaatgggcgctaccacgtgatccgaaagctcgggtggggtcatttcagtactgtctggctgtgttgggacatgcaaggcaagaggtttgttgcaatgaaggtggtcaagagcgctcaacactatacagagacagccctcgacgaaatcaaattactgaaatgtgtcagagaatccgatcccagtgaccccaataaggatatggtcgtgcagttaattgacgacttcaagataagtggcatgaatggcatccacgtttgcatggtgtttgaggtgctgggacaccacctgctgaaatggataatcaaatcaaattatcaggggttgccagtcaggtgtgtcaaaagcataatcagacaggtgttacagggccttgattacctgcacagtaagtgcaagataatccatacggatataaaacccgaaaatatcctgatgtgcgttgacgatgcgtatgtacgacgcatggcggccgaggccactgagtggcagaaggcgggagcgcctccccctagtggcagcgcagtaagtactgccccccagcagaagcctatcggcaaaatatctaaaaacaaaaaaaagaaactgaaaaaaaagcagaaacgccaggccgaactactcgaaaaacgattgcaggagatcgaggagctggagagagaggctgaacggaagatcatcgaagagaacataacaagcgccgctccgagcaacgaccaggacggagaatattgtcccgaagtcaagctgaagaccaccggcttagaagaggccgcagaagctgagaccgccaaagataacggagaggctgaagatcaagaggagaaggaggatgcagaaaaggagaacatagaaaaggatgaagacgatgtagaccaggagcttgccaacattgatccaacgtggatcgaaagcccgaaaacgaatgggcacatcgagaacgggcccttcagccttgaacaacagttggatgacgaagatgacgacgaagaggattgcccgaaccccgaggagtacaacctagacgagcccaacgcggagtcggattacacttatagctccagctacgagcaatttaatggtgaattacccaacgggcggcacaagatcccagaatcacaatttcccgaattttctacatctctcttcagcggttcgctagagccagtagcttgcggatcggtgctgtctgaagggtctccgttgactgagcaggaggagtcaagcccttcccatgaccgatctagaactgtgtccgcctccagcacaggagacttaccaaaagcgaagacacgcgctgccgatctgctggtgaatccactggatcctcgcaacgccgataaaatccgcgttaagatcgccgatcttggaaatgcatgttgggttcacaaacattttacagaagatattcagacccggcaatacagaagcatcgaggtgctcattggcgcaggctatagcacgcccgctgatatatggtcaactgcttgtatggctttcgaactggccaccggtgactacctcttcgagcctcacagcggggaggactacagtagagatgaggaccatattgcacacattatcgagctactgggaagcatcccccggcattttgccctttctggcaagtacagtagagaattcttcaaccgccggggcgagttgaggcatatcaccaagctgaaaccatggagccttttcgatgtgctggttgagaaatacggctggccacatgaggatgctgctcagtttactgacttccttattccgatgctcgagatggtgccagaaaagagggcttccgcaggcgagtgtttacgacacccttggctaaactcctag

SEQ ID NO: 17339 - DNA, 543 bp, synthetic construct
  source 1..543: mol_type = other DNA; note = Synthetic coding sequence
atgccgcgtaagggtactcagccctctactgcccgaagaagagaagaaggaccaccccctccctccccagacggcgcttctagcgatgccgagcccgaacctccatcaggacgtacagagtcaccagcaactgctgccgagacagcatccgaggaacttgataaccgcagccttgaggagatcctcaactccattcctccacctcccccaccggctatgaccaacgaagcaggagctccccgacttatgatcacccatattgtaaatcagaactttaagtcctacgcaggtgagaagattcttgggccctttcataaacgttttagctgcatcattggacccaacgggtcagggaagtccaatgtgatcgatagcatgctgttcgtttttggctacagggcccagaaaataagatctaagaagttgtctgtccttattcacaacagcgacgaacacaaggatatccagtcatgcacggtggaggtccatttccagaagatcattgacaaggagggtgacgactacgaggtgattcctaattag

SEQ ID NO: 17340 - DNA, 4689 bp, synthetic construct
  source 1..4689: mol_type = other DNA; note = Synthetic coding sequence
atgcccggagaagcagcacgtgcagagttgctcctgccggaggccgacaggcccggccctcgcacagacctgagctgtgacgcggccgccgcgacaacgattctgggaggcgataggcgcgagccatgcgctctgacacccggaccctcacaccttgctctcacattcctgccatcgaagcccggggcgcggccacagcctgagggagcatcatgggacgccgggcccgggggtgctcccagcgcctgggccgatccaggagaaggagggccatctcctatgttgctacctgaaggtctaagctctcaggctctgtcgaccgaggcgcctttacccgccacactggagccccgcattgttatgggagaagagacttgtcaagcgctgctgagtccacgggccgccaggaccgcactgcgagaccaggaaggcggacacgcctccccagatccacccccagagctttgctcgcagggagatctatcggtacccagcccaccgcctgacccagattctttcttcacacctccctctacccctacgaagaccacatacgctttgctgcctgcatgcggcccccatggagacgcgcgggacagtgaagccgagcttcgtgacgagcttctggacagccccccggctagtccatcgggttcgtatatcaccgctgacggcgactcctgggcttcttcaccatcttgttccctgtcactgctggctcccgccgagggcctggacttccccagcggctggggactgagtccacagggctccatggtggatgagagggaattgcatccagcgggtacccctgagcccccctctagcgagagttcactcagtgctgatagcagctcctcctggggacaggaaggccatttctttgacttagacttccttgccaacgaccccatgattccggccgcgttactgccttttcagggtagtctcattttccaagttgaggcagtggaggtgacccctctctcccccgaggaggaggaggaagaggcagttgctgaccccgaccctggcggcgatctcgccggagagggggaggaagactcaactagtgcctcatttctccagtccttaagtgatttgtcaataacagagggaatggatgaggcttttgctttccgcgatgacacgagtgctgcttccagtgattccgattctgcttcctatgccgaggccgacgatgaacgcctttactccggagagccccatgcccaagccactcttctgcaggatagtgtgcagaagaccgaggaagaatctggcgggggtgcaaaaggacttcaagctcaggatggaacagtcagttgggctgtggaagcagccccccaaacctcagataggggagcgtatctgtctcagcggcaggaattgatttcagaagtcacagaagaggggctcgcgctgggccaagagagcactgccactgtgacacctcacaccctgcaggttgcccccggattgcaagtggaagtggccacgcgggtgacacctcaagccggagaagaggagactgattcaaccgccggtcaggagagcgccgctatggcgatgccacaaccatcacaggaaggcatctctgagatcctaggccaagaatcagtgactgccgagaagcttcccacaccacaggaggaaacctcattaacgctctgccctgattctcctcaaaaccttaaggaggaagggggactggacctgcccagcggaagaaagccggtagccgcggccaccatagtgccccgacaagctaaggaggatttgacactgcctcaggacagcgctatgacacctcccttaccccttcaggacacagatctatcgtctgcacctaaacccgtcgccgccgcgaccatcgtctcacagcaagccgaggagggactcactttaccgcaggattctgtgatgacaccaccactcccactgcaggacacagagctgtcttcagctcccaaaccagtagccgccgctaccctggtgtcccagcaagccgaagagggccttaccctacctcaggactccgcaatgacacctcccctgcctctgcaagacacagatctgagctccgcccctaagccagtggccgccgcaaccctggtgagtcagcaggctgaagagggcctgacattaccccaggattcagcaatgacaccaccactgcctctgcaagacaccgatctgtcctctgcccctaagcctgtggctgctgcaaccctagtctcccagcaggcagaagaaggccttactctaccccaggattccgcgatgactccacccctgcccctccaagacaccgacttatccagcgcccctaagccggtggctgcggcgaccatcgtgtctcagcaggccgaagaaggtctcacactgccccaagactccgccatgactccccccttgccacttcaagacactgacctgtcctccgctccgaagccagtagcggccgccaccattgtatctcagcaggctgaagaaggccttacattgcctcaagactcagcaatgaccccacctctccctctacaggatactgacctttcgtccgccccaaaaccagttgccgctgccactccagtctctcagcaggctgaggagggcctgaccctcccccaggactccgctatgacaccacccttgccgctccaagataccgacttgtcttccgcaccaaaaccagtggccgccgccacccctgtgagtcagcaggccgaggaaggcttgacactccctcaggacagtgccatgacagctccgttgccactgcaggacacaggacccacgtccggaccagaacccctggcggtggcaacaccgcagaccctccaagcagaagctggctgtgcgcccgggacagaacccgtggctacgatggcacagcaggaggtaggcgaagcgctgggcccacggccagctccggaggaaaagaacgccgctctgcccactgttccggaaccagccgcactggatcaggttcagcaggacgaccctcaacccgcggctgaagctgggacgccatgggcagcccaggaagacgccgactctacattggggatggaggccctctccctgcctgaaccagctagcggagccggcgaagaaattgccgaagctctgtcaagaccagggcgggaggcatgcttggaggccagagcccacacgggtgatggtgccaagccagattccccgcagaaagagaccctggaggtggaaaaccagcaagagggtgggctcaagccgctcgcacaggagcatgggccaaggtccgctctggggggagcaagggaggtgcctgacgctcccccagcggcctgtcccgaggtcagccaggctcgcttattatctcctgccagagaagagagaggattgtccggaaagtccactccagaacctacgttgccctccgcggtcgcaaccgaggcatccctggattcctgccccgagtcaagcgtgggagcggtctcctctctggacagagggtgtcctgatgcccctgctcctacctcagcccccacttcgcagcaacccgaacctgtgttgggactgggaagcgtcgagcagcctcatgaagttcccagtgtgctaggaaccccactccttcaaccccccgaaaacctggcaaaggggcagcccagcacacccgtggatagacctttaggccccgaccctagcgcaccgggcactctggccggagcagccctgccacctctggaaccaccagccccttgtttgtgccaggatcctcaggaggacagtgttgaggatgaagagccaccaggctcactggggctcccaccgccccaggccggggtgcaaccagcagccgcagctgtgtccggcacaactcaacccctcggaacagggcctagagtatcgctaagcccccactctcctctactgagtcctaaggtcgcaagcatggacgccaaggatctcgccctgcaaattctgcctccatgccaggtcccaccaccttctggtcctcagtctccagctgggccacaaggcctgagtgcgcctgaacaacaagaggacgaagacagtctggaagaggatagccccagggcactcggaagcggacagcacagcgacagccacggcgagtcatcagccgagttggacgaacaggacatcctggccccccagacagtgcagtgtcctgcgcaggcgccagccggcggcagtgaagaaacgatcgccaaagctaagcagtctcggtcggaaaaaaaggcgaggaaagccatgtctaagcttggcctgaggcagatacagggcgttactcggattaccattcaaaaaagtaagaacattctgttcgtaattgccaagcccgacgtgtttaaatcgccagcaagcgacacctatgtggtttttggcgaggcgaagatagaggatctcagtcaacaggtccacaaggcagcagccgagaagtttaaggtccccagtgaaccttccgccttagtacctgagtctgctccaagacccagggtgcgactagaatgcaaggaggaagaggaggaagaagaggaagaagtcgacgaggccggactcgaactgagggatatcgagctggttatggcacaagcgaatgttagccgggctaaggctgtaagagcactccgcgacaaccatagtgatatcgtcaatgccattatggaactgacaatgtag

SEQ ID NO: 17341 - DNA, 3294 bp, synthetic construct
  source 1..3294: mol_type = other DNA; note = Synthetic coding sequence
atggcagccgctgctgctgagcagcagcagttctatctgttactcggtaatttgctttccccagacaatgtcgtcagaaaacaggccgaagaaacatacgaaaacatccctgggcaaagcaagattacttttctgctacaggctatcagaaacaccacagccgccgaagaggcaagacaaatggctgccgtgcttctgcggcggctccttagcagcgcctttgacgaagtctatccggcgctcccatctgatgtgcaaactgctatcaaatctgagttactgatgatcattcagatggaaacacagagctcaatgaggaagaaggtgtgcgacatcgcagccgagcttgctcgtaatctgattgatgaagacggaaataatcaatggcctgaaggtctcaaatttctcttcgattctgtgagcagtcagaacgtgggactgagagaagctgcgctccacattttttggaatttccccggtattttcggcaaccagcagcaacattatctcgatgtgatcaagcgtatgctggtacagtgcatgcaagaccaggaacacccttctattagaactctatcagcaagggctaccgcggctttcatcttggcaaacgagcacaatgtggctctgtttaagcactttgctgacctgttaccgggcttcctgcaggcggtcaatgatagttgctaccagaacgatgactcggttctgaagagcttagtggagatcgccgatacagtccccaaatatcttcgaccacacttggaagctactctgcagttgagtctgaaactatgtggcgatactagtctgaacaacatgcaaagacagttggccctggaagtgatcgtgacattatcagagactgccgcagccatgctccgcaaacataccaacatagtcgcacagaccattccgcagatgcttgccatgatggtagacttggaagaggacgaggattgggccaatgccgacgaacttgaggacgacgattttgattctaatgccgtggcaggggagtccgcactggatcggatggcctgtgggctcgggggcaaattggtacttccaatgatcaaagagcatattatgcagatgttacagaatcccgattggaaatataggcatgcagggctgatggcacttagcgctattggtgaaggttgtcaccaacaaatggaagggattctcaatgagattgtgaacttcgtgctgctgttccttcaagacccccacccccgagtacgttacgccgcttgtaatgcagtgggtcagatggccacagactttgccccaggcttccagaagaagttccacgagaaagtgattgctgccctgcttcagaccatggaagaccagggtaaccagcgagtgcaggcgcatgcggctgccgcgctgattaactttactgaagactgtccaaagagcctgctgatcccataccttgataacctcgttaagcatctgcatagtataatggtgttgaaactgcaagagctcatccagaagggcactaagttggtgctcgagcaggttgtcaccagtattgcgtcagtggccgataccgcagaggagaaatttgtgccgtactacgatcttttcatgccatctctgaagcacattgtggagaatgctgtgcagaaagaactcagactcctgcggggcaagacaattgagtgcatctctctgataggattggcagtgggaaaagagaaatttatgcaggatgcctccgacgtgatgcagctactgctgaaaacgcaaaccgatttcaatgatatggaagatgacgacccccaaatctcctatatgatttccgcttgggccagaatgtgtaagattcttggaaaggaattccaacaatacttgcctgtggtgatgggcccactcatgaagacagccagtattaagccagaagttgcgttactggatactcaggacatggagaatatgtccgatgacgatggttgggagttcgtgaatctaggcgatcaacagagtttcggtatcaagactgctggcttagaggaaaagtccaccgcgtgtcagatgctcgtgtgttacgccaaagaattgaaagaaggattcgtggagtatactgaacaagtggtcaagctgatggtgccactcctaaagttctatttccacgatggcgtgagagtggcggcggctgagagcatgccactgctcctcgaatgtgccagggttcgtggcccagaatatctcacgcagatgtggcacttcatgtgcgatgcgctgatcaaggccatcggtactgagcctgatagcgatgtgctttccgaaattatgcatagctttgctaagtgcattgaggtgatgggtgatggctgtctgaataatgagcatttcgaggagctagggggcatattaaaggcaaaactggaagagcattttaaaaatcaagaacttcggcaggtgaaaagacaggacgaagattacgatgagcaggtcgaggaaagcctccaagacgaggatgacaatgatgtgtacattctgacaaaagtgtccgatattctccactctatcttctcttcttacaaggagaaggtgctaccctggttcgagcagctgttgcctttgatcgtgaacctcatatgcccgcataggccctggccggataggcaatggggactatgtattttcgacgacgttatcgaacattgcagcccagctagttttaaatacgccgagtatttcctgcgacctatgcttcaatacgtgtgcgataattcacctgaggttcgccaggccgctgcttacggactcggggtgatggcccagtacggaggagataattacagaccgttctgcacagaggcgttaccactgctcgttcgagtcatacagagcgcggattcgaagacgaaggaaaacgtaaatgcgacagaaaattgtatcagcgctgtcggcaagatcatgaagtttaaacccgattgcgttaacgttgaagaagtcctgccccattggctgagctggctgccactccacgaggataaagaggaggctgtgcagacatttaactacctttgcgatctgatcgagagtaatcaccctattgtgttggggcctaacaataccaacctgccaaagatcttctcgattatcgctgaaggtgagatgcatgaagccattaagcatgaggacccctgtgcaaaacggctggccaacgttgttagacaagtgcagacctctggcggtttgtggactgagtgtatcgcccaacttagccctgagcagcaggccgctatccaagaactcctgaactctgcctag

SEQ ID NO: 17342 - DNA, 1011 bp, synthetic construct
  source 1..1011: mol_type = other DNA; note = Synthetic coding sequence
atgaaggctactgctatgaccagcgcctggctcgcccaggggggtgcacacgtcaccattaacgccagggcggaagaggacgtcgagcctgagtgtatcatggagaaggtggctaaagctagtggtgccaactatagcttccataaggaatctggccgtttccaggacgttggaccacaggccccagttgggtctgtgtatcagaaaactaatgccgtcagtgaaatcaaacgagtgggtaaagactcattttgggccaaggcagaaaaagaggaggaaaaccggcgcctggaggaaaagcgccgagcagaggaggcacaaagacagctggagcaagaacggcgcgaacgcgaactcagagaggcggcaagacgggagcagaggtatcaggaacagggcggcgaagcttctccccagtcaagaacctgggagcaacagcaggaagttgtgagccggaacagaaacgaacaagagtccgcggttcaccctagagagatcttcaagcaaaaggagcgcgccatgtccactacctcaatttccagcccacagccaggaaagctgcgctcgccttttttacaaaaacaactcacccaaccagagacacactttgggagggagccggcggctgctatttcacggccaagagcagacctgccagctgaggaaccagccccttctacacccccctgtcttgtgcaagcggaagaggaagctgtttatgaagagccacccgagcaggagaccttttacgaacagccaccgctggtgcagcagcagggggcgggatccgaacacatcgaccatcacatacaggggcaaggactgtcaggccagggattatgcgcacgagccctgtacgactaccaggctgcagacgatacagaaatatcctttgaccccgagaacctcatcactggcatcgaagtgatagacgagggttggtggcgggggtacggcccggatggacattttgggatgttccctgctaattacgtcgagctgattgagtag

SEQ ID NO: 17343 - DNA, 78 bp, synthetic construct
  source 1..78: mol_type = other DNA; note = Synthetic coding sequence
atgtggatgcacgttgcaaaggttcaccccaaagggggggagatggtgggagctatacgtaatgccgcctttctgtag

SEQ ID NO: 17344 - DNA, 312 bp, synthetic construct
  source 1..312: mol_type = other DNA; note = Synthetic coding sequence
atggccgagctgatacagaagaagttacaaggagaggtggagaagtatcaacagctgcagaaagatctatcaaaatccatgtcaggccgccagaagttggaggcccagctaacagaaaataacattgtcaaggaggaactagccctcttagacggaagcaacgtcgtgtttaaacttctcgggccagttcttgtgaaacaggagctgggtgaagcccgagctactgtgggcaagagactagattacattacagcagaaatttttttgcgtacgatcccagatccaggagacgtgccagattcatttttctag

SEQ ID NO: 17345 - DNA, 4101 bp, synthetic construct
  source 1..4101: mol_type = other DNA; note = Synthetic coding sequence
atggccgataccgatctgttcatggagtgcgaagaagaggagctggaaccgtggcagaagatcagtgatgtaatagaggattctgtggtcgaagactacaacagcgtggacaagaccacaactgccgggaacccactggtgcagcagggtggccaaccccttattctgacgcagaatcctgcacctggcctcggtaccatggttacccagccggttctaaggccagttcaggtgatgcagaacgccaaccacgttacttccagtccagtcgcctcgcagcccattttcattactacccagggatttccagttagaaacgttagaccagtgcagaatgccatgaaccaagtgggaattgtgctgaatgtgcagcagggtcagaccgtcagacctattacgctggtgcccgcaccaggtacacaatttgtaaaacctacagtgggtgtacctcaagtgttctcgcagatgacccctgtacgacctgggagtactatgcctgtccggcctaccacaaacacttttaccactgttattcccgccacgctcacaatcaggagtactgtaccccagtcccagtcacagcaaacgaaatccaccccttcaacatccaccacacctacagcgacacagcccaccagtttaggacaattggctgtgcagtccccaggccagagtaatcagaccacaaaccccaagcttgcaccaagtttcccctctccaccagcagttagcatagcgagcttcgtaactgtaaagcgccccggggtgactggagagaacagtaacgaggttgcgaagttggttaatacacttaatacgattccaagcctcggccagtcacctggcccagtcgtagtttccaataattcgtccgcacacggatcccagcgaacaagcggtcccgagagtagcatgaaagttaccagctcaattcctgtgtttgacttgcaggacggcggccgcaagatctgccctaggtgcaatgcccagttcagagtcaccgaagccctccgcggacacatgtgctactgctgtcctgagatggtcgaataccagaaaaagggcaagagcttagattctgagccaagtgtcccttccgcagccaagcctcctagccccgagaagactgcccccgtcgccagtaccccaagtagcacccctatacccgctctttcccctcctactaaggtgcctgagcctaacgagaacgtgggggatgcagttcaaaccaaactgatcatgctggttgatgacttctattatgggcgagatggggggaaggtggctcagctgacaaacttcccaaaggtcgccacgtctttccgctgtccacactgtactaagaggcttaaaaacaatatacggttcatgaaccacatgaagcaccatgtggagcttgaccaacagaacggggaagtggacggtcacacaatatgccagcattgttacaggcagttcagtacgccttttcagttacagtgccacttagagaacgtgcactccccctacgaatccaccaccaaatgtaaaatctgtgagtgggcctttgaatctgagcccttgttcctccaacacatgaaggacacacacaagcccggtgagatgccgtacgtgtgccagccctactttcctagttatgtgacccaggtgtgtcagtacaggtctagcctttattcagaagtcgatgttcactttagaatgattcacgaagatacccgacaccttctgtgcccctactgcttgaaagttttcaagaacgggaatgcctttcagcaacattacatgcgccatcagaagcggaacgtgtaccattgcaataagtgcagactgcagtttctatttgctaaggataagatcgagcataagctgcaacaccataagacctttcgcaaacccaaacagttggaagggctaaagccaggaactaaggtgaccataagagcctcaagaggccaacctaggacggtcccggttagtagtaatgatactccaccctcagcactgcaggaagcggccccactcacaagttcgatggatccactgcccgtcttcctctatcctcccgtgcagagatccattcaaaagcgggccgtacgcaagatgagcgttatgggtagacaaacctgccttgaatgttctttcgagatccctgactttccaaaccactttccaacttatgtacactgtagcctgtgcaggtattctacgtgttgtagtagggcttacgctaaccatatgataaataaccatgtgccccgtaagtcccccaaatacctggctttgttcaagaactcagtaagtggaatcaaactggcttgtacgtcctgtacatttgtgacgtccgtaggggacgctatggccaaacatctggtgttcaatccatcccatcggtcatcctctatactccctcgaggactcacctggatcgctcattctaggcacggtcaaaccagagatagggtgcacgacaggaatgtgaaaaatatgtaccccccccccagttttcctacgaacaaagcagccaccgtgaaaagcgcaggcgctactcccgcggaacctgaagagctcctgacgccactcgccccagcactgccaagcccagctagtacagcaacgcccccacctacacctactcacccacaggcactcgcccttcccccactcgcaaccgaaggggccgaatgtttgaacgtggacgaccaagacgagggatcccccgtgacgcaagagcctgagctggcatctgggggtggcggctctggtggggtcgggaagaaagaacaactttccgtcaaaaagctgcgggttgtgctcttcgctctgtgttgcaacaccgaacaggcagcagagcacttcagaaatccccagagacggattagacggtggttaagaaggtttcaggcctcccaaggggaaaacttggagggaaagtacctgagcttcgaagctgaggagaaattagccgaatgggtgctcacacagagagagcagcagctgccagtgaacgaagagacactcttccagaaggcaactaaaatcggtcgtagcctggagggaggattcaaaatctcttatgagtgggctgtacggtttatgttgaggcatcacttgacacctcacgccagaagagctgtcgctcatacactgccaaaagacgtcgccgaaaatgcgggactcttcatcgactttgtccagaggcagatccacaatcaggaccttccgctatccatgatagtcgcaattgatgagatcagcttgttcctggacacagaagttctctcctcagacgatcgaaaggaaaatgccctgcagaccgttggcactggagagccttggtgtgatgtggtgctcgcgatcttggctgacggcactgtccttcccacgttagtcttttatcgcggccagatggaccaaccggcgaacatgcctgatagcatcctcctggaggccaaggaaagcggatatagcgacgatgaaatcatggaactgtggtcgacccgagtctggcagaagcacaccgcttgtcagcgctctaagggcatgttggtcatggattgtcatagaacccacctgagcgaagaggtactggccatgctgtccgcatcatctacactgccagctgtggtcccagccggctgctcatccaagattcagcccctggatgtgtgtatcaagcggacagtcaaaaacttcttgcataaaaaatggaaagaacaagcgcgggaaatggcagataccgcatgtgatagtgacgtactcttacagctcgtactcgtgtggcttggcgaggtgctcggtgtaatcggtgactgccctgagttggtgcagcggtcctttctggtcgcctcggttctaccggggccggacggcaatatcaactcacctacaaggaatgccgacatgcaggaggagctcatcgcttccctggaagagcagctgaaattatcaggtgaacactccgagagttccacaccgagacccaggagcagccctgaggagaccattgaacccgaaagcctccatcagttgttcgagggtgaatccgaaaccgagtccttctatggcttcgaagaagctgacctggatctgatggaaatttag

SEQ ID NO: 17346 - DNA, 564 bp, synthetic construct
  source 1..564: mol_type = other DNA; note = Synthetic coding sequence
atggatatctccaagggtctcccagggatgcagggcggtctccacatttggatttcggagaatagaaagatggtgcctgtgcccgagggcgcctacggaaatttttttgaagagcactgctacgtaatactgcacgtgcctcagagcccgaaagccacccagggagcctctagtgaccttcattactgggtaggcaaacaggcaggcgctgaggcgcaaggagctgctgaagccttccagcaacgcctgcaagatgaactgggcggccagacagtcctccaccgggaagcccagggtcacgaatccgactgcttctgctcttattttagaccaggcatcatttaccgcaagggcggacttgcttccgacctgaaacatgttgagacaaatctgtttaacattcaaagacttctccacatcaaagggaggaagcacgttagcgctacagaggtagagttatcttggaattcttttaacaagggcgacattttcctgctagacctgggcaagatgatgattcagtggaatggacccaagacttccatttctgagaaggcacgatag

SEQ ID NO: 17347 - DNA, 1329 bp, synthetic construct
  source 1..1329: mol_type = other DNA; note = Synthetic coding sequence
atgcctctggagaatctggaggaggaagggttgcccaagaacccggaccttcggattgcccagttgaggttcctgctgtctctgccagagcaccggggagacgctgctgtccgcgacgaattgatggctgcggtccgggacaacaacttctggaatcggatacggcaggaacagacagaagactgtccaccgagctccccgtctcgaggctggcactgccaggactggccatcgagaaagcctccgaccagtatccggttatgttttgctaagcccataatcaagaggcacagaatgccttcttatatggccccgtactacgaggcactctgtaagagcctggactggcagatcgacgtcgatctgctcaataaaatgaagaaagccaacgaggatgagctgaagcgcctcgacgaagaactggaggacgcggagaagaatctgggggaaagcgaaatccgcgacgccatgatggccaaggctgaatatttgtgcagaataggtgacaaagagggcgcattaacagccttcaggaagacctacgataaaaccgtggcactgggccataggctggatatagtgttttatctgttacggattgggcttttttacatggacaacgatctgattacccgcaacacagagaaggccaagtcattaatcgaagagggtggtgactgggataggcgaaataggctcaaggtttatcagggcctctattgtgtggcaatccgcgacttcaagcaggcagccgaactattccttgacactgtttctacattcacgagttacgaactgatggactataaaaccttcgtgacctacactgtgtacgtttccatgatcgccctcgaacgcccggacctcagggaaaaagtgattaagggggcagaaatacttgaagtactccacagtcttcccgcagtgcggcagtaccttttttctctttacgaatgtcgatattcagtcttcttccagtcactggcagtagtcgagcaggagatgaaaaaggactggctgtttgctccacattacaggtactatgtcagagagatgcggatccacgcatacagccagctgctcgaatcttaccgctccctgacactgggctacatggccgaggcattcggagtgggcgtggagttcatcgaccaagagctgtcccggtttatcgcagctgggcgtttacattgcaagatcgacaaggtaaacgagatagtggaaacaaatcgacctgatagcaaaaattggcagtaccaggagaccattaaaaagggcgatctcctcctgaatcgagtgcaaaaactgagtcgagtgatcaatatgtag

SEQ ID NO: 17348 - DNA, 333 bp, synthetic construct
  source 1..333: mol_type = other DNA; note = Synthetic coding sequence
atgctgtgctggggtaacgcttcctttggtcagttaggactcggagggatcgatgaggaaatagtgcttgaacctaggaagagcgacttctttataaataagcgggtacgtgacgtaggctgcggtctgcgtcatacagtctttgtacttgatgatggaactgtatacacatgcggttgcaacgatttaggacaactggggcacgagaagagtcgtaagaaacccgagttccgctcatgctttcccggtcgttcagcaatggctccttctcgtctgaccgctacgagtgcaagtcaggtgcaagcgatactccttcctcagccgccagagtag

SEQ ID NO: 17349 - DNA, 930 bp, synthetic construct
  source 1..930: mol_type = other DNA; note = Synthetic coding sequence
atggtctgttggcagtccgtctcagtgtggagtgttgcaggtagggtcgagatgaccgtaagcaaattcatggccattcagaaggccctacaaccagactggtttcagtgcttaagcgatggggaggtcagctgtaaggaagcaacatcaataaagcgggtcaggaaaagtgttgacaggtccctcctttttctggataattgcctgcggctccaggaggagtcagaggttctgcagaagtccgtgattattggcgtaatcgagggaggggatgtaatggaagagcggctacggtccgccagggagaccgctaagagacctgttgggggtttcttgttggatggctttcaggggaatccaaccaccctagaagctagactcaggcttttatcatcggttactgccgagctccccgaggacaaaccacggctgatttccggcgtcagcagacccgacgaggttctggagtgcattgaacgcggagtggacctcttcgagtctttcttcccctaccaggttactgaaaggggctgcgcgctgacgttcagctttgattaccagccgaatcctgaagaaactctcctccagcagaacggtacccaggaagaaattaagtgcatggaccagatcaaaaagatagagacaaccggctgcaatcaggaaatcacgtctttcgagataaacctgaaagaaaaaaaataccaggaagactttaacccattagttaggggttgtagttgttactgttgtaagaatcatacccgggcctacatacaccacctccttgtaaccaatgagctgttagcaggagtgctgttaatgatgcacaatttcgagcactactttggcttcttccattacatccgagaggcactcaagagcgacaaattggcacagcttaaagaacttatccaccgccaggccagctag

SEQ ID NO: 17350 - DNA, 384 bp, synthetic construct
  source 1..384: mol_type = other DNA; note = Synthetic coding sequence
atggtgctaattttaggccgacgcttgaatcgagaagacttaggtgtaagagactccccagccacaaaaagaaaggtttttgagatggatcccaagtctttaacaggacacgagtttttcgacttcagctcgggaagctcccacgctgaaaacatcctgcagatctttaacgagttcagggattcaagactcttcacagatgtaataatttgtgtggaagggaaagagtttccttgccacagggctgtgctgtctgcctgctcctcctacttccgagctatgttctgcaacgaccatcgggaaagtagagagatgcttgtcgagattaatgggattcttgccgaggctatggagtgtttcctccagtacgtctacacaggatag

SEQ ID NO: 17351 - DNA, 1581 bp, synthetic construct
  source 1..1581: mol_type = other DNA; note = Synthetic coding sequence
atggaagaaattcctgcgcaagaagcagcaggttcacctagggtacagtttcagagtctagagacgcagtccgagtgtctgtcccctgagccccagttcgtgcaggacaccgatatggaacagggcttgaccggcggcttcccaataagcaaaccggacggcatctcccaactcgagcaggatcttcaggtgtttgacctggagacaaaaacaagagaagtgctgagggacgactgttccgacggcgagacccgcgaggaaaacaaactcttgatccctaagcagaaaatctccgaggaagttcacagttataaggtccgggtcggccggctaaaacacgacattacccaagtccctgagactcgggaggtgtacaaatcagaggatagactggaacggctgcaggagatcctccgaaaatttctgtatcttgagagggagttccgccagatcaccatctccaaagagacctttacttcagagaagaataacgaatgtcacgaaccagagaaatcattctctctggacagcacaatcgatgccgaccaaagggttctcaggattcagaacaccgacgacaatgacaaatatgatatgtctttcaatcaaaatagcgcatccggcaaacatgagcacttaaatctgactgaagactttcagtcttccgaatgcaaggaatcactgatggatttgagccatttgaacaagtgggaaagcattcctaacaccgagaaaagctataaatgtgatgtctgtggtaagattttccaccagtcctcggcacttacgcgacaccagcggatccacacacgagagaaaccatataaatgtaaggaatgtgaaaagagtttttcccaaagttccagtctttcccggcataagagaatccatacaagagagaagccttacaaatgcgaagcctccgataagagctgtgaggcgtctgataagtcttgctccccatcaagtggtatcatccagcacaaaaaaatccacacacgtgcgaaatcttacaagtgcagttcctgtgagagagtgttcagccgatccgtgcacctgacgcagcatcagaagatacataaagaaatgccttgcaagtgtacagtgtgtgggtctgatttttgccacacttcttatctcctggagcatcaaagagtgcaccatgaggaaaaggcatatgagtatgatgaatatgggctggcctatattaagcagcagggtattcactttagggaaaaaccctatacttgttccgaatgcggaaaagacttccgcctcaatagtcatctgatccaacaccaaagaatccatactggtgaaaaggcacacgagtgcaatgaatgcggaaaggctttctcacagacctcctgcttaatccagcaccataagatgcacagaaaggagaaatcttatgagtgcaacgaatacgaaggcagcttttcccactcctcagacttgatccttcagcaggaagtacttactagacaaaaggcgtttgactgcgatgtgtgggagaagaatagcagccagagggctcatctagtgcagcatcagtccattcataccaaggaaaattcttag

SEQ ID NO: 17352 - DNA, 195 bp, synthetic construct
  source 1..195: mol_type = other DNA; note = Synthetic coding sequence
atgccagaagatcaggtaggaaagctggaagcaactgaaaacacaatctctgcaatggccgccgccgccgcagagcagcaacagttctacctcctcctaggaaatcttctgtcacccgataacgtggtgcggaagcaggcagaagaaacctatgaaaacattcccggccagagtaagatcactttcctcctgtag

SEQ ID NO: 17353 - DNA, 741 bp, synthetic construct
  source 1..741: mol_type = other DNA; note = Synthetic coding sequence
atggctgagcaggaacagcgcaagatccctcttgtgccagaaaatcttcttaagaaacgcaaagcctaccaggcgctgaaggccacgcaagctaagcaagccctcttggcgaaaaaggagcagaaaaagggcaaggggctccggtttaagcgcctggagtcctttctgcacgactcttggcgtcagaagcgtgacaaggtgagacttagacgcctggaggtcaaaccccacgctttggagctgccagataaacacagtttagctttcgtggtgaggatcgaaaggattgacggcgtctctttgttggtgcagcgcacaatcgcaaggctacggttaaaaaagatttttagtggtgtgttcgtgaaagtcacacctcagaatcttaagatgttgaggatagtggagccgtacgtgacctggggtttcccaaacttgaaatcggtgcgtgagctcatcctaaaaaggggccaggcgaaggttaagaacaagaccataccgctgaccgacaacacagtgatcgaagaacacctaggcaagttcggcgtcatctgcctagaggacttgattcacgagatcgcattcccaggcaagcactttcaggagatctcatggtttctgtgcccctttcacctgagcgtcgctcggcacgctacaaagaaccgggtgggttttctgaaggaaatgggaacccccggatatcggggtgagcggataaaccagttgattaggcagctgaattag

SEQ ID NO: 17354 - DNA, 1296 bp, synthetic construct
  source 1..1296: mol_type = other DNA; note = Synthetic coding sequence
atggctgccaacctcagtagaaacggcccagctctgcaggaagcatacgttcgagtggtcacagaaaaatcacccactgattgggctctgtttacctacgagggtaattccaacgacatccgggtagcgggtaccggcgagggtggcttggaggaaatggtagaggagctgaacagcgggaaggtcatgtacgcgttctgtcgggtcaaagatcctaacagcggcctacccaagtttgtgttgattaattggacaggagagggggtcaacgatgtcagaaaaggtgcctgcgcctcacatgtctccactatggcgtcctttttgaaaggggcacacgtcaccataaacgctcgggctgaagaagacgtggagccggagtgcatcatggagaaggtcgctaaagcttctggcgcaaactactcattccacaaagaatctggcagatttcaggacgtgggacctcaagcccccgtggggagcgtataccagaagacaaatgccgtcagcgaaattaagcgggtggggaaagacagcttctgggccaaggccgaaaaggaagaggagaaccggcggcttgaggagaaaaggagagcggaggaagcccagcgccagttggagcaggagaggcgagagagagaattacgggaggctgccagaagggagcaaaggtatcaagagcagggcggtgaggcttctccccagagtagaacgtgggagcagcaacaggaagtcgtgtctagaaatcgtaacgaacaagagtctgccgtgcatcccagagagatctttaagcagaaggaaagagctatgtccactacgagcatatccagcccacaaccaggtaaactgcggtcccccttcctccagaaacagttaactcagccggagacacactttggaagggagccagctgccgctatcagccggcctagagccgacctgcccgcagaggagcctgcaccgagcactcctccgtgcctcgtgcaggctgaggaggaggccgtgtacgaagaacctcctgagcaggagactttttatgaacagccaccattggtacagcagcagggtgcagggagcgagcatatagaccatcacatccagggccagggcctgtctggtcaggggctttgcgcaagggccctgtacgactaccaggcggcagatgataccgagatttctttcgatcctgaaaacttgatcaccggcattgaagtgatcgatgaaggctggtggcggggatatggcccagatgggcatttcggaatgtttccagccaattacgtcgagttgattgaatag

SEQ ID NO: 17355 - DNA, 1854 bp, synthetic construct
  source 1..1854: mol_type = other DNA; note = Synthetic coding sequence
atgattgagaaaatgcagggctcaagaatggatgagcagagatgttcttttccgccacccctgaaaacagaggaggactacattccttatccttccgttcacgaggtgctgggccgcgaggggccttttcctctaatattactgccccaatttggcggttactggatcgaaggaaccaaccatgaaataaccagcatccccgaaacagaacccctccagtcgcccaccaccaaagttaaactcgagtgcaacccaacggcacgcatataccggaagcatttcctcggcaaggaacacttcaattattactcattggacgccgcgctgggacacctggtctttagtttgaagtacgacgtcatcggtgaccaagagcaccttagattactgctcaggaccaagtgtcgaacatatcacgatgtcattcctatttcttgtttgacagagttccctaatgtggtgcagatggccaagctggtgtgcgaagatgtcaatgttgaccgcttctaccccgttctgtaccctaaggcatcacgtctgattgttacgtttgacgaacatgttatatccaataacttcaaattcggagtgatataccagaagcttggacagacttctgaggaggagttattctcaacgaatgaggagagccccgctttcgttgagtttctggaattcctggggcagaaggtaaaactccaagactttaagggcttccgggggggcctagacgtgacccacggccagacaggtacagagtccgtgtattgtaattttaggaataaggagattatgttccacgtgtcaactaaactgccttacactgagggcgatgcccagcagctgcaacggaagaggcatatcgggaacgatatagtagctgtggtgtttcaagatgagaataccccatttgttccagacatgatagcttccaacttcctccacgcatatgtcgtagttcaagcagagggcggggggcccgatggaccgctgtataaggttagcgtgacggcacgcgatgacgtcccattctttgggccccccctgcctgatcccgcggtgtttcggaaaggtcctgagtttcaggaattcctgcttaccaaactgatcaacgcggagtatgcgtgctataaagctgagaagttcgcaaaactggaggaaaggacccgcgccgccctgctggaaacgttgtatgaggaactccacattcactcacaatccatgatgggcctggggggagatgaagataagatggagaacgggagcggtggagggggttttttcgaaagctttaagcgtgttatccgcagccggagccagtcaatggacgcaatgggtttgtccaataagaagccaaatacagtcagcacgtctcactccggatcattcgcacctaacaaccccgacttagccaaggctgcgggaattagcctgctgatccccggaaagagtgcaagccgctttggaagaagaggcagcgcaatcgggattggcaccgttgaggaagtcgtggtccggggcgccgccggctcgggcgggtgcctgcacgctctgttttctgcgaggtcccaggacggcgggcatatcggagacgttgcccccctgccccccggacaggcaccaggtagagccggctggtcaggcggctctagtgatggtactcagcatctcctgtggggcctggtccctgtgcctgaacccgttcctctcacgcggggtttttggccctgcctgggaccttgggatcctggacctgtgccagctaggataagatatccaaaggccctacacccggctgcaaggcctccgataagcccagtgtgcatggagaggcatccctcacctttgccttag

SEQ ID NO: 17356 - DNA, 1224 bp, synthetic construct
  source 1..1224: mol_type = other DNA; note = Synthetic coding sequence
atgggaaacacttcgttcaacgaagtgatggaggcccagctgccgtcacacggaggtccgaaaccatctgccgaaagcgatatgggtacgagacgcgactacattatggctaaatatgtcgagcaccgattcgcgaggagatgcacccctgagccccagcgcttatggaccgcgatctgtaatagggatttactttccgtcctggaagcatttgcaaatggccaggatttcggccagcccctgccaggccccgacgcacaggcaccagaggaactggtcctgcaccttgccgtcaaagtggcaaatcaggctagcctgcctctggtagacttcattatccagaacggagggcatctcgatgccaaagccgcggacggtaataccgcattgcactatgccgccctgtacaatcaacctgattgcctgaagctgttgctgaagggccgagccttagtggggacggtaaacgaggctggagagaccgctctcgacatcgcacgcaagaagcatcacaaagagtgtgaggaactgctggagcaggcccaggcaggcacttttgcatttcccctccacgtggattattcatgggtgatcagcacggaacccggatccgattcggaggaggacgaggaagaaaaacggtgtctgcttaaactcccagcgcaagcccattgggcctcgggtcgccttgacatctctaacaagacttatgagacagtcgcatcactcggagcagccacgcctcagggggaatccgaggactgccctccgccgctgcctgttaagaacagcagccggaccctggttcagggctgcgccaggcatgcctcaggagatcgctcagaggtatctagcttgtctagcgaggctcccgaaacccccgagtccctcggtagcccggcgagcagtagcagcctgatgtctccattagagcccggcgatccctcccaggcaccacccaactccgaagaaggattacgggagcccccagggacgtccagaccaagccttaccagcggaactacaccgagtgaaatgtatcttcctgttagattcagttccgagagcactcgttcgtatcgccggggcgccagaagtcccgaggatggcccttcagctagacaacccctgccccggagaaatgtgcctgtaggcatcaccgagggagatgggtcccgcaccgggagcctgccagcctcatctgtgcaactcttacaggactag

SEQ ID NO: 17357 - DNA, 813 bp, synthetic construct
  source 1..813: mol_type = other DNA; note = Synthetic coding sequence
atggccatggaaatgcgtctgccagtggctcggaagccgctctcagagaggttgggcagagacacaaagaagcaccttgtggttccaggggataccatcaccacagatacagggttcatgcgggggcacggaacttacatgggcgaggaaaagctcatagcttccgtggcggggagtgttgagcgagtcaacaaactgatctgtgttaaagccctcaagacaaggtacataggcgaagtaggggacatcgtggtgggaaggataacagaagtccagcagaagcggtggaaggtggaaactaattcaagattagattctgtgttactgctgtctagcatgaatctccctggaggagaactccgacgccggtccgctgaggatgagttggccatgcgtgggtttctacaggaaggggacctgatttccctggggcagggagtgttggtgcaggtgtcacccagtttagtgaaacgtcaaaaaacacattttcacgacctcccttgcggagcctccgtgattttaggtaataacggcttcatatggatctatccgacacctgagcataaggaagaagaagctggcggcttcatcgcaaacctggagcccgtgtccctcgcagaccgcgaagtcattagtcgtctgaggaattgtataatctctctagtgacacagcggatgatgctgtacgatacaagtatactttattgctatgaggcgagcctgccacaccagattaaagatatcttaaaacccgagataatggaagaaattgtaatggaaacacgccagcgcttgctggagcaggagggatag

SEQ ID NO: 17358 - DNA, 297 bp, synthetic construct
  source 1..297: mol_type = other DNA; note = Synthetic coding sequence
atgcctgaagatcaagtgggtaagttggaagctactgagaacacaatctcagccatggccgcggcagccgctgagcaacagcagttctatctgctgctggggaacctgctatcaccagacaatgtggtgcgcaaacaggctgaagagacgtatgaaaatattccagggcagtcgaagattaccttcctgttgcaggccatccgcaatacaacagcggcagaggaagcgcgacagatggccgccgtgcttcttcgaaggctcctgtcatctgcgtttgatgaggtttaccctgcctag

SEQ ID NO: 17359 - DNA, 306 bp, synthetic construct
  source 1..306: mol_type = other DNA; note = Synthetic coding sequence
atggacgaggtggagcaagatcagcacgaggccaggctgaaagagctgtttgacagcttcgacactactgggaccggcagtcttggacaagaagaactgacagacctgtgtcacatgctgagcttggaggaggtggctccagtcctgcagcagacactcctccaggataatctgctgggccgagtccattttgaccagttcaaggaagctctgattttgatcttatcccgtacactgagcaatgaagaacacttccaggagcctgattgtagtctggaggctcaacccaaatacgtgcgcggctag

SEQ ID NO: 17360 - DNA, 1065 bp, synthetic construct
  source 1..1065: mol_type = other DNA; note = Synthetic coding sequence
atggcccacagccccgtggcagtgcaggtgcccggtatgcagaacaatatcgcagacccagaggagttgtttaccaaattagaaagaattgggaagggtagcttcggcgaagttttcaaaggcatcgacaaccgaactcagcaggtagtggccatcaaaataatagatttggaagaggcagaggacgagatcgaagatattcagcaggagatcacagtcttgagtcagtgtgacagctcgtatgtcacaaaatactatggatcttatcttaaggggagtaagttatggatcatcatggaatatctggggggaggaagcgccctggaccttttacgagctggaccattcgatgaatttcaaatagctaccatgctgaaggagatattgaagggcctggattacctgcacagcgaaaagaagatccaccgagacattaaagcggccaacgtgctgctctcggaacagggagacgtcaagttagcggacttcggagtcgcggggcagctgaccgatactcagataaagcgcaatacgttcgtcgggacaccattctggatggcgcctgaagttatacaacagagcgcctatgactcaaaaaggccgactgcaaaggagcttctgaagcacaagttcattgttaaaaactcgaagaaaacttcatatctgaccgagctgatagataggttcaaaagatggaaagccgaaggacattccgacgacgaatccgattctgagggctcggactctgagtctacttctcgcgagaataacactcatcctgaatggtcgtttaccacggtacgcaagaagcccgaccccaaaaaggtgcagaacggagcagaacaggatttagttcagactctgtcttgtctctcgatgatcatcacacccgcattcgccgagctcaaacagcaagacgagaataacgcgagtaggaaccaggcgatcgaggagctggagaagtctatagccgtcgctgaggcggcgtgcccaggcatcacagataaaatggtgaaaaagctgatcgaaaaattccagaagtgttccgcggacgaaagcccttag

SEQ ID NO: 17361 - DNA, 522 bp, synthetic construct
  source 1..522: mol_type = other DNA; note = Synthetic coding sequence
atgcctcggaaagggacacagccgtccacagctcggcgacgggaagaggggccacctccccccagtcccgatggagctagcagtgatgctgagccggagccccccagcggaaggactgagagccccgccactgccgctgaaaccgcctctgaagaattggataaccggtccctagaagagattctcaattctattccaccaccacctccgccagccatgactaatgaggctggcgcgccgcggcttatgattacacacatcgttaatcagaacttcaagagctacgcaggagagaaaatcctcggaccattccataaaaggttctcttgcatcattggcccgaacggatcgggcaaaagcaacgtgattgatagcatgttatttgttttcggctaccgggcgcagaaaattaggtctaaaaagctttccgttctgattcacaatagtgacgagcacaaggatattcaatcctgtactgtggaggtacacttccagaagatcatcgataaggaaggagactag

SEQ ID NO: 17362 - DNA, 801 bp, synthetic construct
  source 1..801: mol_type = other DNA; note = Synthetic coding sequence
tagcctcgtgccgccgcgagagttagagctgcaggcgaggccctggagaggaggcgccgatggctcggacggctctccccttctgcaccaagaccccgcagagctcgcccctctcttagacgcgcttctgcctgggtacgtgacagggtagccgggcgccctggagctttacctgggtttcaggcctccggcgttgccggagaggcacagaaagccccaggccatcctgccgctcctgcccctgccgcctcatgcctcacggaagctgacgggcgcgtcttcttacatgctttccgcttggcactcatccagctccaaatttcatctataaaaagtgacaacgtgacaagagcttgtagctttatcagggaagccgcaactcagggagccaaaatcgtgtccctgccggaatgctttaactctccctatggagccaagtacttcccagaatatgcagagaagatccccggagagtccacccagaagttgagtgaagttgcgaaggagtgctcaatctatctgataggcggctccatccccgaagaagacgctggtaaactttacaatacatgcgccgtgtttggacctgacggtactctccttgccaagtatagaaaaatacatctcttcgatatagacgtgcctggcaagatcacctttcaagagagcaaaacgctgagtcctggagattccttctctacttttgacaccccctattgtcgagtcggactcggcatttgttatgacatgaggtttgcagagcttgctcagatatatgctcaaagaggcgaagcggtgtag

SEQ ID NO: 17363 - DNA, 216 bp, synthetic construct
  source 1..216: mol_type = other DNA; note = Synthetic coding sequence
atggactctttgcccgatgagttctttgtgcgacaccccgctgtagaggaccagcgtaaagaggaaactgagaacaaactcgagaagtcctcgggccagctgaataagcaggagaatgatattccaaccgacctcgttcccgtgaatctcttactggaggttaagaagctcttgaatgcgatcaacacgctcccaaagggcgtggtgccccattag

SEQ ID NO: 17364 - DNA, 2130 bp, synthetic construct
  source 1..2130: mol_type = other DNA; note = Synthetic coding sequence
atgtcagtggagtcggagcagctaactggcgtcccactcgatgactccgcaattactccaatgtgcgaggtgaccggaggccgctcctactccgtatgcagcccgcgaatgcttaatcaatgccttgagtctctagttcagaaagtccagagtggggtggtgattaactttgagaaggctggacccgacccatcaccagtggaagatggccagcccgacatttcccgaccattcggctcccagccttggcactcatgccacaaactgatatatgttaggccgaatcccaaaacgggcgtgcccatcggccactggccagtccccgagagtttttggccggaccagaactcccccactcttcctcctcggacaagccatcccgtggtgaaattctcatgtactgactgcgagcctatggtcatcgataaattgcccttcgacaaatacgagctcgagccctctccgctaacccagtttattctggagagaaagtccccacaaacatgctggcaggtgtacgtgagtaattctgcgaagtactccgagctgggtcatccttttggctacctcaaggcaagcacagctctcaattgtgtgaaccttttcgtcatgccttacaactaccctgtacttcttccattgttggatgatctgttcaaggtacacaaggccaagccgacactgaagtggcgtcagtcttttgagagctacctgaagacgatgcctccatactatttagggcctctgaaaaaggctgtgaggatgatgggggcgccaaacttaattgccgattcaatggagtacggtctgagctactcagttatttcatacttgaagaagttaagccagcaggccaagatagagagcgaccgggtaatcgggtctgttggaaaaaaggtggtgcaggagacgggaataaaagtacgaagtcggtcccatggccttagcatggcttatcggaaagactttcagcaactgctgcagggcataagcgaggacgtcccgcatcggctgctcgatctgaatatgaaagaatacactggattccaggtggctcttctgaacaaggacctgaaaccacaaaccttccgaaacgcctatgacattccaagaaggaatctgctcgatcaccttacgcgtatgcgaagtaatttgctaaaaagtaccaggcgctttctcaagggccaggacgaagatcaagtccacagcgtgccaatagcgcagatgggcaactaccaagagtaccttaaacaggtcccatccccacttagggaactggacccggatcagccccgacgcctgcacaccttcggcaaccccttcaagctggacaagaagggaatgatgattgatgaggctgacgaattcgtagcagggccccaaaacaaacacaagcgaccaggcgaacccaatatgcagggtattcccaagcgccggcgatgtatgtcaccactcctgcgcggccgccagcagaacccggtggtcaataatcacattggaggaaaaggaccaccagctcctaccactcaagcccagcccgacctaataaaaccgttgccgctacacaaaatttctgagaccactaatgatagcattatccatgatgtggtggagaaccacgtggcggaccagcttagctcagatataactcccaacgccatggacaccgagttctcagcaagttccccagcttcccttctcgagagacctacaaaccacatggaggccctcggccacgaccatctcggcacaaacgatctgaccgtgggcggttttctcgagaatcacgaagaaccgcgcgataaagagcagtgcgccgaggaaaatattcctgcttccagtctgaataaaggcaagaaactgatgcactgccgcagccacgaggaagtcaatactgagctgaaggcccagattatgaaggagatccggaaacctgggaggaagtacgaacggattttcaccttactgaaacacgttcagggtagcctgcagactaggcttatctttctgcagaatgtgataaaggaggcgtcacggttcaaaaaaaggatgctgatcgaacagctggaaaatttcttggatgaaattcaccggcgggccaaccagattaatcatatcaacagcaactag

SEQ ID NO: 17365 - DNA, 387 bp, synthetic construct
  source 1..387: mol_type = other DNA; note = Synthetic coding sequence
atggcttcctccaataccgtgttgatgaggctggtagcttccgcctatagcattgcacagaaagccgggatgattgtgcggcgcgtgatagcagagggcgatctgggtattgtcgaaaagacctgtgccaccgacctgcagacgaaggccgataggctggcccaaatgagtatctgctcgtctctggcccgtaaattcccaaaactgacgatcatcggcgaggaggacctcccgtccgaagaagtggatcaagaattgatcgaagattctcagtgggaggaaatcctgaaacaaccatgtcctagccagtactccgctatcaaggaagaggacttggttgtctgggttgaccctctggatgggactaaagaatataccgaaggttag

SEQ ID NO: 17366 - DNA, 237 bp, synthetic construct
  source 1..237: mol_type = other DNA; note = Synthetic coding sequence
atgagatttatgatgatgagagccgagaattttttcatacttcggcgcaagcctgtggagggctatgatattagcttcttgattacaaattttcacactgagcagatgtacaaacataagcttgtggattttgtcatccactttatggaagaaatcgataaggagatttctgagatgaagctgtctgtgaacgcccgagcaagaatcgttgccgaggagttcctgaagaacttttag

SEQ ID NO: 17367 - DNA, 171 bp, synthetic construct
  source 1..171: mol_type = other DNA; note = Synthetic coding sequence
atggtcatggaaaagccaagccccttgctggtgggcagagagttcgtgaggcagtactacactttactaaacaaagcccctgagtacctgcacagattctacggccgtaattcgagttacgtccatgggggagtggacgcttcagggaaaccacaggaggccgtctactag

SEQ ID NO: 17368 - DNA, 357 bp, synthetic construct
  source 1..357: mol_type = other DNA; note = Synthetic coding sequence
atgaaaatctttgttggcaacgtggatggcgcagataccactccagaggagctggcagccttgttcgctccttacgggactgttatgtcatgtgccgtgatgaagcaattcgcattcgtgcatatgcgagaaaatgctggggcattgagagccatcgaggccctacacgggcacgaacttagacccggacgtgccctggtcgtggaaatgagtcggccacggccattgaacacctggaagatattcgtaggcaacgtatccgccgcctgcacctcccaggagctccgcagcctattcgaaagacggggtcgtgtcattgagtgtgatgtcgtgaagggaggaatgtgtgtagggtag

SEQ ID NO: 17369 - DNA, 438 bp, synthetic construct
  source 1..438: mol_type = other DNA; note = Synthetic coding sequence
atgtcttccccccgggactttagggccgagcccgtgaacgactatgaggggaacgatagcgaggccgaagatctgaattttcgtgagaccctgccaagctcttcccaagagaatacaccccgctctaaggtgtttgagaataaagtcaactctgagaaagtgaaacttagccttagaaattttccacataacgattatgaagacgtcttcgaggagccatctgagagcggatccgacccatccatgtggaccgcacgcggccctttccggagagatcgctggtcgagcgaggacgaggaggccgctggtccatcacaggcactgtcaccattactctcagtccagcaccacggctactccggccctaatgagcggacaaccttttggcatggaagtaacgaaggcgctgtgtcactacttctgagatattgtgcctag

SEQ ID NO: 17370 - DNA, 438 bp, synthetic construct
  source 1..438: mol_type = other DNA; note = Synthetic coding sequence
atgtggactgcgagagggccattcaggcgggaccgatggagctctgaggacgaggaagcagccgggcccagccaggcactgtcccctctactgtcggacacccggaaaatcgtatccgagggcgagctggatcagcttgcgcagatccggcctttgatctttaacttccacgaacagaccgccatcaaggactgccttaagatcttggaggagaaaaccgctgcttatgacattatgcaggagttcatggctctggagcttaaaaacctcccgggcgaatttaactcggggaatcagccaagcaaccgggagaagaatcgctacagagatattctgcctttccagcatcacgggtacagtggcccgaatgaacgcactacgttttggcacgggagtaatgaaggggctgtctcattgctgctgaggtactgcgcctag

SEQ ID NO: 17371 - DNA, 444 bp, synthetic construct
  source 1..444: mol_type = other DNA; note = Synthetic coding sequence
atgtggaagtttcccggggggttgtctgagcccgaggaagacattggggacactgccgtgagagaggtgttcgaggaaaccggcattaagtctgagttccgttccgtgctgtctatccgccagcagcatacgaatcctggagctttcggtaagtccgacatgtacatcatttgtcgactcaagccttactcctttaccatcaatttttgccaggaggagtgcctccgctgtgaatggatggacttgaacgacctggcaaaaaccgagaacactacgcctataacctctagggttgcacggctgttgttgtacgggtacagggaggggtttgacaagatcgatctcactgtagaggaacttcccgccgtttacactgggctgttttataaactatatcacaaagagctccctgagaactacaaaaccatgaagggtatcgactag

SEQ ID NO: 17372 - DNA, 300 bp, synthetic construct
  source 1..300: mol_type = other DNA; note = Synthetic coding sequence
atggatgagtctgctcttctcgatctgctagagtgtcccgtctgcctggaaaggcttgacgcctctgctaaagtgctgccatgtcaacacactttttgcaaaaggtgtttgttggggatagttggctcccgcaacgagctgcgatgccctgagtgcagaacattagtggggtcaggagtcgaagagttgcctagcaacatactgctcgtgagactgcttgatggaatcaaacagagaccctggaagccaggtcccggaggggggagcgggacgaattgcacgaacgctttaaggtcttag

SEQ ID NO: 17373 - DNA, 3675 bp, synthetic construct
  source 1..3675: mol_type = other DNA; note = Synthetic coding sequence
atggccctacggccgggcgcaggcagcgggggtggaggagctgccggcgccggggcgggatccgccggtgggggcggtttcatgttccctgtggctgggggcattagaccccctcaagcgggactgatgccaatgcagcagcaaggtttccccatggtctcagtgatgcagcccaatatgcagggaattatgggcatgaattactcctcgcaaatgtcacaagggcctatcgcaatgcaggccggcatccctatgggcccaatgccagctgccggtatgccctatcttgggcaggctccttttctaggcatgcgcccacccggtccacagtatacacccgatatgcagaaacagttcgcggaggagcaacagaaacgtttcgagcagcagcagaagctcctggaagaggaaagaaaacggcgccagtttgaagaacagaagcagaaattgagacttctgtccagcgttaaacctaaaacaggcgagaaatcgagagatgacgccctggaggcaatcaagggaaaccttgacggtttttcacgagacgccaaaatgcatcctacccccgcaagccaccctaagaaacccggcgtgggagtatttccatcacaggatccagctcaaccaaggatgcccccctggatttataatgagtctctggttcccgatgcctacaagaaaatccttgagactacaatgaccccaaccgggatagacacagctaagttgtatccaatcctcatgtccagcggactcccacgagagactttggggcagatttgggcacttgccaaccggaccaccccaggcaagctaactaaggaggagctgtacactgtgctggctatgatcgccgtcacccagcgcggggtgccagcgatgtctccagatgcccttaatcagttccctgcagccccaatccccaccctctccgggttcagcatgaccctaccgaccccagtgtcccagccaacagtgattcccagtgggccggctggctccatgcccctttcccttggccagccagtgatgggaatcaatttggtgggaccggttggcggagccgctgcgcaggcgtcctccggatttatacctacctacccggcgaatcaagtggtgaagccggaggaggacgatttccaggatttccaagatgcaagcaaaagcggaagcctggacgactcattttccgactttcaggaactcccagcttctagcaagacctccaacagccaacatggtaatagcgctcccagtctccttatgcctttgcctggcaccaaggccctgccgagcatggacaaatacgctgtgtttaagggcatagccgccgacaaatccagcgagaatacagtgcctccgggcgatccaggcgataagtattctgccttccgtgaattagagcagacggcagaaaacaagccgctgggtgaatccttcgctgagttccgctcggcaggcactgatgatggattcacagattttaaaactgctgactcagtgtctccattagagcctcccactaaggacaagaccttccctcccagctttccatcaggcaccattcagcaaaaacaacaaacccaggtaaagaacccccttaacctggctgatcttgacatgtttagctctgtgaactgctcatccgagaaacccctgtccttctcagcagtttttagcactagcaaatcagttagtactccccagtctaccggttctgccgcaacaatgaccgcacttgccgcaaccaagacctctagtctggcagacgacttcggggagttctcattgtttggcgaatattcaggtctcgcacctgtgggggaacaggacgattttgcggactttatggcatttagcaattcgtcgatctcatcagaacaaaagcctgatgacaaatatgacgcccttaaagaagaagcaagtccagtgccattaacatcgaacgtaggatctacggtcaagggaggacagaactccactgcagcatcgacaaaatatgacgtttttagacagctgtccctggaaggttcagggttaggtgtagaagacttgaaagataacaccccgtctggaaaatctgacgacgatttcgcagactttcattcatcaaagttctccagtatcaatagcgataaaagcctcggtgaaaaagctgtggctttcaggcataccaaggaggacagcgctagtgtcaagtccctggaccttccttctataggcggtagctcggtgggaaaagaggacagcgaggatgccctgtcggtgcagtttgacatgaaacttgcagacgtgggcggcgacctcaagcatgtgatgtcggattcaagtctggatctgccgaccgtgtctggccagcacccccccgccgcagacatcgaagatcttaaatatgctgcatttggaagttactcctccaattttgctgtgtctaccttaacgagttatgactggtcagatcgtgacgacgcaacacagggccgtaagctctcccccttcgtcctgagcgcggggtccggatctccgtccgccaccagcatcttgcagaagaaggaaacttcatttggaagcagtgaaaacatcactatgacctccctgtctaaggtcactaccttcgtgagtgaggacgccctgcccgagactacctttccggccctggccagtttcaaggatacaatccctcagacctcagagcagaaagaatatgaaaatcgagattacaaagatttcaccaagcaggacctacccacagctgaacgttcccaggaggctacttgccccagtcccgcatcaagcggcgcctcccaggagactcccaacgagtgttctgacgactttggggagtttcagagcgaaaagcctaagatatccaaattcgacttcttggtagccacctcacagagtaaaatgaaatcaagcgaagaaatgattaaaagcgagctggcaacatttgatctatccgtccagggatctcacaaacgctctctgtccctcggggacaaagagatctcccggtctagcccctcacctgctctggagcagccttttagggaccggtctaataccttgaatgagaagcccgcgctgcctgtgatcagagataaatacaaggaccttaccggcgaggtagaggaaaatgagcgctacgcctatgagtggcagagatgtcttggatctgcgctcaatgtgataaaaaaggctaatgacacccttaacgggatttctagctcatcagtctgcaccgaggtgattcaatctgcccaaggcatggaatacttactgggagtcgtggaggtttatagggtgacaaaacgagtggaactaggaatcaaagctacagccgtctgttccgaaaagctgcagcagctcctgaaggatattgataaggtttggaacaacttgatcggtttcatgtctctcgcaactctaactcccgacgagaactcacttgacttctcctcctgtatgctgcgtcccggcataaagaacgcacaggagctggcgtgcggtgtgtgcctgctcaatgttgattctagatccagggcatttaactctgagaccgattcctttaagctcgcatacggcgggcaccagtatcacgctagttgtgcaaacttctggatcaactgcgtggagcctaaacctcccggtttggtcctgcccgatttgctgtag

SEQ ID NO: 17374 - DNA, 354 bp, synthetic construct
  source 1..354: mol_type = other DNA; note = Synthetic coding sequence
atggtgcaacgcctcacctacagaagacggctctcttacaacactgcgtctaataaaacccgactttccagaacgccaggaaacaggatcgtatatttgtacactaagaaagtgggcaaagctccaaagtctgcctgtggcgtgtgccccggtagacttaggggcgtgcgagccgttcgtcctaaggtgctgatgcgcctctcaaagaccaagaagcacgtatcccgcgcctacgggggctcaatgtgcgccaagtgcgtgcgggatcgcatcaagagggcgtttctgattgaggaacagaaaatcgtcgtgaaggtacttaaggcccaggcccagagtcaaaaagccaaatag

SEQ ID NO: 17375 - DNA, 621 bp, synthetic construct
  source 1..621: mol_type = other DNA; note = Synthetic coding sequence
atgagttctccccgagatttcagggcggagcccgtcaatgactacgaggggaacgacagcgaggccgaagaccttaacttccgtgaaacattacccagctcatcccaggaaaacactccccgatctaaggtttttgagaataaagtgaatagtgagaaagttaaactgtctctccggaactttcctcataacgattacgaggacgtttttgaggaaccttcagagagcggctcagatccgtccatgtggactgcccggggacctttcagacgtgaccggtggagtagcgaggacgaggaagccgcaggcccttcccaggcactgagcccactgctctcagatacacgcaaaattgttagcgaaggggaactcgatcagttagcacagatccgccctcttatattcaactttcacgaacaaacagctataaaggactgcctgaagatacttgaggagaagacagctgcttatgacattatgcaggagtttatgttcaatataatggatatagtggcccagatgagagaacagcggtctgggatggtacagaccaaggagcagtatcacttctgctatgacattgtgctggaggtacttaggaagttgctgaccctcgactag

SEQ ID NO: 17376 - DNA, 582 bp, synthetic construct
  source 1..582: mol_type = other DNA; note = Synthetic coding sequence
atggaggaaactatcaaagaccctcctacttccgcggtcctcttagatcattgccattttagccaagttatctttaactctgttgagaagttctacatccccggcggcgatgttacttgccactacacgtttacccagcatttcatccccagacggaaggattggatcgggatttttagggtgggctggaaaaccacccgcgaatactatacctttatgtgggtgacgctccccattgatttaaataataagagtgctaaacagcaggaggtgcaattcaaggcatattacttgcccaaagatgatgagtactatcagttctgctacgttgatgaggacggggttgtcagaggggcaagcattcctttccagtttcggcctgaaaatgaggaggatattctcgtggtgacaacgcagggggaagtggaggaaatcgagcagcacaacaaagagctctgcaaagagaaccaggaactaaaggactcctgcatatcactgcagaaacagaacagtgacatgcaggccgagttacaaaagaagcaggaagaactggagacactgcagagcataaacaagaagtag

SEQ ID NO: 17377 - DNA, 156 bp, synthetic construct
  source 1..156: mol_type = other DNA; note = Synthetic coding sequence
atggacttcttcagtagccatttattggctgactctagctccccagctacaaacagcagtcataccgatgctcatgaaattctggtgagtgattttttggtttcagatgagaacctccaaaagatggagaatgtcctagacctctggtcttcttag

SEQ ID NO: 17378 - DNA, 513 bp, synthetic construct
  source 1..513: mol_type = other DNA; note = Synthetic coding sequence
atgagtagtaacgagtgcttcaaatgtgggcggtccggacactgggcccgagagtgccccactggcgggggacgagggaggggcatgagatctcgcggtagaggatttcaatttgtgtcctccagtctacccgacatttgctacagatgcggggaatctggtcacttggctaaggactgtgacctgcaggaggatgcgtgctacaactgtggccgaggaggtcacatcgcgaaagattgcaaggaacctaagagagagcgggagcagtgctgttacaattgcggcaaaccaggccatctggcaagggactgcgaccacgcggacgaacagaaatgttattcctgtggagagtttgggcatatccagaaagattgtactaaagttaaatgctaccggtgtggagaaactggacatgtggctatcaactgttctaagacctctgaagtaaactgttatcgctgcggagaaagcggccacctagcgcgggagtgcacaattgaggctaccgcctag

SEQ ID NO: 17379 - DNA, 399 bp, synthetic construct
  source 1..399: mol_type = other DNA; note = Synthetic coding sequence
atgaatcaggaagaccttgatcccgatagcaccaccgacgtcggagacgtgacgaacaccgaggaagaactgatccgtgaatgtgaggaaatgtggaaagacatggaagagtgtcaaaataagctgtcactgatcggaactgaaacgctgaccgattccaacgcacagctcagtctcctgatcatgcaggtgaaatgcctgactgcggagctctcacagtggcaaaagaagacgccagaaacgattccgctgacggaggacgtgctcatcaccctcgggaaggaagaattccaaaagttgcggcaggatctagagatggtcttgagtacaaaggaatccaagaacgagaagctgaaggaggatctggaaagagagcagaggtggcttgacgaacagtag

SEQ ID NO: 17380 - DNA, 1095 bp, synthetic construct
  source 1..1095: mol_type = other DNA; note = Synthetic coding sequence
atggtcaagttgtttataggtaatctccctcgcgaggccaccgaacaagagattcgcagcctgttcgagcaatatggcaaggttttagaatgtgatattattaaaaattacggatttgtgcatatcgaggacaaaaccgctgcagaagacgcgatcagaaacttacaccattataaactccacggagtgaacatcaacgttgaagccagcaaaaataagtccaaaactagtaccaagctacacgtcggcaacatctctcctacatgcacaaataaggaattacgggcgaagtttgaggagtacggtcctgtcatagaatgcgacatcgtgaaggattacgcgttcgtccacatggaaagggctgaggacgcagtggaagctatccgaggcctggataacaccgaattccagggaaagagaatgcatgtgcaactgtctaccagccggctcagaaccgcccctggaatgggggatcaatctggatgctaccgttgcggcaaagagggtcattggagcaaggagtgtccaattgatcggtcgggtagggtcgccgacctcactgagcaatacaatgagcaatacggcgccgtgcgcacaccttatacaatgagctatggcgactctctctactataacaacgcctacggagctctggacgcatattataaaaggtgtcgggcagcgagatcttacgaagctgtggccgctgctgccgcatcagtctacaattatgccgaacagaccctgtcacagctgccacaggtgcaaaacacagctatggcttctcacctgacttccacctcgctggacccgtacgaccggcacttacttccaacttcaggcgccgccgcgacagcggccgcggcggcagccgctgccgcagctgtcaccgccgcaagcacatcatactatggtcgcgatcgaagtcctctgagacgtgcaaccgctcctgtgcccacggtgggcgaaggctatggatacggacacgaatctgaactcagccaggcatcagcggcagctcgcaatagcttatacgatatggctcggtatgaaagagaacagtacgcagacagagcccgctacagtgcattctag

SEQ ID NO: 17381 - DNA, 420 bp, synthetic construct
  source 1..420: mol_type = other DNA; note = Synthetic coding sequence
atggccacaggcgaccttaagcgcagcctacggaatctagaacaggtactaaggttactgaattaccctgaagaggtcgattgcgtaggccttatcaaaggcgaccccgcagcctctctgccaatcatctcctactctttcaccagctactccccatatgtgaccgagctgattatggaaagcaatgtggaactgattgctaagaatgacctgcgcttcattgatgcggtgtataaacttttaagagaccagttcaattataagcctatcctgacaaagaaacaattcatacagtgtggattcgcagagtggaagatccaaatcgtgtgcgacatcctgaattgcgtgatgaagaaacacaaggagctctcatctctgcaaaagattcctagtcagcagcggaaaaagattagcagttag

SEQ ID NO: 17382 - DNA, 450 bp, synthetic construct
  source 1..450: mol_type = other DNA; note = Synthetic coding sequence
atggccaacatcgccgtgcagcggataaaacgggagttcaaggaagtgctgaagtctgaagaggttcgcttcataacaaaaatctggcaccccaacatctcttctgttactggggccatttgtctggacatactgaaggaccaatgggccgcagcgatgacactgcgcacagtgctgctaagcctgcaggctctgctggctgctgccgagcccgacgacccccaggatgcagtggtcgccaaccaatacaaacagaaccccgagatgttcaaacaaacagcgagactctgggctcatgtgtatgcgggggcgcctgtgtcttcccccgagtacacaaaaaaaatcgagaatctgtgcgcgatgggtttcgaccgcaacgccgtcatcgtggctctcagtagtaagtcctgggatgtcgaaacagccacagagctgttattgagcaactag

SEQ ID NO: 17383 - DNA, 597 bp, synthetic construct
  source 1..597: mol_type = other DNA; note = Synthetic coding sequence
atggtgatggaaaagccctcacccctgctggtgggaagggagttcgtgaggcaatattacactctactcaacaaggcaccagagtaccttcatcggttctatggccgaaatagctcatatgtgcacggcggcgtggatgcttccggaaaaccacaggaggctgtttatggccaaaatgatatccaccacaaggtgctctcactgaatttcagcgaatgccacaccaagatccgacatgtcgatgctcatgccactttatccgacggggtggtggtgcaagtgatgggcttgttgtccaatagtggccaacctgagagaaaatttatgcagacgttcgttctggctcctgaaggatcagtgccgaataagttctacgttcacaacgatatgttcagatacgaggatgaagtcttcggggacagtgaaccagaactggatgaagaaagtgaagatgaagtagaggaggagcaagaagaacggcagcccagtcctgagcctgtgcaggagaacgccaatagcggctactacgaagctcacccggtgacaaacggaatagaagagcctctggaggagtcttctcacgagcccgaaccctag

SEQ ID NO: 17384 - DNA, 150 bp, synthetic construct
  source 1..150: mol_type = other DNA; note = Synthetic coding sequence
atgatgctgggcaccgagggaggggagggcttcgtggtgaaggtccgaggactgccgtggagctgcagcgcggatgaggtgcagcgattcttcagtgactgtaagattcagaacggggcacagggtattcgcttcatttatacccggtag

SEQ ID NO: 17385 - DNA, 1266 bp, synthetic construct
  source 1..1266: mol_type = other DNA; note = Synthetic coding sequence
atgatggaagacaataagcagctcgcattacgcatcgacggagcagtgcagagcgcgtcccaagaggtgaccaacctgcgggcagagctgacggcaaccaataggcgcctagcagagctctccggcggaggtggcccaggtcctggtccaggggctgccgcatcagctagcgcggccggcgacagcgccgcgactaacatggaaaacccacagcttggcgcccaagtcctgctcagagaagaagtgagccgcctacaggaggaagttcacctgctgagacaaatgaaagaaatgcttgcgaaagacctggaggaatcccagggaggcaagtcaagcgaggttttaagcgcgaccgaattaagggtgcagcttgctcagaaagagcaggaactcgctcgcgcaaaagaggcccttcaggccatgaaggccgaccgaaaacggcttaagggggaaaaaacagacctagtatcccagatgcagcaactgtacgccaccctggagagcagagaggagcagttgagagattttattcggaactatgaacagcatagaaaagaatccgaagacgcagttaaagcgctggccaaggaaaaagacttgctggaacgggaaaagtgggaactaagacggcaagcaaaggaagccaccgatcatgccaccgctctgagaagccagttggatctcaaagacaataggatgaaagaactcgaagctgagctggctatggcaaaacagtcattggccaccctgaccaaggacgtccctaaacgacactcattggctatgccaggcgagactgtgctgaacggaaatcaagaatgggtagtccaggcggatttacctctgactgctgctatccgccaatcccagcagacgctgtaccactctcatccccctcacccagcggatcggcaggccgtgagggtttccccttgtcatagtaggcagccatccgttatctcggacgcgagcgctgccgaaggagatcgctcctctacaccctctgacattaacagtccaaggcaccgtactcacagcttatgtaacggagattctccaggtccagtgcagaaaaacctgcacaaccctatcgtgcagtccctggaagatttagaggaccagaagagaaagaagaagaaagagaaaatggggttcgggtcgatttctagggtcttcgcccgcggcaagcagagaaagagtcttgaccctgggctctttgatgggaccgcacctgattattacatagaggaagacgcagattggtag

SEQ ID NO: 17386 - DNA, 1173 bp, synthetic construct
  source 1..1173: mol_type = other DNA; note = Synthetic coding sequence
atggccaccggggatcttaaaaggtcccttcgcaatctggagcaggtcctgcgtcttcttaattatccagaagaggtggattgcgtgggcttgatcaaaggagacccggccgccagcctgcccataattagctacagcttcactagttactcaccttacgtgacagaactgataatggagtcaaacgtcgaactgatagcaaagaacgacctccggtttatcgatgccgtgtataaactgctgagagatcaattcaattacaagccaattctgaccaagaagcagttcatccagtgcggcttcgccgaatggaagatacagatcgtgtgtgacatcctgaattgtgtgatgaagaagcacaaggagctcagttcactgcagaaaattccgtcacagcagcgaaagaagatttcttcaggaaagtcagagccgccactaggcaatgagaaaataagcgccgaagccgtgggggtcgatattagcgggaggttcatgacatctggtaagaagaaggcggttgtaatacgccatctatataatgaggacaatgtggatatctccgaagacaccctgtccccgattacggatgtcaatgaggcagtggatgtgtcagacctcaacgcgactgaaatcaaaatgcccgaagtgaaagttccggagataaaggccgaacagcaggacgtgaacgtgaaccctgaaatcactgccttacaaactatgctggctgaatgtcaggagaacctgaagaaactcactagcattgagaagcgactagactgcctcgaacaaaaaatgaaaggaaaggtgatggtagacgaaaatacctggacaaacctgctctccagagtgacgctgctggagaccgaaatgttgctgagtaagaagaacgacgagtttattgagttcaatgaagtaagcgaagactacgccagctgctcagatatggacctgctgaacccgcatagaaaatccgaggttgagaggcctgctagcattccgttgtcttctgggtattcaactgctagctctgattccactccccgcgctagtaccgtgaactattgtgggcttaacgagataagtgaagaaactacaatccaaaagatggagcgcatgaagaagatgtttgaggaaactgctgagttgctgaagtgcccaaaccactacctgtag

SEQ ID NO: 17387 - DNA, 390 bp, synthetic construct
  source 1..390: mol_type = other DNA; note = Synthetic coding sequence
atgaagcgggggcggttgccatcatcgtcggaggactcagacgataacggatccttgtcaaccacttggtctcagaattctaggagtcaacatcggcgaagcagctgctcacgtcacgaggaccgcaagccttcagaggtgttccgtacagacctcattaccgccatgaaactgcatgattcatatcaactgaatcccgacgagtattacgtgcttgcggacccatggagacaggagtgggagaagggcgtccaagtgccagtcagtcccgggacaattccacaacccgttgcccgggtggtgtcagaggagaaatccctaatgttcattcgccctaagaagtatattgtgtctagcggctctgagcctcctgagctgggatatgtctag

SEQ ID NO: 17388 - DNA, 489 bp, synthetic construct
  source 1..489: mol_type = other DNA; note = Synthetic coding sequence
atggacttcttctcgtcccatctgttagcggacagctctagccctgccaccaattcttctcacacagatgcccacgaaatactagttagcgatttcctggtgagcgacgaaaacctgcagaaaatggaaaacgtgctcgatttgtggtcatccggacttaagactaacatcatcagcgaattatcaaaatggcggctgaatttcatcgattggcacagaatggagatgaggaaggaaaaagagaagcacgccgcacatctcaagcaactgtgcaatcagatcaatgaactgaaggagctccagaagactttcgagatctccattgggaggaaagatgaggtgatcagttccctgtcccacgcaataggaaaacaaaaggaaaagattgaactgatgaggaccttcttccattggcgaataggtcacgtcagagcacgccaggacgtctatgagggtaagctggctgatcagtattatcagcggacttag

SEQ ID NO: 17389 - DNA, 411 bp, synthetic construct
  source 1..411: mol_type = other DNA; note = Synthetic coding sequence
atgatcgtaaacgattacgagggcaatgacagcgaggctgaggacttgaactttcgcgaaacgctcccaagtagctcgcaagaaaataccccccggtccaaggtttttgaaaacaaggtgaattccgaaaaagttaaacttagcctccggaattttccccataacgactacgaagatgtctttgaggaaccttccgagagtggatccgatccctctatgtggacggcacgcgggccctttcgtagagatcggtggagcagtgaagacgaggaggccgcaggaccaagccaggccctttcccccttactgagcgtgcaacaccatggatactccggtcccaatgaacgcactacattttggcacgggtcgaacgagggagctgtgagcctccttttgcgatactgtgcttag

SEQ ID NO: 17390 - DNA, 321 bp, synthetic construct
  source 1..321: mol_type = other DNA; note = Synthetic coding sequence
atggcaagtcagctccaggtcttcagtccgccgagcgtttcaagctcagccttctgttccgccaaaaaactcaagattgagccctctggatgggacgtatcgggacagtctagcaacgacaagtactacacacatagcaagacactgccggccacgcaagggcaggccaacagttcccaccaggtcgcaaacttcaacattcctgcctatgaccaaggtctactattacctgctcctgccgtggagcacatcgtggttaccgccgctgattcctccggcagtgcggccaccagcaccttccagtcttcccaaaccctgtag

SEQ ID NO: 17391 - DNA, 411 bp, synthetic construct
  source 1..411: mol_type = other DNA; note = Synthetic coding sequence
atgaagcgcggtcgtcttccaagctcatcagaggactccgacgataacgggtccctgagtactacatggtcacaaaatagcagatcccagcataggcgctcctcgtgttcaagacatgaggaccggaagcctagtgaggtgttcaggacagatctgattacagccatgaagctccacgattcctatcagttgaatcccgacgagtactacgttctcgcagatccctggcggcaagaatgggagaaaggcgtgcaggtccccgtatcacccgggacaatcccgcagcccgtggctagggtcgtgtccgaagaaaaatccctgatgttcattaggcccaagaagtacatagtctcttccgggtccgaaccacctgagctagggtatgtcgacatcagaaccctggcagactag

SEQ ID NO: 17392 - DNA, 396 bp, synthetic construct
  source 1..396: mol_type = other DNA; note = Synthetic coding sequence
atggaggatggcacccctaaacatatcattcagatgaccggatttaagatggaagaaaaggaggctttggttaaactgcttttgaagctggactgcactttcatcaagtctgaaaagtataagaattgtactcacctcatcgcagagcgcctgtgcaagtccgagaagtttctggccgcctgtgccgcaggcaaatggattctcactaaggactacattatccactctgccaagtccgggagatggctggatgagaccacatatgagtggggatataagattgagaaggactcaaggtactccccccagatgcagtctgctcctaagcgctggagagaggagctaaagagaacaggagcccccggggctttccatcgctggaaagtggtcttatag

SEQ ID NO: 17393 - DNA, 1668 bp, synthetic construct
  source 1..1668: mol_type = other DNA; note = Synthetic coding sequence
atgcgccttatcggtatgccaaaagagaaatacgaccctccggaccctcgccggatttacactattatgtccgccgaagaagtcgccaatggaaagaagtcccactgggccgagctggaaatcagtggacgcgtgagatccctgagcactagcctatggtcactgacccacttaaccgctctgcatctgaacgataactacctttcaaggattccaccagacattgctaaactccataacttagtttatcttgacctctcgtctaacaaactaagaagtctacctgccgaactcggaaatatggtatctttgagggagttgctacttaacaataatctacttcgggtgcttccttacgagctgggccgactattccagttacagacgctgggacttaaaggaaatccacttagccaggacatattgaatctctaccaggatccagatggcaccagaaaattgctcaacttcatgttagataatttggcagtccaccctgaacagctccctccaagaccttggatcacactgaaagaaagagatcagattctgccatctgcttcatttactgtgatgtgttataacgttctgtgtgacaaatatgcgactcgccagctgtacggttactgcccaagctgggccttgaactgggagtacagaaaaaagggcattatggaggagattgtaaactgtgacgccgacatcatctccctgcaggaggttgagaccgagcagtattttacactcttcttgcctgccctgaaagagagggggtatgatggttttttctcgcccaaaagtagagcaaaaattatgtccgagcaggagagaaaacatgtcgacggctgtgccatcttttttaagacagagaagtttacgcttgtacagaagcacactgtcgaattcaatcaggtcgctatggcaaactccgatggaagtgaagcaatgctgaacagagtcatgacaaaagacaatatcggcgtggccgtggtattggaagtgcacaaagaactgttcggggcgggaatgaagcctatccatgcggcagacaaacagctgctgatagtcgcaaacgcgcacatgcactgggaccctgagtactccgatgtcaagttgatccaaacaatgatgttcgtatctgaagtgaagaacattctggagaaagccagtagtcgacctgggagtccaaccgcggaccccaattctatcccactggtcctctgcgccgacctgaattctcttcctgattcaggggttgtcgaatatctgtcgaacggcggcgttgctgataaccataaagatttcaaagagctccgctacaacgagtgcttaatgaatttctcttgtaatgggaagaacgggagcagcgaagggcgcatcacacatggattccagctgaaaagtgcttatgaaaataatctgatgccctacaccaattacaccttcgacttcaagggcgtgattgattatatcttctacagtaagacacacatgaacgtcctgggcgtactcggtcccttggacccccagtggctggtggagaacaacatcaccgggtgcccacatccacacatccccagcgatcactttagtctcctgacccagctggaacttcacccccctttgctgccattggttaatggcgtccacttgcccaaccgtcgttag

SEQ ID NO: 17394 - DNA, 1635 bp, synthetic construct
  source 1..1635: mol_type = other DNA; note = Synthetic coding sequence
atgaacacctcaatcccgtaccaacaaaatccgtataatccccgcgggtcgtctaacgtgatccagtgctataggtgtggggacacttgcaaaggagaagtggtccgggtccacaacaaccacttccatattcggtgcttcacttgtcaggtctgcggctgcgggcttgcacagagcgggtttttttttaagaatcaggagtacatatgtactcaggactaccaacagctatacggaactcgttgtgattcctgtcgggacttcattaccggtgaagttatcagtgcccttgggaggacctatcaccctaaatgctttgtgtgttcgctctgcaggaagccctttcctattggggacaaggtcactttttccggcaaagagtgcgtttgccaaacctgtagccagagtatggcatcctctaaaccgatcaagattagaggtccctctcattgcgccggttgcaaagaggagatcaagcacggtcagtccttgctcgccctcgataaacagtggcatgtgtcttgctttaagtgccagacatgctctgttattctgaccggcgaatatattagcaaggacggagtgccttattgcgaatcggactaccacgcgcaattcggcataaaatgcgagacttgcgaccggtacattagtggtcgggtactggaggccggcggaaagcattaccatcccacttgcgctagatgtgtgagatgccaccagatgttcacagaaggtgaagagatgtatttgactggtagcgaggtgtggcaccctatttgcaagcaggcagccagagccgaaaaaaagctgaagcatagaaggacgtccgaaacaagcattagccctcctggctcaagcatcggatctcccaacagggtaatttgtgacatctacgagaacctggatctcaggcagcgtcgagcatccagtccaggatacatcgacagtccaacctactcacggcagggtatgtcacccacattttccagaagccctcatcactactacaggtccggggacttatccactgccacaaaaagcaagacaagcgaagatatcagccagacctcgaaatacagtccgatttacagcccagacccatattacgcatctgagtccgagtactggacttaccacggcagtcctaaagtgcccagagctcggaggttcagcagcggcggcgaagaggatgattttgataggagtatgcacaagttacagtccggcatcggcaggctgattctgaaggaagaaatgaaggctcgcagtagcagctacgctgatccatggactccacccaggtctagtacttcatcccgagaggctctgcacactgccgggtacgaaatgtcactaaatgggagtccccgatcccactacctcgccgactccgatcctctcatcagcaagagcgcctccctgcctgcctacagacggaatggacttcatcgcacaccgagtgccgacctattccactacgactctatgaacgccgtgaattgggggatgcgtgagtataaaatctacccatacgagctattgctggtcaccacacgcgggagaaacaggctgcccaaggatgtggaccgaacccgattggaagggaatttctggaagtctggttgcttgtag

SEQ ID NO: 17395 - DNA, 393 bp, synthetic construct
  source 1..393: mol_type = other DNA; note = Synthetic coding sequence
atgggtcgcctggatggcaaagtcattattctgactgccgccgctcaaggaattgggcaggccgcagccctcgcttttgcaagagaaggcgcgaaggttatcgccacggacattaacgagtccaagcttcaggagctcgaaaagtatcctggcatacagacaagggtgctggatgttactaagaagaaacaaattgatcaattcgcaaacgaagttgagagattagacgtgttattcaatgtcgccggctttgtgcaccacggaaccgttctggattgcgaggagaaggattgggatttctccatgaatcttaacgtgaggagtatgtacctcatgatcaaagcatttctcccaaagatgctcgcacaaaaatccggcaatatcataaattag

SEQ ID NO: 17396 - DNA, 1119 bp, synthetic construct
  source 1..1119: mol_type = other DNA; note = Synthetic coding sequence
atgcagggaccagccggcaacgctagccgaggcttaccaggtggcccgccatccactgtcgccagtggcgctggccgatgtgagagcggagcgttgatgcatagcttcggtatatttctgcaaggcttgctgggtgttgtggccttttcaaccctcatgttaaagaggtttcgggagccaaagcatgagcgacggccttggaggatatggtttttggacacaagtaagcaggccattggaatgctattcattcatttcgcaaacgtctatctcgccgacctgactgaggaggatccgtgtagtctttacctgataaatttcttgctcgatgctacggtcggcatgcttctcatctacgtgggcgtgcgggccgtcagcgtactcgtggagtggcaacaatgggagtccctccgctttggagaatacggagatcccctgcagtgcggggcgtgggtcggccagtgtgccctgtacatcgtgattatgatcttcgagaaatcagtagtatttattgtgctgctgatactgcagtggaaaaaagtcgccctcctgaaccccattgaaaaccccgatctgaagcttgctatcgtgatgcttatcgttcctttcttcgttaacgctctgatgttttgggtggtggataatttcttgatgagaaaaggaaaaaccaaggccaaacttgaagaacgaggcgccaatcaagatagcaggaatggctccaaggtgcgctatcgccgggcagccagccatgaagaatctgaatcagagattctgatctcagccgacgacgaaatggaagagagcgacgtagaggaagaccttcgccgactcactccgctcaaacctgttaaaaagaagaagcaccgcttcggactgcctgcgggcgctcaggaggctccgattaagaaaaaacggcctcccgtcaaagacgaggatcttaaaggcgcacgaggcaacctgactaagaatcaggagatcaaaagcaaaacttatcaggttatgcgagagtgcgagcaagccgggtccgctgccccttctgtgttttcacggactagaaccggcacagaaaccgtgtttgaaaaaccaaaggcgggccctactaagagtgtctttggctag

SEQ ID NO: 17397 - DNA, 507 bp, synthetic construct
  source 1..507: mol_type = other DNA; note = Synthetic coding sequence
atgatgttgggcaccgagggcggagagggctttgtagtgaaagtccgcgggttgccctggtcctgcagcgccgacgaggtccaaagattcttcagcgattgtaaaatacagaatggcgcacagggtatccgtttcatctacacccgcgaggggcggccttccggagaggctttcgtcgagttagaaagcgaagacgaagtgaaactggctttaaagaaggaccgggagacgatgggccataggtacgtggaggtgtttaaatcaaataatgtcgagatggactgggtactgaagcacaccggccctaacagtcctgatacagccaacgacggatttgtgagattaaggggcctcccatttggttgctctaaggaggagatagtccagtttttctctggtttagagatagttcctaacggaatcactctgccagtggatttccaagggcggagcaccggcgaggcatttgtacaatttgctagtcaggaaatcgctgaaaaagcctag

SEQ ID NO: 17398 - skipped

SEQ ID NO: 17399 - DNA, 1131 bp, synthetic construct
  source 1..1131: mol_type = other DNA; note = Synthetic coding sequence
atgacgactgtggtggtgcatgtcgattccaaggcagagctaactacacttttggaacagtgggaaaaggaacacggaagcggccaggacatggtgcccattttgaccagaatgagccaacttatagaaaaggagaccgaggagtaccgcaaaggggacccagaccctttcgacgaccgacaccccgggcgagctgacccagagtgcatgctaggccatctactccggattctgtttaagaatgacgactttatgaacgcactcgtgaatgcatacgttatgactagcagagagcctccacttaacactgcagcctgccgcttgttgctggacatcatgcccggcttggagactgcagtggtgtttcaggagaaggagggcatagtagaaaatctcttcaagtgggcaagagaagcggaccagccattgaggacatattccacggggctgctggggggcgccatggagaatcaggacatcgcagccaattatcgagatgaaaatagccaattagtcgccatcgtgctgcgcaggctgcgcgagttacagctccaagaggtagctctgagacaggaaaacaagaggccttctccacgcaaactgagtagcgaaccactcctgcctcttgacgaggaagccgttgacatggattacggagacatggcagtcgacgtggtggatggagatcaggaggaggcgagcggtgacatggaaatatcttttcacctcgactcaggccacaagactagcagcagggtgaactccactactaaaccagaagatgggggtctgaaaaagaataagtccgccaaacagggagatagagagaattttaggaaggccaaacaaaaacttggtttctcatcgtccgatcctgataggatgttcgtagagctgtctaactcttcttggtcagaaatgtccccttgggtgatcgggaccaactacactctgtatcccatgactcctgccattgaacagaggcttattttacagtatctcactcctttgggcgagtaccaggaactgctgccaatctttatgcaactgggctccagggagttgatgatgttttacattgaccttaagcagacaaacgacgtgcttctgaccttcgaggccttgaagtag

SEQ ID NO: 17400 - DNA, 504 bp, synthetic construct
  source 1..504: mol_type = other DNA; note = Synthetic coding sequence
atgagctctaatgagtgctttaaatgcgggagaagcggccattgggccagggaatgtccaactggggggggacgaggccgcggcatgagatcccgcggaaggggaggatttaccagcgacagggacatttgctacaggtgtggtgaaagtggccacctcgcaaaggattgcgatttgcaggaagatgcgtgctacaattgtggacgaggaggacatattgccaaggactgtaaagagcctaaacgggaaagagagcagtgttgttacaactgtggcaagcctggccatcttgctcgggattgcgaccatgcagacgagcaaaaatgttacagctgtggggagttcgggcacatccagaaggactgtacaaaggtgaagtgctatcgctgcggggagaccgggcacgtggccatcaattgctctaaaacctctgaggtgaactgctacaggtgcggtgaatcagggcacctggctcgtgaatgtaccattgaagctactgcatag

SEQ ID NO: 17401 - DNA, 999 bp, synthetic construct
  source 1..999: mol_type = other DNA; note = Synthetic coding sequence
atgtccgaggcgggagaagagcaacccatggaaacaactggtgctaccgaaaatgggcacgaagccgtccctgagggggagtctcctgcgggcgcgggcacgggtgccgctgcaggtgctggaggggcgaccgccgctcctccctcaggaaatcagaatggggccgagggcgatcagattaatgctagtaagaatgaggaagacgcaggaaaaatgttcgtgggaggtctcagttgggacaccagcaagaaagatctgaaggattacttcactaaattcggcgaggtggtggattgcactattaagatggaccccaatactgggaggtcccgaggatttggattcattctcttcaaagacgctgcctctgtggagaaagtgctagaccagaaagaacacagattggatggcagggtaattgatcccaagaaagccatggccatgaaaaaagatccagtcaagaaaatctttgtgggcggtttaaaccctgaagcaactgaagagaagattcgagaatatttcggagaatttggagagatcgaagctatagaactgccaatggacccaaaacttaataagcggagggggtttgtgttcataacttttaaggaggaggaacctgtaaaaaaggtgctggagaagaagttccatactgtgtcaggaagtaaatgcgagattaaggtagctcagcctaaggaggtctaccagcagcagcaatacggaagcggaggccggggaaatcgtaacagggggaatcggggaagcggtggaggaggcggcggtgggggacagtctcagagttggaatcagggctatggcaattattggaatcagggctacggctatcaacagggctacggcccgggatatggagggtacgattacagtccatatggctactacggatatggcccaggatatgactactctcagggctctaccaactacgggaagagccagagacgcggagggcaccagaacaattataagccatattag

SEQ ID NO: 17402 - DNA, 615 bp, synthetic construct
  source 1..615: mol_type = other DNA; note = Synthetic coding sequence
atgagtgacttaagaattacagaagcgttcctgtacatggattatctctgcttccgggccctctgttgcaaaggaccaccgcctgcaagacccgagtacgatttagtttgtattgggctcacagggagcggaaaaactagccttctgagcaagttgtgtagtgagtcacccgataatgttgtgtccactactggcttttccatcaaggcggtacctttccaaaacgcaattctcaatgtcaaagagcttggaggagctgataatatccgtaaatattggtcacgttactaccagggaagccaaggggtgattttcgtgcttgacagcgcgagttcggaggacgatctagaggcggcacggaacgaactgcactccgcgcttcagcatccccagctttgcacgcttcccttcctcattctggccaaccatcaggataaaccagccgctcgtagcgtccaggaaataaagaagtacttcgagctggagccactggccaggggtaaacgatggatcctgcagccttgttccctggacgacatggacgccctgaaggattcattctcacaactcattaatctcttggaggagaaggatcacgaggccgtgagaatgtag

SEQ ID NO: 17403 - DNA, 6315 bp, synthetic construct
  source 1..6315: mol_type = other DNA; note = Synthetic coding sequence
atggagtctcaggagttcatcgtcctgtatactcatcagaaaatgaaaaagagcaaggtgtggcaggacggaatccttaaaataacccatctgggaaacaaagcaatcctgtatgacgataagggcgcttgccttgagagtctgtttcttaagtgcctcgaggtaaaacccggtgacgacctggagtcagatcggtacctcattacagtggaagaggtgaaagtagctggagctattggaatagttaagcagaacgtcaacaaggaggctcctgaactgaactctcggacattcatcagttcagggcgaagcctgggctgccaaccctctgggctgaagcgcaaattcacgggctttcaggggccaaggcaggttcccaagaaaatggtcattatggaatccggggagagcgccgcctctcatgaggctaaaaaaacagggcctacaatcttctccccattctgcagtatgcccccgctctttccaactgttggaaaaaaagatgttaacaacattctcgccgatccagagaacatcgtgacctataaaaatagggagagaaatgccatggactttagttcagtgttttctccctcctttcagatcaacccagaagttctgtgtgaggagaactatttttgctctccagtgaattcaggaaacaagttgtcagactcactccttactaatgagcccgttaaacgggattccctggccagccactactctggcgtgtcacagaatatcagaagtaaagcacagatcctagctctgttgaaaagcgagagttcctcaagctgtgaagaattaaactccgaaatgaccgagcattttccccaaaaacaacctcagggaagtctgaagattgccaccaagcccaagtatttgatccaacaggaagaatgtgcagagatgaagagtacagaaaacctgtactatcaacatcaaagcgagaacacgatgaggaataagtctagatgggctatgtacctctcctcacagagcagtccgatccatagcagtactgtcgacgggaacgatactgagagaaaaccaaaggctcaggaagatgacgtcaactcaaacctgaaggatctatcccttcagaaaatcatccaattcgtagagacttacgctgaggagagaaaaaagtacaacgtcgatcaatcagtcggaaataacgatccttcttggaatcaagaggtgaagctggaaatcccttcttttaatgagtcctcatcactccaagtaacctgttctagtgccgagaatgatggcattctgtcagaatcggacatccaggaggataacaagattccttttaatcaaaacgataagggatgcatcaaaggttccgtcctgatcaaggagaacgcacaagaggtgaatacgtgtggcactctcgaaaaagagtacgaacagtccgagagctcactccccgagctcaagcacttacagattgaaagttccaataacagtaggatctctgacgatattaccgatatgatctctgagagcaagatggataatgagtccctgaactccattcatgagtctctgtctaacgtgacccagccttttctggaagtgacttttaatttgaacaactttgagaccagtgatactgaagaagagtcccaggaatctaacaagatctcacaggactcagagtcctgggtaaaagatatcctggttaacgatggcaatagctgctttcagaagcggagcgaaaacacgaattgcgaggaaatcgaaggggaacacctacctttcctgacctctgtgtctgataagccaaccgtcacatttccggtgaaggagaccctaccttcccagttttgcgataagacctacgtgggcttcgatatgggcatttgcaagaccgaaaacacgggaaaagaaatagaggagtactccgatactctatccaacttcgagagctttaagtggacggacgctgtctacggcgataacaaggaagacgctaacaaacctatacaggaggtgcgcatcaactacgattttgccctgcctccaaataagtccaagggtatcaacatgaacctgcatatcccccacatccaaaatcaaatcgccgaaaactccaatttgttttctgaagatgcacagccacagccattcatcctaggttccgatcttgataaaaatgacgagcacgtgctgccaagcacctctagctccgacaactccgttcagctcttaaacacaaaccagaatcattacgagtgcatcgctctggacaagtccaatactcatatttcgaattccctcttctatcctctgggcaagaaacacctcatttccaaggacactgaagcgcatatcagcgaacctgaggatctgggaaaaataaggagccctccacccgatcacgtcgaagtggaaactgctagggaggggaagcagtattggaatcccagaaattcttcagaattatcagggttggtgaacactatttccattttgaaatcactgtgtgagcactcaaccgctctggacagcttggagattctcaaaaagaagaatactgtcttccagcagggcacccagcagacttatgagcctgattcgccgcccgaggtgagaaagccattcatcacggtggtgagtccaaaatcgccccacctccacaaagactcccaacagattctgaaggaggatgaggttgagttgtcagaacctctgcaatctgtccagttctcttcctccggcagtaaggaggaaacagcgtttcaagcagtcattcccaagcagatcgaacgaaaaacttgcgaccctaagcccgtggagttccagggtcatcaggtgaaggggagtgccacaagcggcgttatggtgcggggacactcatcccaactcggatgctctcagttccctgactcaactgaatacgaaaacttcatgacggaaactcctgagctgccctctacttgcatgcagatcgatttccttcaagtgactagcccagaagagaatatttccacattgtcacccgtgagtaccttcagcctgaactcgagagatgaggactttatggtggagttcagcgagacttccctcaaagcaaggacactcccggatgacctgcattttttgaatctagagggcatgaagaaaagccgcagtttggaaaatgaaaatctgcaacgcttgagcctgctctccagaacccaggtccctcttattacccttcctagaactgacggtcctccggatttggacagccattcctatatgatcaacagcaatacctatgagtccagcggatcgcccatgctaaatttgtgcgagaaatcggctgtgctgtcctttagtattgagcctgaagatcagaacgaaacattctttagtgaggaaagccgggaagttaatcctggagatgtgtcgctgaacaatatatcaacccagagcaagtggcttaaatatcaaaacacctcccagtgcaacgtcgctactcccaatcgggtcgacaagcgcatcacagatggattctttgccgaggcggtctcagggatgcacttccgcgacacaagcgaacgccagtcagacgctgtgaacgagagctcactggacagcgtgcacctccagatgatcaagggcatgctatatcagcaaaggcaggactttagctcacaagactctgtctcaaggaaaaaggtcttatccctgaacctgaagcagacaagcaaaactgaagagattaaaaatgtcttaggcggatcaacctgttataactactcggtgaaggatctgcaggagatctccggaagtgagctgtgtttcccgtctggccaaaagattaagtctgcataccttccccagaggcagattcatattcccgctgtcttccagtctcctgcccactataaacagacatttacttcatgcttaattgaacacctcaacatccttctgtttggcttggcccaaaacctccagaaggctctgagcaaggttgatattagcttttatacctcattgaagggggaaaagttaaagaacgccgaaaataatgtccctagctgccaccatagccagcctgccaagctcgtgatggttaaaaaggaaggaccgaataaggggcggctcttttatacctgtgacggtcctaaggcggatagatgcaagttctttaaatggttagaggatgtgactccaggctattccacacaagagggggctagacccggcatggtgctgtctgatataaaaagcattgggttgtacctcagatctcagaaaatccccctttacgaggagtgtcagctattggttaggaaaggcttcgactttcagagaaagcagtatgggaaactcaagaagtttaccaccgtgaatcccgagttttataatgaacccaagacgaaactctacttgaaactttctcgtaaagaacgctccagcgcgtacagcaaaaacgacctgtgggtggtgagcaagactctggacttcgagttggatacttttatagcatgctcggccttctttgggcccagctcaattaacgagatcgagattctgccgctgaagggctatttcccctccaactggcccaccaacatggtggttcatgccctgctcgtctgcaacgcatccaccgagctcacaaccctaaagaacatccaggactactttaaccccgccacactgcctctgacgcagtatctgctgactacttcctctcccactatagtctcaaacaagagggtttctaagagaaaattcatccccccagcatttaccaacgtgagtactaagttcgagctcctctcacttggggccacccttaagctggcctcagagctgatacaggttcacaaactgaataaggatcaggcaacagctttgattcagatcgcacagatgatggcctcccacgaaagcattgaggaggtgaaggaactgcaaacacacacctttccaatcacgattattcatggagtttttggggcaggtaaatcctacctgttggccgtggtcatactcttctttgttcagctgtttgaaaagtctgaggctcccacaattgggaacgcccgcccatggaaactgttgatcagtagctccacaaacgtagcagtcgacagagtcttgcttggcttgctgtccttaggctttgagaattttattcgcgtaggcagcgttcgcaagatagccaaacccattctaccgtactctttacatgctggctctgagaatgagtccgaacagctcaaggaattgcatgctttgatgaaagaggatttaacccccacagagcgagtttatgtccgcaagagcattgagcagcataagctgggcacgaatagaactctgctgaaacaagtacgcgtcgttggcgttacctgcgcggcttgtcctttcccatgcatgaatgacctgaaatttccggttgtggtactcgatgagtgtagtcagataactgagcctgcgtccttgctgcctatcgcaaggttcgaatgcgagaaactaatactggtgggagacccaaagcagttaccacccacaattcagggcagcgacgcagcacacgaaaacggccttgagcaaactcttttcgaccgtctttgtcttatgggtcacaagcctattctgctaaggacccagtacaggtgtcatcctgcaatcagcgcaattgcaaatgatttattctacaaaggggccttgatgaacggcgtcaccgagatcgagagaagccctctcctggaatggctcccaaccctctgtttctacaatgtcaaaggtctcgagcagattgaaagggataacagttttcataatgtagccgaagcaactttcaccctgaagctcattcaatctctgatcgcctcagggattgctgggtccatgataggcgtgattactctgtacaagagtcagatgtacaagctgtgccatctgctgtcagccgtggactttcaccaccccgacatcaagaccgttcaggtttccactgtggacgcttttcagggggcagagaaggagatcatcatcctgtcatgtgtgcggacccgccaagtgggcttcattgacagcgagaaaagaatgaatgttgcgctgacccgaggaaagcggcacctccttattgtcggcaacctggcttgtctgaggaaaaatcaactgtggggccgggtgattcagcactgcgaaggaagagaggatggtctgcagcacgcgaatcagtacgagcctcaactgaaccacctgcttaaagactactttgaaaaacaggtggaagagaagcagaaaaagaaaagtgaaaaggaaaaaagcaaagataagtcccattcttag

SEQ ID NO: 17404 - DNA, 567 bp, synthetic construct
  source 1..567: mol_type = other DNA; note = Synthetic coding sequence
atggccgcgactgctcgtgaggatggtgcatctgggcaggaaagagggcagcgcggctgcgaacattatgaccgcggttgtcttcttaaagctccatgctgtgataagctgtacacctgccggctctgccatgataataatgaggaccatcaactcgaccggtttaaagttaaggaggtccaatgtatcaactgcgaaaaaatccagcacgcccagcaaacctgtgaggagtgttctacactgttcggcgagtactattgcgacatatgccatttatttgataaggacaagaagcagtaccattgtgagaattgtggtatttgtaggatcggacctaaagaggattttttccattgcctgaagtgcaatctctgtctcgcaatgaatctgcaagggcggcataaatgcatagaaaacgtttcccgacagaactgccccatctgcctcgaagatattcacacctcccgagtagtggcccacgtgctaccctgtggtcacctgttgcaccggacgtgctatgaggaaatgttgaaggagtacgaccaggttctcgagactgcaggctag

SEQ ID NO: 17405 - DNA, 339 bp, synthetic construct
  source 1..339: mol_type = other DNA; note = Synthetic coding sequence
atggcaaccggggacctcaagcggtctctacgaaatttagagcaagtactgcgtcttctgaattatccagaagaggtggactgtgtcggactgattaaaggtgatcccgctgccagtctccccattatatcctacagtttcaccagctactcaccgtacgtcactgagctgatcatggagtccaatgtcgaactcattgccaaaaacgatctccgattcatcgacgccgtgtacaagcttttgcgcgatcaatttaactacaagcctattctgacaaagaagcagttcattcaatgcggattcgcggagtggaaaatacagatcgtatgcgatatctag

SEQ ID NO: 17406 - DNA, 363 bp, synthetic construct
  source 1..363: mol_type = other DNA; note = Synthetic coding sequence
atgtggaaggtggtgaacctcccaactgacctgttcaacagcgttatgaatgttggaaggtttactgaggaaatcgaatggctgaaatttctcgcactagcctgttcagcactgggcgtgacaattacaaagaccctgaaaatcgtgtgtgaggttctctcttgcgaccataatgggggactgccacgcattcctttttccacatttcagttcctgtatacatatattgcggaggttgacggagagatctgtgcgagccacgtcagcagaatgctcaactatattgaacaggaggttattggccctgacggtttgataacagtaaatgacttcacccaaaacccacgtgtgtggctggagtag

SEQ ID NO: 17407 - DNA, 2490 bp, synthetic construct
  source 1..2490: mol_type = other DNA; note = Synthetic coding sequence
atggcgaaatataacacgggaggcaaccccaccgaagacgtcagcgtaaactcacgtccattcagggtcacagggcctaactcatcaagtggaattcaggctaggaaaaacttatttaacaatcaaggaaatgcaagcccccccgctggcccctcaaatgtgccgaaatttggttcacccaaacccccagttgccgtgaagccctccagtgaagagaagcctgacaaggagcccaagccaccttttcttaaacctactggcgccggacagcgattcggaaccccggcaagcctgaccacacgcgatccggaggcgaaagttggattcttaaaaccggtcggccccaagcccataaatttgcctaaggaggattctaagccgaccttcccctggccccccggaaataaaccaagcctgcactcagtgaatcaggaccacgaccttaagcctctgggaccaaagtctggaccaacacccccaaccagcgagaatgaacagaagcaggcctttcctaagttgacaggggtgaaagggaaattcatgtccgcgtcacaagacctcgaaccaaaaccactcttcccaaaaccagcctttggccaaaagccccctctgagtactgagaatagtcacgaagacgagtccccaatgaagaatgtatcatcctccaagggcagtccagcccctctgggggtgaggagcaaaagcggtcccttgaagcccgcccgcgaggactcagagaataaggatcatgccggagaaatttcctcactgccttttccaggggtggtcctgaaacccgcggcctcgcgaggtgggccaggattgtcgaagaacggcgaagaaaaaaaggaggaccggaagatcgacgcagccaagaatacctttcagagtaagattaaccaggaggagctggcatcaggaacccccccagcacggttcccgaaagctcccagcaaattgactgtaggaggcccatgggggcaatcccaggaaaaggaaaagggcgataaaaattctgccacccccaaacagaaaccactcccccccctcttcactctcgggcccccaccccccaagcctaaccgcccccctaatgtggatctgacaaaatttcacaaaacttcatcaggcaacagcacttcaaagggccagacgagctatagcaccacttccctgcctcctcccccgccctcacatcccgctagccagcccccattgccagccagccatccctctcagccccctgtacccagcctaccaccacgcaacataaaaccacccttcgatctgaagagcccagtgaacgaggataatcaagatggagtgacacactccgacggagctggaaatctagatgaagagcaggattcagagggcgaaacttacgaagacatcgaggcctctaaggaaagagaaaagaaacgggaaaaggaggagaaaaaaaggttggagctggagaagaaagagcagaaggaaaaagaaaagaaagagcaagaaattaaaaagaagttcaaactgactggtcccatccaggtgatccatcttgcaaaggcctgctgcgatgtgaaaggcggcaagaatgagttatccttcaaacaaggagagcagatcgagataatccggattaccgacaaccccgagggaaaatggctcggcaggaccgctcgtggttcctacggatatataaagaccacagctgtggaaatcgactatgatagccttaagctgaagaaggactccctaggtgctccctcccggccaatagaagatgaccaggaggtgtacgatgacgtggctgaacaagacgacatctcaagtcatagccagagcggctctggggggattttcccacccccccccgatgacgacatctatgatggcattgaagaggaagatgcggacgatggaagcacactgcaggtgcaggagaagtccaacacttggtcttggggtatcttaaagatgttgaagggaaaggacgaccgaaaaaagagcatccgcgagaagcccaaagtgtctgacagcgataacaatgagggatcgtctttcccagctcctcctaagcagctggatatgggagacgaggtgtacgacgacgtggatacaagtgacttcccagtcagcagcgctgaaatgtcccagggaactaacgtgggtaaagctaaaaccgaggagaaagacctcaaaaaactgaagaagcaggagaaagaggaaaaggacttccgcaaaaaattcaagtacgatggagagattcgcgtgctgtattctactaaagtgactacctccatcactagcaagaagtggggtactagggacctccaggtgaagccgggggagagtctcgaggtgatccaaaccacagatgatacgaaggtgctgtgcagaaatgaagaaggaaagtacggctacgtcttacgttcatacctggccgataacgatggcgagatctacgacgacatcgccgacggctgtatctatgataatgactag

SEQ ID NO: 17408 - DNA, 795 bp, synthetic construct
  source 1..795: mol_type = other DNA; note = Synthetic coding sequence
atgccagatagcgcacctgcgatggctgacaagatggatatgagtctcgacgatataattaagctcaaccggagccaaaggggcgggcgcggcggaggccgcggtcgcgggagagcgggaagtcaaggcggcagaggtggtggtgcacaggctgcagcacgggttaaccgcggcggtggtcctattcggaatagacctgcaattgcccgcggagccgccggcggtggcggcaggaatagacctgccccctactcgcggccaaagcaactgcccgataagtggcagcatgacctgtttgattctgggtttggcgggggggccggcgtagagacgggaggaaagttgttggtgtcaaatctcgacttcggtgtgtccgacgccgatattcaagagctctttgcggaatttggaactctaaagaaggccgccgtgcattatgacagatcaggccgctccctgggtaccgctgatgttcatttcgaacggaaagctgacgccctgaaagctatgaagcagtataatggggtgccgttagatggccgccctatgaacatccagctcgtgacctcacagatcgacgcccagagaaggcccgcccagagtgtgaaccgtggtgggatgaccaggaatagaggggctggggggtttggcggggggggcggcacacggaggggcacacgaggaggagcaagaggaagggggagaggggccggccgcaatagtaagcaacagctgtcggcggaggaattagatgcccagctcgatgcctacaatgcccgaatggacacaagctag

SEQ ID NO: 17409 - DNA, 312 bp, synthetic construct
  source 1..312: mol_type = other DNA; note = Synthetic coding sequence
atggccaagcatggcgctgacgagcccagctcccgatccgggagccccgacagagagggcagggccagtgaagatcggagcttgctccaccaaagactggctgttcgggaactgatcgacaccgaagtaagttacctgcatatgctgcagctgtgtgcctctgacatcagatctcgtttacagcagctaccgcagggggacctcgatgtgctgttctcgaatattgatgatattataaaggttaattctcgattcttgcacgacctccaggaaacagcgagcaaggaagaggagcaagttcaactggtgtag

SEQ ID NO: 17410 - DNA, 639 bp, synthetic construct
  source 1..639: mol_type = other DNA; note = Synthetic coding sequence
atgatgctcggcacagaaggaggagaggggttcgtagtaaaagtccgggggctcccctggtcatgttcggcggacgaggtccagaggttcttttccgactgtaagatacagaacggcgcccagggtatcagattcatttatactagagaggggcggccttcgggagaagcctttgttgagttggagagcgaggacgaggtcaaactggcattgaaaaaagatcgcgaaactatgggtcatcgctacgtcgaagtttttaagagcaataacgtggagatggattgggtgctcaagcacacaggacccaattccccagatacagctaatgatggattcgtccggctcagaggcctcccattcgggtgtagcaaggaggagatagttcagttttttagcggcctggagatcgtgcctaacggaatcacgcttcctgtggacttccaaggtagaagcacaggcgaagcctttgtgcaatttgcttctcaggaaattgcagagaaggccctgaagaagcataaagaaagaataggccatagatacattgaaatcttcaagagcagtagagcggaggttcgaacacactatgacccacctcgcaaattaatggcaatgcagcgcccagggccttatgacaggtag

SEQ ID NO: 17411 - DNA, 1020 bp, synthetic construct
  source 1..1020: mol_type = other DNA; note = Synthetic coding sequence
atgtggaccgcacgggggcccttccggcgagacaggtggtcttccgaggacgaggaggcagcaggcccttctcaagctttgtcccctctcctttctgatacgcgcaagattgtgtccgaaggcgagctggaccagctggcacagattcgacctctcatcttcaacttccacgagcagaccgccataaaagattgtcttaagatcttggaagaaaagactgccgcttacgacatcatgcaggagtttatggccctggagctgaagaacctcccgggtgaatttaattccggaaaccagccaagcaatagagagaagaaccgatacagggacattctcccctacgacagtacgagggtgcccctggggaaaagcaaagattacattaatgcatcttatatccggattgttaattgtggcgaagagtatttctacatcgccacccaaggaccgttgttgagtacgattgatgacttctggcaaatggtgctggaaaacaactcaaatgtcattgccatgatcactcgggagatcgagggcggcattatcaaatgctaccactactggcctatctccctgaaaaagcctctggaactgaaacacttcagggtatttttagagaattaccaaattctgcaatacttcatcataaggatgtttcaggtggtagagaaaagtaccggcacaagccactccgttaaacagctgcagttcacaaaatggcccgatcacggaacccctgcatccgccgattcgttcataaaatacatcagatacgcccgcaagtcccacctgaccgggcctatggtggtccattgctccgccggcataggccgaactggggtgtttctgtgcgtggatgtggtgttctgtgccattgtgaagaactgttcatttaatattatggatatcgtggcccagatgagagagcaacgctctggaatggtgcagaccaaagagcagtatcatttctgctatgatattgtgcttgaggtccttagaaagctactaaccctggactag

SEQ ID NO: 17412 - DNA, 3213 bp, synthetic construct
  source 1..3213: mol_type = other DNA; note = Synthetic coding sequence
atggcaggcgcgctccgtcgaggccgggccctcggctcccggccaagtggccctacggtgtcctctcgccgctccccacaatgccccgtggcacaagaagggctgggggcccggtcccggcctcgcgtggccccacggtccctagctaggtgcggtccgtcatcacgactgatgggttggaaaccaagtgaagccaggggacagagccagagtttccaagcgtcagggctgcagccccgcagcctgaaggcggcgcgtcgggcaaccggccggcccgatcggagtagagccgctcgcccaacgatggacccaagcgcccatcggtctagggcagcccccccaaatatggacccggaccctcaggcgggtgtgcaggttggtatgagagtggttagaggagtagattggaagtgggggcagcaggatggcggtgaaggaggggttggaacagttgtagagctaggcagacatgggagtccaagcaccccagatcggaccgtcgtggtccaatgggaccaagggactagaacaaactaccgcgctggataccaaggcgctcacgatcttctcttatacgataatgcccagataggcgttagacacccgaatatcatctgcgactgctgcaagaaacatgggctgagagggatgaggtggaagtgcagagtgtgtcttgattatgatctatgcacacaatgctacatgcataacaaacacgagcttgcccacgcgtttgatcgctacgaaacagctcactctaggcccgtgacactgtcaccccgccaaggactgcctagaatccctctcagggggatttttcagggggccaaagtcgttcgggggcccgactgggagtggggttcacaggatgggggtgaaggcaaaccaggtcgagtggtggacattcgaggttgggatgttgagacagggaggagcgtagccagtgtaacatgggcggacgggacgacaaacgtttatcgcgtgggccacaaaggaaaggtggacctcaagtgtgtgggggaagccgctggtgggttctactataaggaccatttgcctcgactaggcaaaccggcagaactgcagagaagggtctccgcggatagccagccgttccaacatggcgacaaagtgaagtgtctcctggatacggatgtcctccgggaaatgcaggaaggccacggaggctggaacccacgcatggctgagttcatcggtcaaaccggcactgtccatagaatcacagacaggggagatgtgcgcgttcagtttaatcatgagactcgctggacttttcacccgggcgcactgaccaaacaccactcattctgggtcggcgacgtagtccgggttattggcgacctggataccgtgaaaagactgcaggcagggcacggcgaatggaccgacgacatggctcctgcgctgggacgagtggggaaagtcgtaaaagtgtttggggatggtaacttgagggtggcagtggccgggcagaggtggacattcagccccagctgtttggtggcttacagaccggaggaagacgctaatctggatgtagccgagagagccagggagaataagtccagcctgagtgtggcacttgacaagctccgggcacagaaatctgatccggagcatccagggagactcgtagtagaggtggctctggggaacgccgcacgagccctagacctgctcagacgccgtcctgaacaggtcgataccaaaaaccaagggcgtacagcgctgcaggttgctgcttatctcgggcaggtcgaactgatccgactactgctgcaagcgagagctggggtagacctgcctgacgacgaggggaacaccgccctgcattacgccgctttaggcaatcagcctgaagctaccagggtccttctgagtgccgggtgccgggccgacgccatcaattccacccaatccactgcgctccatgtagcagtgcagagaggttttctcgaggtagtgagggctttgtgtgagagaggctgtgatgtaaacctgccggatgcacacagcgacactcctctccacagtgcaattagtgccggtaccggggcctcaggtatcgtggaggttctcactgaggtgccgaacattgatgttacagcaaccaacagccagggcttcaccctgttacaccacgcctctttgaagggccacgcgctagctgtgcgtaagattctcgcgagagccaggcaactggtggatgccaagaaagaggacggattcaccgctctgcatcttgcagccctaaacaatcaccgagaggtggctcaaattctcatcagggaagggaggtgcgacgttaacgtgagaaaccgcaaactacagtctcccctgcatctcgccgttcagcaggcacatgtgggcttagtacctctcttagtggatgctggttgttcagtgaatgctgaggacgaggagggggatacggctctgcacgtcgcactgcagcgccaccagctgctgcccttggtggctgacggcgcaggtggtgaccctggcccactgcagcttttgagtcggctccaggcatcaggtctcccaggaagtgctgagctgactgtgggcgcagctgttgcttgctttcttgcactcgagggcgccgatgtgtcgtatacaaatcaccgtgggagaagtcccctggacttagctgccgaaggacgcgtactaaaggcactccagggatgcgcacagcgtttcagagagagacaggcaggggggggggctgcccctggtccgcgacagacccttggcactcctaatacagtcacgaatctacacgttggcgccgcccctggtcctgaggccgcagaatgcttggtctgctcagaactcgcactcctcgtcttgttctccccgtgtcagcaccgcactgtatgtgaagaatgcgcacggagaatgaaaaagtgcattcgctgccaggtggtggtgagcaagaagctgcgtcctgatggatcggaagttgctagtgcggctcctgcaccaggccctcctcgtcagctggtggaggagctgcaaagccgatacaggcagatggaagaacgaattacatgtccaatctgcattgattcacacatacgcctggttttccagtgtgggcacggggcgtgtgccccgtgtggcagtgccctgtcagcttgtcccatttgccggcaacctatccgcgaccgaatccaaatttttgtatag

SEQ ID NO: 17413 - DNA, 957 bp, synthetic construct
  source 1..957: mol_type = other DNA; note = Synthetic coding sequence
atgtgtcgcactgccctgggggttaccacccttcaagaccttggagtttgctggcgaaaggagcatgatcccgcagagatgctcagagtgggcagagcagagttaggcgggtggaagccctcatgggaagcaatagtgaaggaagtcgccgcagcgactggtcacacagtggtgctggtagaccagaccgaggacatcctggctaaatcaaagaaaggaatcgaggaaagtttgagaaaggtagcaaaaaagaagttcgctgagaatctgaaagcaggcgatgaatttgtagagaaaacattatccaccatcgccaccagcactgatgccgcctcagttgtacacagcacagatttggtggttgaagctatcgtcgagaaccttaaagtgaagaacgagctattcaaacggctggataagttcgcggctgagcacacaatattcgcgtccaataccagttctttgcaaattacaagtatcgctaacgccacgactcgccaggaccgcttcgcggggctgcacttcttcaaccccgtccccgtcatgaagttagtggaagtcatcaaaacccccatgacctcccagaagaccttcgagagcctcgtggatttcagcaaggcactcgggaagcacccagtctcctgcaaagacacaccaggattcattgtgaatagactgctggtgccttacttgatggaggccattagactctacgagcgcggggacgcatcaaaagaggacatcgacacagcaatgaagcttggcgcgggctatcccatgggaccatttgagcttttggactacgtcggcttggacaccaccaaattcatcgtggatggctggcatgaaatggacgctgagaatcctctgcaccagccctccccatcattaaacaagctggtggctgagaataagttcggaaaaaaaacgggagaaggtttctacaaatacaaatag

SEQ ID NO: 17414 - DNA, 1044 bp, synthetic construct
  source 1..1044: mol_type = other DNA; note = Synthetic coding sequence
atgaagcttaccagcgaaaagctgcctaaaaatccgttctatgcctcagtgtctcaatatgctgccaaaaaccaaaagttttttcagtggaaaaaggaaaaaactgactatacacacgccaatctggtggacaaggctcttcaactgctgaaagagcggatactgaaaggcgacactctcgcctatttcttgagaggacagctgtatttcgaagaagggtggtacgaagaggcactcgaacagtttgaagaaattaaggagaaagatcaccaggccacctaccaattgggcgttatgtattacgacggtctcgggactaccctggacgctgagaaaggggtggactacatgaaaaaaattttagatagtccatgccccaaagcccggcatttgaaattcgctgctgcatacaatttgggacgcgcttattatgaaggaaaaggcgtgaaaagaagcaacgaggaagctgagcgcctgtggctcatcgccgccgataatgggaaccctaaagcatccgttaaggctcaatcaatgttggggctatattattccaccaaggagcccaaggagctagaaaaggcattttactggcattctgaggcatgcggcaacggcaatctggagtctcagggtgcactgggattaatgtatctctacggtcagggaataagacaggatacagaggctgctttgcagtgccttcgcgaggccgctgaacgtggcaatgtgtacgctcagggaaacctggttgaatattactataagatgaaattctttaccaagtgcgtagccttcagcaagaggatcgctgactacgatgaggttcacgacatcccaatgattgcccaggttacggattgcctcccggaatttatcgggcggggaatggccatggcctctttttaccacgcaaggtgcctgcaactcggcttgggcattacacgagatgagactaccgctaagcactattactctaaagcctgtaggctgaaccctgccttagccgatgaactgcactctcttttaatccgccagcgaatatag

SEQ ID NO: 17415 - DNA, 108 bp, synthetic construct
  source 1..108: mol_type = other DNA; note = Synthetic coding sequence
atgccccagactttcagcggcggcagaggcttcgagctcgattcaggcagcgatgacatggatccgggacgtcccagacctccacgcgacccggatgagctgcactag

SEQ ID NO: 17416 - DNA, 1179 bp, synthetic construct
  source 1..1179: mol_type = other DNA; note = Synthetic coding sequence
atgggcacgacttgcctccacctgggaactttggaacagtcattggtgttcgaaaacaaggtgaactcagaaaaggtgaaattgagccttaggaatttccctcataacgattacgaggacgtgttcgaggagccgtcagagagcggatccgatccaagcatgtggacagcaagaggacctttcagaagagatcgatggtcctccgaagacgaggaagctgccgggcccagtcaagctctgtcccctttgctatctgatacacgtaagatagtatccgaaggcgagctggatcagctggcccagattaggcctctgattttcaatttccatgagcagacggccatcaaagattgtctgaagattttagaggaaaaaaccgcagcctacgacattatgcaagaattcatggccctggagctgaaaaacctgccaggtgagttcaacagcggtaatcagccaagcaaccgcgaaaagaatcgttatcgcgatatcctgccttacgattccacgcgagtccctctcggtaagtctaaggattatatcaacgctagttacattagaatcgttaattgtggcgaggagtatttctacatagctacccaagggcccctgttgtcaactattgacgatttttggcagatggttttggagaataattctaacgttattgccatgataacacgtgaaattgagggaggcatcatcaagtgctatcattattggcccatcagtttaaagaagccacttgagctgaagcatttccgcgttttcctagagaactatcagatattacaatatttcataatcaggatgtttcaggtggtggagaaaagtaccggcacctcccactctgtcaagcagttgcaatttacgaaatggccagaccatgggactccagcttccgccgacagttttataaagtatattcgctacgccaggaagtcccacctaacaggccccatggttgtgcactgttctgctggaattggtagaactggcgtgttcttatgcgtcgatgtggtgttttgcgcgatagtcaagaactgtagctttaatattatggatattgttgctcagatgcgcgagcaacgttccgggatggtgcaaacgaaggaacagtaccatttctgctatgacattgtactcgaagtgctgagaaagttgctgactctggactag

SEQ ID NO: 17417 - DNA, 2052 bp, synthetic construct
  source 1..2052: mol_type = other DNA; note = Synthetic coding sequence
atgaatacttccattccttaccaacaaaacccctacaatccaaggggcagttccaacgtgattcagtgctacagatgtggcgatacatgcaaaggggaagtggtaagggtgcataataatcacttccatatacggtgcttcacctgccaggtgtgcggatgcggcctcgcacaaagtggctttttcttcaaaaaccaggaatacatttgcacccaggactaccaacagctctatgggacccggtgcgactcctgtcgggattttattaccggtgaagtgatcagcgcactaggcagaacctatcatcccaagtgcttcgtgtgctcgctctgccgaaaacccttccctatcggagacaaagtgacattctccggcaaggaatgcgtctgccaaacctgcagtcagtccatggcgtcgtccaaaccgatcaaaatccgggggcctagtcattgcgccggctgcaaagaggaaattaaacacggacaatccttattagccctggacaagcaatggcatgtgtcctgtttcaagtgtcaaacctgttctgtgatcttgaccggagaatacatatcaaaagacggcgtcccatactgcgaatccgactatcatgctcagttcggaatcaagtgcgaaacttgcgatcgctacatatcagggagggtgctggaggcaggcggcaaacattaccaccccacatgtgcaaggtgcgtgcgttgtcaccagatgtttacagagggcgaagaaatgtatctcacagggagtgaagtttggcatcccatctgtaaacaggccgccagagctgagaaaaaacttaagcacaggcggacttctgagacaagcatctctcctcctggaagcagcatcggatctccgaacagggtaatctgtgcaaaagtcgataacgagattctgaactataaggatctggccgccctgcctaaggtaaagtctatctacgaagttcaacggccagatctcatcagttatgaaccccacagccgctatatgagcgacgagatgctcgaaagatgcggttatggggagagcctagggacactgtccccgtatagtcaggatatttacgagaacctggacctcaggcaaagacgagcctcatcccccggctatattgatagtcccacctactctaggcagggaatgtcgcctacattcagccggagtcctcatcactactaccgatctggaccagagtctgggcgtagttcgccataccattctcagctggatgtgaggtcctcaacaccaacgagttatcaagccccaaagcattttcatatccctgctggagactctaacatatacaggaaacccccgatttataagcgccacggcgatctgtctacggctacgaagtccaagaccagcgaggacatctctcagaccagcaaatactcacccatctacagccctgacccctattatgcatccgagagtgagtattggacctatcacggctccccgaaggtgccaagggcccggcgcttctcttcgggcggcgaggaggacgacttcgatcgctcaatgcacaaactgcaatctggaatagggcggctcatactgaaagaggagatgaaagctcggtcatcctcatacgccgacccctggactccaccacgttcctctacatccagcagggaagcgctacacacagctggttatgagatgtctctcaatgggtctccccgatctcattatctggctgactccgatcctcttatttccaaatctgcctcgctgccggcctacagaagaaacggcctgcatcggaccccgagcgcagatctgttccactacgattcaatgaacgcagtcaattggggcatgcgtgagtataagatctacccctatgaactgctactggtcacaacccgcggcaggaacaggctgcccaaagacgtggataggaccagactggagagacacctttcccaggaggagttctatcaggtattcggcatgacaatttcggagttcgatcggctcgctctatggaaaaggaatgagctgaaaaaacaggccaggctattctag

SEQ ID NO: 17418 - DNA, 99 bp, synthetic construct
  source 1..99: mol_type = other DNA; note = Synthetic coding sequence
atggacttcttttcttctcatcttctcgccgattcctcctcacctgccactaattcgagtcacacagacgcacacgaaatcctggtctcagacttctag

SEQ ID NO: 17419 - DNA, 858 bp, synthetic construct
  source 1..858: mol_type = other DNA; note = Synthetic coding sequence
atgagtgaagcaggtgaagagcagccgatggagactactggggcaacagaaaatggacatgaagccgtacccgaaggggagtcgccagcaggtgctgggacaggtgcagcagctggagccggtggtgccaccgctgctcccccttctggtaatcaaaatggcgccgagggtgaccagataaatgcctcaaagaatgaggaggatgcagggaagatgttcgtcggaggcctttcgtgggacacatcaaagaaagatttgaaagattatttcaccaagtttggagaggttgttgattgtacaattaagatggaccctaacacaggtcgaagcagaggtttcggctttatcctattcaaggacgccgcatcagtcgagaaagttcttgaccagaaagaacatagactggacggcagagtgatcgatccgaaaaaagcaatggcaatgaagaaagaccccgtgaagaagatctttgtgggcgggttaaaccctgaagcaacggaggaaaaaatacgagagtattttggcgaatttggcgaaattgaggcaatcgaactgcctatggatcctaaactgaacaagcgtaggggattcgtgttcataacattcaaggaagaggagcccgtgaagaaggtcctcgaaaagaaatttcacaccgttagcggatccaaatgcgaaattaaagtggcgcagcctaaagaggtgtatcaacagcagcagtatggctccggtggcagaggcaatcggaaccgggggaatcgcggttcaggcggcggcggtggcggaggcggccagggtagcacgaattacggtaaatctcagaggcgaggcggtcaccaaaacaactacaagccttattag

SEQ ID NO: 17420 - DNA, 354 bp, synthetic construct
  source 1..354: mol_type = other DNA; note = Synthetic coding sequence
atggtgcaaagacttacatataggaggagattgagctacaacactgcaagcaacaagacccggttatctaggactcctggcaatcggatcgtctacctctatacgaagaaagtgggcaaggcacctaagtcagcctgtggagtttgtccaggccgcctgaggggggtgcgcgcagtccgtcctaaagtgctgatgaggttatcaaaaaccaaaaaacatgtatctagggcgtatggcggctcgatgtgcgccaagtgtgtcagggacagaatcaagcgggcttttctgattgaggaacagaaaatagtggttaaggtattaaaagcccaggcccagtcacagaaagctaagtag

SEQ ID NO: 17421 - DNA, 7614 bp, synthetic construct
  source 1..7614: mol_type = other DNA; note = Synthetic coding sequence
atggaggactttcgaggcattgcggaggaaagctttccgtcattcctgaccaacagcttatttggaaactcagggatactcgagaatgtgacgctttctagtaatctcgggctgccggtggctgtatctaccttggctcgggatcgatcttcaaccgataatcgctaccctgacatccaggcaagttatttggtcgagggaagattttcagtcccgtccggctcctcaccaggcagccagtccgacgctgagcctagggagcgccttcagctgagtttccaggacgatgacagcattagccggaagaagtcttacgtggaaagccagcgattaagcaacgcactatccaaacaaagtgctctccagatggagacagctgggcccgaagaggaacctgccggtgctaccgaaagcctccagggacaggatcttttcaacagggcatcacctctggagcaggcccaggattctcctattgattttcacctgcagtcttggatgaacaacaaggaaccaaagatcgtcgttctggacgccggcaagcattttgaggacaaaacccttaagtccgacctgtcccacaccagcctcctcgaaaatgaaaagctgattctgccaacgtctctggaggactcatccgatgatgacatagacgacgagatgttctacgacgaccacctggaagcctatttcgagcaacttgccatacccgggatgatctatgaggaccttgagggacctgaaccccccgagaagggatttaagctccctacgaatggcctgcgccaagctaacgagaatggcagtctgaattgtaaattccagtctgagaataactcttctctaatcagtcttgattcccatagctcagagaccacccataaggaatccgaagagtctcaggtgatttgtctcccagggacctccaattccattgggacgggcgactcaaggcgttacactgatggcatgttacccttcagcagtggaacttggggtacagagaaggagatagagaacctcaaggggattgtgcccgatctgaatagtgaatgcgcatctaaggacgtcctcgtgaaaaccctgcgagcaatagacgtgaaactgaactcagataattttcacgatgcaaacgctaatcgcggaggattcgacctcacagacccagtaaaacagggtgccgaatgtccccatcagaacaagactgtcctacatatggatggatgccttgatactgagacaccaacagtcagcatacaggaaaatgtcgacgtagcgtctctgaaacctatcagtgattcaggtataaacttcacggatgcaatctggtctcccacttgtgagagacgtacttgcgaatgccacgagtcaattgagaaaaacaaagacaaaacagacctgccacagtcagtggtctatcagaacgaagagggtcggtgggtgactgatctggcctactacacctcattcaatagcaagcaaaatctgaatgtctctctgtctgacgagatgaacgaagactttcgcagcggaagtgaagctttcgaccttatcgcacaggacgaggaagaattcaacaaagaacaccagtttatccaggaagagaacatagatgcccacaatacttccgtagcactcggagatacttcctggggtgccacaatcaactattctctgctcagaaaatcccgtagtacgtctgatctagacaaggatgacgcctcttacctgaggctcagcctgggcgaattctttgcccagcggtctgaagccctggggtgtttgggtggcggaaataacgtgaagcggccctctttcgggtacttcatcagatcccccgagaagagggagccaatcgctttgattaggaagtctgatgtgtccagaggaaatctcgagaaagagatggcgcacctgaatcatgatctgtacagcggagatttgaacgagcaatcacaggcccaactttccgagggttccattacgctacaggtagaagccgttgagtccacctcgcaggtcgatgaaaatgatgtaacacttaccgcagacaaaggtaaaactgaggataccttctttatgagcaacaaaccgcaacggtacaaagataaactccccgacagcggagactccatgctgcgcatcagtacaattgctagtgccatcgctgaagcatctgtgaacactgatcctagtcagctggccgcgatgatcaaggccctaagcaacaagactcgggataagacattccaggaggatgagaagcaaaaagactacagccatgtacgtcactttctcccgaacgatcttgaaaaatcaaacggatcaaacgctctggacatggagaagtacctcaaaaaaacagaggtttctagatatgaatccgctctggagaacttcagcagggcatcaatgagcgatacttgggatctatcattgcctaaggaacagaccactcaagacattcatcccgtagatttgtccgccaccagtgtcagcgttcgagcccccgaggaaaatacggctgccattgtctatgttgaaaacggagaatccgagaatcaagagtcattcaggaccattaacagtagtaactccgtcacgaacagggaaaataactccgccgtggttgacgtaaaaacctgcagtattgacaacaaactccaagatgtggggaacgatgaaaaagccacatctatctcaacaccttccgacagctatagtagtgtgcggaatcctagaattacttctctatgcctgctcaaggactgtgaggagatccgtgacaaccgagaaaaccaacgccagaatgagtgtgtcagcgaaatatcaaacagcgaaaagcacgtgaccttcgaaaaccatcgcattgtgagccccaagaatagcgatctgaaaaacacttcgccagaacatgggggtaggggttcggaggacgagcaagaatcttttaggccttccacctcccctcttagtcactcctcccccagtgagatctctggcaccagcagttccgggtgtgcgctcgagtctttcgggtcagcggcacaacagcagcagcccccctgcgaacaggaattgagcccactggtgtgcagtcccgctggcgtttctagattgacatatgttagtgagccggaatctagctacccaaccacagctactgatgatgccctggaggacaggaaaagcgacattacctccgagctctcaaccaccatcatacaaggtagtccggccgcattggaagagcgagccatggaaaaacttcgagaaaaggtgcccttccagaaccgcgggaaagggacactgtccagcatcattcagaacaactccgacacaagaaaggcaacagagactactagcctatcaagtaaacccgagtatgtgaagcccgattttcgatggagcaaagacccctcatcgaaatccgggaatttgcttgagacctcagaagtcggctggacttcaaaccctgaggagctggacccgatcagattagccctactggggaaaagcggtctgtcttgtcaggtgggaagtgccacctcacatcctgtgagttgtcaagaaccaatcgatgaggaccaacgcatctcccccaaagacaaatctaccgcgggaagagaattttctgggcaggtgagtcaccagactacaagcgagaaccagtgtactccaattcccagcagcacagttcactcaagtgtcgcagacatgcaaaacatgccggcggccgtgcatgcactccttacccagccatctttgagtgctgcacccttcgcccagaggtaccttgggacattgccatccaccgggagcaccacgctgccacagtgtcacgccggtaacgccactgtttgtggatttagtggcggcctcccctatcccgcagtcgccggggaacctgtgcagaacagtgtggctgtgggcatttgcctggggagcaacattgggtccgggtggatgggcacttctagtctgtgtaacccctatagtaacacactgaatcagaatctgctgtctaccactaaaccctttccagtgccttcagtgggtacaaactgcggcatcgaaccttgggattctggggtgacctcggggctcgggtctgtgagagtgcctgaagagctgaaactgcctcacgcatgttgcgttggaatagcgagtcagacactgctgtccgttctcaatcctactgacaggtggcttcaagtcagcattggcgtgctttctatttccgtcaatggtgagaaagtcgacctgtcaacttacagatgccttgtttttaagaacaaggccattattcgacctcatgccaccgaggaaattaaagtgttgtttattccatccagcccgggcgtttttcggtgcaccttttctgtggcaagttggccatgtagcactgacgccgaaactatcgtgcaagctgaggccctggctagcacggtcactttgacagcaatcgccgagtcacccgttatcgaggttgagaccgaaaagaaggacgtactcgactttggcgatctgacatacggcgggtggaaggccttgcccctaaaattgatcaaccggacacatgccacagtccctatccgacttatcattaacgccaatgccgtcgcttggaggtgtttcacctttagcaaagaaagcgtgcgggctcctgtggaggtagctccttgcgctgatgtcgtgacgaggctcgcagggccatccgtggtgaaccacatgatgcccgcctcatatgacggacaagatcctgaattcctcatgatctgggttctgtttcattcccccaaaaagcagattagttctagtgatatcctggattctgccgaggaattctcagccaaagtggacattgaggttgactccccaaatcccacacccgtcctcaggtcagtgagcctgcgcgctagggcaggcattgctaggattcacgccccgagggacctgcaaaccatgcatttcctggcgaaggtggcaagctcacgtaaacagcacctaccactgaagaacgcaggaaatatcgaggtgtacctggacattaaggtgccagagcaagggtcccacttcagcgtggacccaaaaaacctgctgttgaaacccggggaggagcacgaggtgattgtttctttcacgcctaaagacccagaagcctgcgaggagcgtattctgaaaatctttgtgcagccttttggtcctcagtacgaagtggtattaaaaggcgaagttatcagcagcggctcaaaacccctcagtcctgggccatgcctggatattcctagcatcctgtcaaataaacagttcctggcgtggggcggtgttcctctgggccgcacccagctgcaaaagctagctcttagaaacaatagcgcttcgacgacccagcacttgcgtcttttaattcgcggccaggatcaggactgttttcaactacagaatacttttggatctgagcagcgacttacatccaactgtgaaatccggatacatccaaaagaggacatcttcatttccgtcttgtttgcaccaacacgcttgtcatgcatgctcgcacgtctagagattaagcagctaggtaatcgcagtcagcctgggatcaagttcactattcctttgagtggatatggaggcacctctaatttaattctggagggagtgaagaagctgtccgactcgtatatggtgaccgtgaatgggctggttcctggaaaagagtctaagattgtgttcagcgttcgaaacactggatccagagccgcgttcgtcaaggcagttggattcaaggatagccagaaaaaggtcctcctcgatcctaaagtactcaggatcttccctgataaattcgtgctgaaggagcgtacccaggagaatgtaactctgatttataatccaagcgaccgcggcatcaacaacaagacggccactgagctctcaaccgtctacctgtttggcggggatgagatcagtcgccagcaatataggcgagcactgcttcacaagcccgaaatgatcaaacaaatactacccgaacactcagtcctgcagaatatcaactttgtggaggccttccaagatgaactgctcgtgacagaggtgtatgacttgcctcagagacccaacgatgttcagctgttctatggatcaatgtgtaaaatcatccttagtgtgattggcgagttccgagattgcatctctagtcgggagtttctccagccgagctcaaaagcttcgctcgagagcacaagtgatctcggcgcgagtggcaagcacggaggaaacgtgtccctagacgtattaccggtgaagggccctcagggatctccactattgtccagggctgctagacctcccctggaccagcttgccagcgaggagccttggaccgtgttacccgagcacctgatccttgtagctccttcgccctgtgatatggccaaaacaggacgcttccagattgttaataatagcgtgcggcttttgcgcttcgaactctgctggcctgcccactgcctgactgtgactcctcaacatggctgcgtcgccccggagtctaagctccagattcttgtgtcgccgaacagctcactgagcactaagcagtccatgttcccctggtccgggctcatctacattcactgtgacgatggacagaagaagatcgttaaggtacaaatccgcgaggacttaacacaggtggagttactgaccaggctcacctcaaagccatttggaattctatcgcctgttagcgagccgtcggtgtcccacctcgtgaaaccaatgacaaaacctccatcgacaaaagtggaaattcgcaataaatctatcacgtttccgacaaccgaaccgggcgagacgtccgaaagctgcctcgagctggagaaccatgggaccacagacgtcaaatggcatctgagctccctggcaccaccctatgtgaagggagttgatgaatctggggacgtgttccgtgcaacttacgccgcctttaggtgttccccaatttctggtttgttggaaagccatggtattcagaaagtctcaataacctttctgccaagaggaaggggcgactacgcgcagttctgggatgtggaatgtcatccactgaaggagccgcacatgaagcacacgcttcggttccagctgtccggccagtctatcgaagctgagaacgagccggaaaatgcctgcttgagcacagattccctgatcaaaatcgaccacttagtcaaaccacggcgtcaagccgttagcgaggctagcgcaaggatccccgagcagttagatgtgacagcacggggcgtgtacgccccagaggatgtctacaggttccgccccacctccgttggtgagagcagaacacttaaggtgaacctcagaaacaattcattcattacacactcccttaaatttctgtctccgagagaaccattctatgtcaagcatagcaagtactcattacgagcccaacactacatcaatatgccagttcaattcaagccaaagtcagcaggcaagttcgaggcccttttggtgatccaaacggacgaaggcaagtcaattgccatacggttaattggcgaggcacttggaaagaattag

SEQ ID NO: 17422 - DNA, 90 bp, synthetic construct
  source 1..90: mol_type = other DNA; note = Synthetic coding sequence
atgttgtgctggggaaacgctagcttcggacaactcggtctgggaggcatagacgaggagatcgtgttagagccgcgcaagagcgactag

SEQ ID NO: 17423 - DNA, 66 bp, synthetic construct
  source 1..66: mol_type = other DNA; note = Synthetic coding sequence
atggccaagtataacacaggaggaaacccaactgaggatgtcagtgtgaactctagacccttttag

SEQ ID NO: 17424 - DNA, 261 bp, synthetic construct
  source 1..261: mol_type = other DNA; note = Synthetic coding sequence
atggaggctgatatcatcaccaacctacgttgcagactgaaagaagccgaagaggagagacttaaggcagcgcagtacggactgcagctggtggagtcacagaacgagctgcagaaccagctggataagtgccggaatgaaatgatgacaatgacagagtcttacgagcaagaaaagtacacactccagcgggaggtcgagctgaaaagcaggatgctggagtcgctttcctgcgaatgtgaggccatcaaacagcaatag

SEQ ID NO: 17425 - DNA, 1983 bp, synthetic construct
  source 1..1983: mol_type = other DNA; note = Synthetic coding sequence
atggtgacttccttgaatgaagacaacgagtcagtcacagtggaatggatcgaaaacggtgacactaaaggtaaagaaattgacttagagagtattttttccctcaaccctgatctggtccctgacgaagagattgagccatcaccagaaacccctcctccgccagcgagctcagctaaagtgaacaagatagtcaagaaccggcgaacagtcgcctccattaaaaatgatccaccaagtcgtgacaacagagtggtgggcagtgccagagcgcgccccagccagtttccagaacaaagcagcagcgcccagcagaatgcccgccgaaagtctaattgtgtaaaggaggtggaaaaactacaggagaagcgggaaaagaggagactccagcagcaagagctcagggagaagcgtgcccaggacgtagatgctactaaccccaactacgagatcatgtgtatgattcgggatttccgtgggtccctagattaccggccactaaccactgctgaccccatagatgagcatcggatttgcgtgtgcgtgcgtaagcgccctctgaacaaaaaggagacccagatgaaggatctggatgttatcaccatcccttctaaggacgttgtaatggtacatgagcccaagcagaaggtggatctgactcggtatctggaaaaccagacctttcgctttgactatgcattcgatgattctgcccccaatgagatggtctaccggttcaccgctaggcccctcgtggagaccatctttgagagaggcatggctacatgctttgcctatggacagaccggatctggcaaaacacacacaatgggcggcgacttctccggcaaaaaccaggactgttctaaaggcatttacgccctagctgccagggacgtattcctcatgctgaaaaaacccaactataagaagctggaactccaagtctacgccaccttctttgaaatttactcgggaaaggtgttcgatttgcttaacagaaagacgaagctgagagtgttagaggacggcaaacagcaggtccaggtcgtgggactgcaggaaagggaggtcaagtgtgtggaagacgtgttaaaattgatcgatatcgggaactcctgccgcactagcgggcagacaagcgctaatgcgcatagctcccgctcacacgcagtcttccagatcattctacggcggaagggtaaactgcatgggaaattcagtctgattgatttggcaggcaacgagcgcggagcagatacatctagcgccgataggcaaactagactggagggcgccgagatcaataaatccctcctggcgctgaaagagtgtatcagggcgttagggcgcaataaaccacatacgccgtttcgggcttctaaattaactcaagtcctgcgggactcgtttattggagagaacagccgcacctgtatgatcgcaactatcagcccaggcatggcgtcctgtgaaaatacccttaacacactcaggtacgcaaatcgggtgaaagagcttacagtggaccccaccgctgcaggagatgtgaggccaatcatgcaccatcctcccaatcagatagacgacctcgagactcagtggggggtcggatcaagccctcaaagggacgaccttaagctgctctgcgaacaaaatgaggaagaagtgtctccccagctgtttacatttcacgaggcagtcagtcaaatggtcgagatggaagagcaggtggttgaggaccaccgcgccgtattccaggagagcatcaggtggctggaggatgagaaagctctccttgaaatgaccgaggaagtagactacgacgtcgactcgtacgcaactcagctcgaggctatccttgagcagaagatagacatcctgaccgagttgagagataaggtgaaatcattccgagctgcactccaagaagaggaacaggcaagcaaacagattaatccaaaaaggcccagagcactatag

SEQ ID NO: 17426 - DNA, 207 bp, synthetic construct
  source 1..207: mol_type = other DNA; note = Synthetic coding sequence
atgtctagtccaagggatttccgggctgaaccagtgaacgactatgaaggcaatgacagcgaggccgaggacttaaatttcagagagactcttcctagctcttcccaggagaatactccacgaagcaaggtcttcgaaaataaggtcaattctgagaaggtaaaactctccctccgtaacttcccacataatgattacgaagactag

SEQ ID NO: 17427 - DNA, 294 bp, synthetic construct
  source 1..294: mol_type = other DNA; note = Synthetic coding sequence
atgaatggacgagccgacttccgagagcccaatgccgaggtccccagaccaatcccacacattggacccgactacataccaaccgaagaggagcggagggtgtttgcggagtgtaacgatgagtccttttggttcaggagtgttcctctggcggcaacctctatgctcattacccagggacttatctcaaaaggcattctgtcatcacacccaaagtatggaagtatacccaaactaattctggcctgcatcatggggtattttgctgggaaactgagctatgtaaagacttag

SEQ ID NO: 17428 - DNA, 309 bp, synthetic construct
  source 1..309: mol_type = other DNA; note = Synthetic coding sequence
atggtcatggaaaagccttcccctctgttggtgggcagggagtttgtacgacagtattacacactgcttaacaaagctcctgagtacttacacaggttctacggacggaactcttcatatgttcacgggggagtggacgcgtctgggaagcctcaggaagccgtgtacggtcagaatgatatccaccacaaggtgctgtctctgaacttcagcgaatgccacacaaaaattcgccacgtggacgcccacgccacactgagcgacggcgttgtagtgcaggtgatggggcttttgtctaactccggttag

SEQ ID NO: 17429 - DNA, 597 bp, synthetic construct
  source 1..597: mol_type = other DNA; note = Synthetic coding sequence
atggggacaacttgtctgcatctcgggacacttgagcaatctcttgtttttgagaataaggtcaactccgagaaagttaaactgtctctcaggaattttccacacaatgactacgaagatgttttcgaggagccgtcagaaagtgggtccgatccatccatgtggacggctcgcggcccttttaggcgggaccgctggtccagcgaggacgaggaggcagctggcccgtcccaagctcttagtccgcttcttagcgacacccgaaaaatagtcagcgagggggaactggatcagctcgcacagattaggcccctaatttttaatttccacgaacaaacagccatcaaggactgcttaaagatactggaggagaaaaccgccgcatacgacattatgcaggagtttatggctctggagcttaagaacttgcccggcgagttcaactccggtaatcaaccttctaatagagagaaaaataggtatcgcgatatccttccttttcagcaccatggatacagcggcccgaacgagcgaaccactttttggcacgggtcgaatgagggagccgtgagcctcctcttgagatactgtgcgtag

SEQ ID NO: 17430 - DNA, 384 bp, synthetic construct
  source 1..384: mol_type = other DNA; note = Synthetic coding sequence
atgaggcccctggatatcgtagaactggcagaaccagaagaagttgaggtgctggaacccgaggaggatttcgagcagttccttctgccagtgatcaatgaaatgagagaggatatcgcctcactgactagggagcacggccgggcctacctcagaaatagaagcaagttatgggagatggataacatgttgatacaaatcaaaacacaggtcgaagcttccgaggagtccgccctgaatcacttgcagaaccccggagatgccgccgagggtcgggccgccaaaagatgcgagaaagccgaagagaaggctaaggagattgcaaagatggcagagatgttagtggagctggtaaggcgcatcgaaaagagcgaatcctcctag

SEQ ID NO: 17431 - DNA, 426 bp, synthetic construct
  source 1..426: mol_type = other DNA; note = Synthetic coding sequence
atggtgatggaaaagccttcgccactactggtcggtagagagtttgtgcgccagtattacactctgctcaacaaagctcctgaatacctccaccggttctacggcagaaattcttcctatgttcacggcggtgttgatgccagtggaaaaccacaagaagccgtttatggccagaacgacatccatcacaaagttctgtctctgaattttagcgagtgccatactaagatccgtcacgtagacgcccacgctaccctcagcgatggggtggtggtgcaggtgatgggactgctgtctaattctggccagcccgagcggaagttcatgcagactttcgtactggctcctgaaggaagcgtccccaacaagttctacgtccataatgatatgtttaggtacgaggatgaagtgttcggagattcttag

SEQ ID NO: 17432 - DNA, 135 bp, synthetic construct
  source 1..135: mol_type = other DNA; note = Synthetic coding sequence
atgctgttactcgactgtaatcctgaagtggacggtctcaagcatttacttgaaactggagcttctgtaaacgctccccctgacccatgtaagcaatcccccgtccacctcgcagcgggttccggattggcgtag

SEQ ID NO: 17433 - DNA, 399 bp, synthetic construct
  source 1..399: mol_type = other DNA; note = Synthetic coding sequence
atgaaacgcggccgattgccaagttcttccgaggattcagatgacaatggatctttgagcacgacctggagccagaactccagaagtcagcatcgcaggtcgtcttgctcgcggcacgaagatcgtaaaccgtctgaggtgtttcgcactgatcttatcaccgccatgaagctccacgactcttaccagctaaatccggacgagtactacgtgctggcggatccatggcgccaagaatgggaaaagggcgttcaagtgcccgtgagccccgggactatcccacagccagtcgcccgcgtcgtgagcgaggaaaaaagccttatgttcattagaccaaaaaaatatatcgtgagctccgggtccgagcctccagaactggggtatgtagacattcgatag

SEQ ID NO: 17434 - DNA, 972 bp, synthetic construct
  source 1..972: mol_type = other DNA; note = Synthetic coding sequence
atgcggacggcagacagagaagcccgcccggggctgccatccctcctcctgctgctcctggcaggcgccgggctgagcgccgcctcccccccagcggccccccgtttcaacgttagtttggatagcgttccagaactgcgttggttgcccgtgctcagacattacgatctggacctggtgcgggcggctatggcgcaggtgataggcgacagggtgccaaagtgggtccacgtgctgatcggaaaagtcgtacttgagctcgagaggttcctgcctcagcctttcaccggggaaatcagaggaatgtgcgatttcatgaacttatctcttgctgactgtctacttgtgaacttagcctacgagagcagcgtgttttgcacctctattgtggcacaagattctcggggtcatatctatcatggccgaaatctcgattaccctttcggaaacgtgctgaggaaattgactgtggacgtccaattcctgaagaatggtcagatagcctttactggcactacctttataggctacgtgggactctggacagggcaatctccacataaattcacagtcagcggcgatgaacgtgataagggatggtggtgggagaacgcaattgccgccttgttccggcgtcatatccccgtttcctggctgatccgagctacgctcagcgagagcgaaaatttcgaagcagctgtgggaaagctggcaaaaacgccgctgatcgcggacgtgtactacattgtggggggcacctccccccgcgaaggggtggtgattacgcgaaacagagatggacctgctgatatctggcccctggatccgttgaacggcgcctggtttcgagttgagaccaattacgaccactggaagcccgccccaaaggaagacgaccgaagaacatctgcgatcaaggctctgaacgccactgggcaagccaatctgtcactggaagctctttttcaatag

SEQ ID NO: 17435 - DNA, 312 bp, synthetic construct
  source 1..312: mol_type = other DNA; note = Synthetic coding sequence
atggctcagaccgataaacccacctgcatccccccggaactgcctaaaatgcttaaagagttcgccaaggcagctattcgtgcacaaccccaggatttaatccagtggggtgccgactatttcgaggcactgagcaggggcgagaccccccccgtgagggagcgaagcgagcgggtcgcgctgtgcaactgggccgagctcacacctgagctcctcaaaattctccactctcaggtcgctggaaggctgataatcagagcggaggaactcgcccagatgtggaaggtcgttaacctcccaactgatctatag

SEQ ID NO: 17436 - DNA, 540 bp, synthetic construct
  source 1..540: mol_type = other DNA; note = Synthetic coding sequence
atggaagatggcactccaaaacacatcatccagatgaccggcttcaagatggaagagaaggaggcacttgtgaagctgctgctcaagctggattgtactttcataaagtccgagaaatataagaattgtacccatctgattgccgaacggctctgtaagtccgaaaagtttcttgctgcctgtgcagccggaaaatggattttgaccaaagattacatcattcacagtgccaagtcaggccggtggctagacgagacaacttacgagtggggctataagatcgaaaaggattctcgctactcaccccagatgcagagcgcccccaaacgatggagggaggaactgaagcgcactggtgccccaggcgcttttcatcgctggaaggttgtcttgcttgttcggaccgacaagagaagcgactcactcattagaaagaaatttaggatgatgaaaatcccaaagccaattcttttcgggttaaatatagccatgaaaaaacagacgaagatcagcggtaagatgcaggacttcctgaaatag

SEQ ID NO: 17437 - DNA, 453 bp, synthetic construct
  source 1..453: mol_type = other DNA; note = Synthetic coding sequence
atggaagccgacattatcactaacctgcgttgcagactgaaggaggccgaggaggagaggctaaaggctgcccagtacgggttgcagcttgtggaatctcagaacgagctgcaaaatcaattggataagtgccggaacgagatgatgactatgacagaatcgtacgagcaggaaaagtacaccctgcagcgagaggtggagctgaaaagcagaatgctggagagtttgtcgtgcgagtgtgaagccattaaacagcagcagaagatgcacctcgagaagctggaggaacagttgtcaaggagtcacgggcaggaagtgaacgagctcaaaaccaagatcgagaaactcaaggtggaactagatgaggcgaggttgtccgagaagcagctgaaacaccaggtggatcaccaaaaggagttactgtcctgtaagagcgaggagctccgggtgtag

SEQ ID NO: 17438 - DNA, 738 bp, synthetic construct
  source 1..738: mol_type = other DNA; note = Synthetic coding sequence
atgaacggacgagccgatttccgggaacctaacgccgaagtgcctagaccgatcccccacataggtcctgactacatcccaacagaggaagagagaagggtcttcgccgagtgcaatgatgagagcttctggttcagatccgtgccgctggcagcgactagtatgttaataacacagggcttgattagcaagggcattctgagttcccatcccaagtatggctctattcctaagttaatactcgcctgtatcatgggctacttcgcagggaagttatcctatgtgaaaacttgccaggagaagtttaagaaacttgagaacagtccattaggagaagcccttaggtccggccaggcacggagaagtagcccacccggacattactaccaaaagtcaaagtatgactcttctgtcagcggccagtcatctttcgtgacctccccagccgcagataatatagaaatgctgccgcattacgaaccgatcccttttagcagtagtatgaatgaaagtgctcccaccggcatcaccgatcacattgttcaaggccctgaccctaacctcgaagagtcccctaagcgtaagaacatcacctacgaagagctcagaaataagaacagagaaagctacgaggtatcactcactcagaagacggatccttcagtcaggccaatgcacgagagggtccccaaaaaggaggtcaaggtcaacaaatacggtgacacatgggatgagtag

SEQ ID NO: 17439 - DNA, 180 bp, synthetic construct
  source 1..180: mol_type = other DNA; note = Synthetic coding sequence
atggtgatggagaagccatcacctctcctggtgggcagagagttcgtgcgccagtactacaccctcctgaataaggcccctgagtatttacacagattttacggccgtaattcctcctatgttcatggcggggtggatgccagcggaaaaccacaggaggcagtctacgggcagaactag

SEQ ID NO: 17440 - DNA, 597 bp, synthetic construct
  source 1..597: mol_type = other DNA; note = Synthetic coding sequence
atgggaaccacctgcctgcacctgggcaccttggagcaatcattggtgtttgaaaacaaggtaaactctgaaaaggtgaaactatccctgagaaattttccgcacaacgattatgaggacgtgtttgaagaacccagcgaatctggatccgaccccagcatgtggacggcacggggcccctttcgccgcgaccggtggtcttctgaagatgaagaggcagcgggaccgtcacaggctctgagcccactcctatccgatacacggaagatcgtgagtgagggagagctggatcaacttgcccaaatcagaccactgatctttaacttccacgaacaaactgccatcaaggactgtctgaagattttggaagaaaaaacggctgcctacgatattatgcaggagttcatggctttagagctcaaaaatttgcctggagaattcaactccggaaaccagccttcaaaccgtgagaagaatcgctaccgggatattctgcctttccagcatcatggctatagtgggcccaacgaacgaactaccttttggcacggctccaatgaaggcgccgtctcactcctcctgcgctattgcgcgtag

SEQ ID NO: 17441 - DNA, 465 bp, synthetic construct
  source 1..465: mol_type = other DNA; note = Synthetic coding sequence
atggccagcgcatccgccagaggaaaccaagacaaagatgcacatttccctccgcccagtaagcagtcactattattctgccccaagtcgaaactgcatatccaccgagccgagattagtaagattatgagggagtgccaggaggaaagtttctggaagagggcactccccttcagccttgtcagtatgctcgtgactcaagggcttgtgtaccagggctacctggcagccaattcccgctttggcagcctgcctaaggtggctcttgcaggccttctggggtttggtctcggaaaggtatcatacatcggggtgtgccagtccaagttccacttcttcgaggatcagttacgcggagccggctttggaccgcagcataatcgtcactgcctgctcacttgcgaagagtgcaaaataaagcacggccttagtgaaaagggtgactctcagccgtccgcctcgtag

SEQ ID NO: 17442 - DNA, 2520 bp, synthetic construct
  source 1..2520: mol_type = other DNA; note = Synthetic coding sequence
atgtcagtagtgggaattgatctcggattcctgaactgctacatcgccgttgctcgatccggcggcatcgaaactatagccaacgaatactctgaccgatgtactcccgcctgcattagcctggggagccgcacaagggcaatcgggaatgctgccaaatcccaaatcgttactaacgtccgcaacactatccacgggttcaagaagctgcacggacgctcctttgacgaccccatagtgcagacagaacgaattcggttaccctacgagttgcagaagatgcccaacggaagtgccggcgtgaaggtgaggtacctcgaggaagaaaggccctttgctatcgaacaggttactgggatgctgttggctaagctgaaggagacgagcgaaaacgcactgaagaaaccagtggccgattgtgtgatttccattccatcattctttaccgatgcggagcgaaggtctgtgatggctgctgcacaggtggctggacttaactgtctgcgactgatgaacgagacaaccgcagttgccctggcctacggtatttataagcaggacctcccacccctggacgaaaaacctcggaatgtggtgtttatagatatgggacacagtgcataccaggttctggtgtgtgcttttaataaggggaaactgaaagttctggccactaccttcgacccttatttaggcgggcgtaatttcgacgaagcactggtggactacttctgcgatgagttcaaaaccaagtacaaaattaatgtgaaagaaaatagtcgagctctgctgaggctctatcaggaatgcgagaagcttaaaaaactgatgtcagccaatgcctccgatctgcctctgaatatagaatgcttcatgaacgatttagatgtatcctccaaaatgaatagggcccagttcgaacagctatgtgcctccctgctggcccgggtagagcctcctcttaaggccgtcatggagcaggccaatctgcagcgcgaagacatttcatcaattgagatcgtcggcggcgcgacgcgtatcccagccgtcaaggagcaaattaccaaattttttctgaaggatatcagcaccactttgaacgcggacgaagctgtggcccgcggatgtgcgttgcagtgcgcgatactgtccccagcttttaaggtgagggaattttccatcacggatcttgttccctattcaattactctgcgctggaaaacctcttttgaggacggatccggagaatgcgaagtcttttgtaagaatcacccagccccgttttcaaaggttatcacatttcataaaaaagaaccattcgaactggaggcattttacaccaatttacacgaagtcccatacccagatgcacggatcggctcttttacgattcagaatgtgtttcctcagtctgatggggattcctctaaggtcaaagtcaaggtgagagttaacatccatggaatattctcagtggccagcgcatctgtgattgaaaaacaaaatttggagggtgatcactccgatgcccccatggagaccgagacctcttttaaaaatgagaataaagataacatggataagatgcaggttgatcaggaggaaggacaccaaaagtgccacgccgaacatacgcccgaagaagaaattgaccacacgggcgctaaaactaagtctgcggtaagcgataaacaggatcgactgaaccaaaccttgaagaaaggcaaggtgaagtccattgatctgcccatccagagcagcctgtgcagacagttgggacaggacctgctcaattcatatattgaaaacgagggaaagatgatcatgcaggacaagttagaaaaggagagaaatgacgccaagaatgctgttgaagaatatgtctacgactttagggatcgactgggaaccgtctatgagaagttcattacccccgaggatctcagtaaactttcagcggtgttggaggacacagaaaactggctttacgaggacggggaagaccagcccaagcaggtgtatgtggacaagcttcaagaactcaagaaatatggccaacctatacagatgaagtacatggagcatgaggaacgcccaaaagccctgaacgatttggggaagaagattcagttggtgatgaaggtgatcgaggcgtatcggaataaagatgagcgatacgatcatctggacccaaccgaaatggaaaaggtggaaaaatgcataagcgacgctatgtcctggctgaacagcaaaatgaatgcacagaataagctctccctcacacaggaccctgtcgtgaaggtgagtgaaattgtcgccaagtcaaaggaactcgataatttctgcaaccccatcatttacaaacctaagcccaaggccgaagttcccgaagataaacctaaggcaaattcagagcacaatggacctatggacggtcagagtggaactgaaacaaaatccgacagtacaaaagatagcagccagcacacaaagtcctcaggcgagatggaagtcgactag

SEQ ID NO: 17443 - DNA, 54 bp, synthetic construct
  source 1..54: mol_type = other DNA; note = Synthetic coding sequence
atggatgaaggaatggaaatctcttcagagggaaactcgctgatcaaggcttag

SEQ ID NO: 17444 - DNA, 2394 bp, synthetic construct
  source 1..2394: mol_type = other DNA; note = Synthetic coding sequence
atgggggtgtccagactcatggatctccttgccgactccagagaagtcatccgcaatgacggcgtgcttctcctacaggccttaacacggagtaacggggcaattcagaagattgtcgctttcgagaatgctttcgaacggctcttggacattattagcgaggagggaaatagcgacggaggcattgttgttgaggattgtttaatcttgcttcaaaatctgttgaagaataataatagtaaccagaactttttcaaagaaggaagttatatccagagaatgaagccctggttcgaggtgggcgacgaaaatagcgggtggtcagcccagaaagtcaccaacctgcaccttatgctccaacttgtgcgggttttggtgagtccaaccaatccgcccggagctacatcaagttgccagaaggcaatgtttcaatgcggccttctccagcagctttgcacaatactgatggccacaggggtcccagctgatatactcacggagactataaacacagtgtctgaggtgatcaggggatgccaggtgaatcaggattactttgctagtgtgaatgctcctagcaacccaccgaggccagctatcgtggtactactgatgtctatggtgaacgagcgccaacctttcgtcctgaggtgtgccgtgctgtattgcttccagtgcttcctgtacaagaaccagaaaggccagggtgaaattgtcagtaccttgcttccatccacaattgacgccacaggaaattcagtctccgcaggacagctgctgtgcgggggccttttctccaccgatagcctctcgaattggtgtgcagccgtggctcttgctcatgccctacaggagaacgcaacccagaaagaacagcttctaagggtacagttggccacttcaatcggaaatccaccggtgagtctgttacagcaatgcacgaatattttaagccagggcagcaagatccaaactcgggtggggctgctgatgttgctgtgcacttggcttagtaattgccccattgccgtcacacacttcctgcataacagcgctaacgttcccttcctgacaggtcagatcgctgaaaatctcggagaagaagaacagctagtgcagggactttgcgctttactgctgggaattagcatttactttaatgataattctctggagagctacatgaaggaaaagctgaaacagctgattgagaagcggattggaaaagagaatttcatcgagaaattgggttttatttctaaacacgaactgtacagcagagccagccaaaagccacagcccaattttccgtccccagagtatatgatcttcgatcatgagtttaccaaattggtgaaggaactagagggggtcatcactaaggctatttacaagtctagtgaagaagacaagaaggaagaggaggtgaagaagacactggagcagcacgacaatattgtgacacactacaaaaacatgatcagggaacaggacctgcaactggaagaacttcgccaacaggtgagcaccctgaaatgtcagaacgagcagttgcagaccgccgtgactcagcaagtgtctcaaatccagcagcacaaagatcagtacaacttattgaaaattcagttgggcaaagacaatcagcaccaaggaagctactcagaaggcgctcaaatgaacgggatacagcccgaggagatcggccgattaagggaagagattgaagaactaaagcgaaaccaggaacttcttcagtctcaactcaccgaaaaggactccatgatagagaacatgaaaagctcccagacctcaggcactaacgagcagagctcagccatcgtgagtgcgcgtgattcagagcaggtagcagagctgaagcaggagctggcaacactgaaatcccagctgaatagtcagagtgtggaaataaccaagcttcagacggaaaagcaggaactgctccagaagaccgaggctttcgcaaagtcagtcgaagttcagggtgagaccgagactatcatcgcaactaaaactactgacgtggaaggacgcttgtcagctctgctccaggagaccaaggagctcaaaaatgagatcaaggcgctgtccgaagaacgaacagcaattaaggaacagctggactcttccaactcaaccattgccattctgcagacagaaaaagataagctggagctggagataaccgacagcaagaaggaacaggatgacctgttggtactgctcgccgaccaagaccagaagattctgagtttgaagaataagctgaaagacctcggacacccggtggaagaagaagacgaactcgagtccggggatcaggaggacgaggacgatgagtcggaggaccccgggaaagacctggatcatatctag

SEQ ID NO: 17445 - DNA, 441 bp, synthetic construct
  source 1..441: mol_type = other DNA; note = Synthetic coding sequence
taacgacacctgcgtgcaacccctaacacgcgcggcagtgccaggttgctgtgcgccgaaatgcccaagaaggctggggccactaccaaaggtaagagccagagtaaagaacccgaaagacctttaccccccctcggtccagttgccgttgaccctaaggggtgcgttacaatcgccatccatgcgaaaccagggagtaaacagaatgccgtgacagatctgaccgctgaggccgttaacgtggcaattgccgcaccgccttcagagggcgaggcaaacgccgagttatgtagatatctctctaaggttctcgaattacgaaagtcagatgtagttctggacaaaaagctgagggatcttcttaagatcgttccatgcaaactagccaccaggacccagatattaggtttactcgtagaatgtagcttctcccgtttgtag

SEQ ID NO: 17446 - DNA, 243 bp, synthetic construct
  source 1..243: mol_type = other DNA; note = Synthetic coding sequence
atgaatggacgtgctgactttcgcgagcccaacgccgaagtgcctcgcccgattcctcatatcggacccgactacatcccaacagaggaagagcgaagagtattcgctgaatgcaatgacgagtctttctggtttagaagcgtccccctggccgcaacatcaatgctcatcacacagggactcatatctaagggcatcctgtcgtcccatcctaagtatggaagcattcctaaactgatatag

SEQ ID NO: 17447 - DNA, 360 bp, synthetic construct
  source 1..360: mol_type = other DNA; note = Synthetic coding sequence
atgaaaagaggacgcctgccgtcttctagcgaggactctgacgataatggctccctttccactacctggtcacagaacagcagatcccaacacagacgctccagctgctcacgtcatgaggatcgtaagccctctgaagtgtttaggaccgacctgattacggctatgaagctccacgacagctatcaattaaaccccgatgaatactatgtgctcgccgatccctggcggcaggagtgggaaaaaggcgtgcaagtgcccgtgtcccctggaactatcccacagcctgtggcacgggtagtgtccgaggagaaatccctgatgttcatccgccctaaaaagtacatcgtctccagttag

SEQ ID NO: 17448 - DNA, 69 bp, synthetic construct
  source 1..69: mol_type = other DNA; note = Synthetic coding sequence
atggctaaatataatactggcggcaaccctacggaagatgtgagcgtgaactctcggcccttccgctag

SEQ ID NO: 17449 - DNA, 1059 bp, synthetic construct
  source 1..1059: mol_type = other DNA; note = Synthetic coding sequence
atggctgcagccgtgcggcaggatctggcccaactcatgaacagttctgggagccataaagacttggctggaaagtatcgccagattctggaaaaggccattcagctgagtggagccgaacagcttgaggcactgaaggcattcgttgaagctatggtcaatgagaacgtctcattagtcatcagcaggcaacttttaactgacttctgtacacacctgccaaacctgcctgattccactgccaaagagatctatcatttcacactggagaagattcagccacgtgtcattagtttcgaagagcaggtcgcctctatcagacagcatctggcttctatctacgaaaaggaggaagactggagaaatgccgcgcaggttctcgtcgggataccactagaaaccggtcaaaaacaatacaacgttgactacaaactggagacgtacctcaaaatcgccagattgtacctggaggacgacgaccccgtacaggcagaggcatacattaacagagcttcattacttcaaaatgaatccacaaacgagcagctgcagatccactacaaggtatgctacgcccgcgtcctagactaccgccgcaaattcatagaagccgcccagagatacaatgagctctcatacaaaaccatcgtgcacgagtctgagcgcctcgaagccctgaaacatgcactccactgtaccatcctggccagcgcgggccagcagcgtagtcgtatgctcgctacgcttttcaaggacgaaaggtgccagcagctggcggcttatggtattctcgaaaagatgtatcttgacaggataatccgcggtaaccagctacaggagttcgcggcaatgctcatgcctcaccagaaggccacaacagccgatgggagtagtattttggatagggccgtcatcgaacacaacctgctaagtgcgtctaagttgtacaacaatattactttcgaagagctgggtgctctgctggagatcccggctgccaagcacgagaagccttgtcagcgggggatcagccggtcaaatcactttgtatctaaatag

SEQ ID NO: 17450 - DNA, 378 bp, synthetic construct
  source 1..378: mol_type = other DNA; note = Synthetic coding sequence
atggtcatggagaaacctagccccctgctcgtgggccgggaatttgttcgccagtattatacactacttaataaagccccagagtacctgcaccgattttacggcagaaacagctcctacgtgcacggcggcgtagatgcgagtggcaaaccgcaagaggccgtgtacggacagaatgatatccaccacaaggtgctgagcctgaacttcagcgaatgtcacactaaaatccgccacgtggacgcacacgcgactttgtcagacggcgtggtggtgcaggtcatgggccttctgtcaaacagcgggcagccagaaagaaagttcatgcagacattcgtattagcacccgaaggctctgttcccaacaagttttattag

SEQ ID NO: 17451 - DNA, 657 bp, synthetic construct
  source 1..657: mol_type = other DNA; note = Synthetic coding sequence
atgaacgggcgggcagattttagggagcccaatgccgaggtaccgcgaccgattccccctgtgcctctggctgccacctctatgctgatcacccagggcctgatctcgaaggggatactgtcttcacacccaaagtatggctctatccctaagttaatactagcatgcatcatgggctacttcgcggggaaattgagctatgttaaaacatgccaggagaagtttaaaaagctggagaattccccactgggcgaggccctgcgcagcgggcaggctagacgatctagcccccccggtcattactatcagaagtcgaagtatgactcatccgttagtggccaaagctcttttgtgacatcacctgccgccgacaacatagagatgctgccacactacgagcctattccattttcctccagcatgaacgagtcggccccaactgggattacagatcatatcgtgcagggaccagacccgaatcttgaagagtcccctaaacggaagaacatcacttatgaggagctccgtaataaaaacagagaaagttacgaggtttccctcacccaaaaaactgacccatccgttcgccctatgcatgaacgcgttcctaagaaagaggtcaaggtgaataagtacggtgacacttgggatgagtag

SEQ ID NO: 17452 - DNA, 243 bp, synthetic construct
  source 1..243: mol_type = other DNA; note = Synthetic coding sequence
atgaatggtcgggccgatttcagggaaccaaatgccgaggtgcctaggcctatcccgcatataggacccgattatattcccacagaggaggagcgaagggtgttcgctgaatgcaacgatgagagcttttggttcaggtctgtgccgcttgccgcaaccagcatgctgattacgcagggtctgatcagcaagggcatcttatcgagccacccaaagtatggatctattcctaaacttatatag

SEQ ID NO: 17453 - DNA, 654 bp, synthetic construct
  source 1..654: mol_type = other DNA; note = Synthetic coding sequence
atgatagtaaacgactacgaggggaacgattcagaggccgaggacctgaacttccgggagacccttccaagttcctctcaggagaatacccctagaagcaaggtgtttgagaataaggtgaactctgagaaagtgaaattgtcccttaggaatttccctcataacgattatgaagacgtgtttgaagagccaagcgagtccggaagtgatccttcgatgtggacagccaggggcccctttagacgtgacaggtggagttctgaggacgaggaagccgccggaccttctcaagctttgtccccgctgctcagtgacactaggaaaattgtctccgaaggcgagcttgaccagctggcgcaaatccgccccctcatcttcaatttccacgaacagaccgccatcaaagactgtttaaagatactggaggagaagacagccgcttacgacatcatgcaggaatttatggcacttgaattaaaaaacctgcccggggagttcaactccgggaatcagcctagcaatagggagaaaaaccgatacagggacatcctaccttttcagcaccacggctactccggccccaacgagaggacaactttttggcatggatctaacgaaggggccgtaagtctgctgctgcgctattgtgcatag

SEQ ID NO: 17454 - DNA, 351 bp, synthetic construct
  source 1..351: mol_type = other DNA; note = Synthetic coding sequence
atggggcggttggacggtaaagtgataattctcactgccgcagctcaaggcattggacaggcagccgccctagcgtttgcacgcgagggtgctaaggtcatcgccactgacataaatgagtcaaagttacaggagctggagaaataccccggaatccagacccgcgtgctggacgtgacaaagaaaaagcaaatcgaccagttcgcaaacgaggtcgaaaggttggatgttctgtttaacgtggccgggttcgtgcaccacggaacagttctagattgcgaagagaaagattgggatttttccatgaacttgaatgtccgttccatgtacctgatgatcaaagccttttag

SEQ ID NO: 17455 - DNA, 504 bp, synthetic construct
  source 1..504: mol_type = other DNA; note = Synthetic coding sequence
atgaaggcaattaagaagagcctgaccgaggaggagtatctctacctggacttttcccaccaaacagaagggtgtatcttcccactgcacacttcagtgacactgtttctactgagttattgcgactgcaaaattttcaagatttgtctggtagtcactaaggaggtgtctagagatagcagtctcctcagagatgacctgattcaggatgtggaaatccaaattatttctcgacaggaactgccccctatcgtccagaattgctgtctgcccgctgttgtggaaagatctgacaacttctgccgtgccggcctggccgtggtgctcagacacataatccagaagtcatatgaggctgacccactgaaaaaagagttgctcgaattgctcggatttaaaaaaacttgcttgaaagcatgtgctgaggtgtctcaatggacacggctctgcgaactgaccattcctcttgcaattgaaaacttcctgcgggagtcttcagactag

SEQ ID NO: 17456 - DNA, 933 bp, synthetic construct
  source 1..933: mol_type = other DNA; note = Synthetic coding sequence
atgtcacagcagctcaaaaagcgcgctaagacacgccaccagaagggactaggagggcgcgctccctccggcgccaagcccagacagggtaagtcgagccaggatctgcaggctgagatcgaacctgtcagtgctgtgtgggctctgtgtgacggatacgtctgttatgagcctggcccccaggcactgggaggggatgatttcagtgattgttatatagaatgtgtgattcgcggagaatttagccaacctattctcgaggaggatagccttttcgaatctctcgagtacttgaaaaaaggcagcgagcagcagttgtcccagaaggtctttgaagcaagctccttagagtgcagtcttgagtacatgaaaaagggtgtgaaaaaagagctcccgcagaagatcgtgggagagaatagcctggaatatagcgagtacatgacaggtaagaaattaccacctggtggcatccccggcatagatttatccgaccctaagcagttagctgaattcgcacgcaagaaaccacccattaataaggaatatgactctcttagtgcgatcgcctgtcctcagagcgggtgcacgcgcaaactgcgcaaccgcgccgcactgcgaaagcacctcctgattcacggaccacgggaccacgtctgcgccgagtgtggaaaggcttttgtggagtcttcaaaattgaaacgacactttctcgtccacacaggcgagaaacctttccgatgcacatttgaggggtgtggtaaacggttcagccttgattttaacctgcggacccatgtgcgcatccacaccggggaaaaaagatttgtttgccctttccagggctgtaaccggaggttcattcagagcaataacctgaaggcccatattttaactcacgccaacacaaataagaatgaacaggagggcaaatag

SEQ ID NO: 17457 - DNA, 237 bp, synthetic construct
  source 1..237: mol_type = other DNA; note = Synthetic coding sequence
atggtgatggagaagccttccccattattagtgggtagagagttcgtgcggcaatattacactctgctgaataaagcaccagagtacttgcaccgcttctatggtagaaactcctcatatgtccacggaggcgtggatgcctccgggaaaccccaagaggctgtttatggccagaacgatattcatcataaggtcctatctctgaatttctccgagtgtcacaccaagatcaggtag

SEQ ID NO: 17458 - DNA, 681 bp, synthetic construct
  source 1..681: mol_type = other DNA; note = Synthetic coding sequence
atgagctctcctagagatttcagggcggaaccagtcaacgactatgagggcaatgactccgaagcagaagatttgaactttagggagaccctgccaagctcctcacaggagaacacgccacgtagcaaagtttttgaaaataaagtcaactctgaaaaagtgaaactcagtctgcgcaactttccacacaacgattacgaagacgttttcgaagagccctctgagtccggcagcgatccttcaatgtggaccgcacgtgggccatttaggagagaccgttggagcagcgaagatgaagaggccgccggaccatctcaagccttaagcccactattgagtgatacccgtaagatcgtgagcgaaggagaactggaccagcttgcccagattagacctctcatctttaacttccatgagcagacagctatcaaggactgtctgaagatccttgaggagaagactgcggcatatgatataatgcaggagtttatggccctggagcttaaaaatctgccaggggagttcaacagcgggaaccagccaagtaatcgcgagaagaatcgctatcgggatattctgccatttcagcaccacggctactcaggacctaacgaacgaaccactttttggcatgggtccaacgaaggggctgtgagccttcttctgcgatattgcgcctag

SEQ ID NO: 17459 - DNA, 1020 bp, synthetic construct
  source 1..1020: mol_type = other DNA; note = Synthetic coding sequence
atgtggaccgctcgcggaccctttaggagggaccgatggagctcagaggatgaggaggctgccggcccttcccaggcgctctctccactcctcagcgacacccgcaagatagtgtcagagggtgaacttgaccagctggcccagattagaccccttatcttcaacttccatgaacaaacagcaatcaaggattgcttgaagatactggaggaaaaaacggctgcctatgacattatgcaggagtttatggccttggagctgaagaatctgcccggggagtttaacagtggcaaccagccatcgaacagagaaaaaaacaggtatcgagatatactcccttacgactccacccgcgtgccactgggcaagtcgaaggattatatcaacgcgtcctatatacgcatcgtaaactgtggggaagagtatttctacattgccacacagggacccctgttgtccactatagatgatttttggcagatggtgctcgaaaataattccaatgtaatcgcaatgatcaccagggaaatcgagggcggaattataaagtgttatcattactggcccatttcattaaaaaaacccctggagctgaagcatttcagggtttttctcgaaaactaccaaatcctgcaatacttcatcataagaatgttccaggtggtcgaaaaatccactggcaccagtcactccgtgaagcagctgcagtttacaaagtggccagatcatgggactcctgccagcgcagattcttttattaagtatatccgctacgcgagaaagtcacatctcacggggccaatggtggtacactgttctgctgggatcggccggaccggcgtatttctctgcgtggatgtggtattctgtgctatagtgaaaaattgttcgttcaacatcatggatattgtggcccagatgagagaacagcgctctggtatggtgcagacaaaggagcaataccatttttgttatgatatcgtgctggaagttctgcgaaagctgctgaccttagactag

SEQ ID NO: 17460 - DNA, 1179 bp, synthetic construct
  source 1..1179: mol_type = other DNA; note = Synthetic coding sequence
atgggcaccacatgcctgcacttaggtactctggaacaatcattagtttttgaaaataaagtcaattcagagaaggtgaaactgagcctgagaaattttccacataatgactacgaagacgtgttcgaagagccctcagagagtggctccgacccctctatgtggaccgcccgcgggcccttcaggcgagacaggtggagtagcgaagacgaagaggccgcaggtccctcacaagcgctctctccattgctgagcgacactcgcaagatagtgtccgaaggagagttggaccaactggcccagattagaccgctcattttcaatttccatgagcagaccgctattaaagattgtcttaagatactggaggagaagactgccgcctatgacatcatgcaggagtttatggcactggagcttaaaaatctaccaggagagtttaattctgggaaccagccgtccaatcgggaaaagaaccggtaccgggatatccttccatacgactcaacaagagtacccctgggaaagtcgaaagattacatcaatgcttcatatatacggatcgtgaactgcggggaagagtacttctatatagcgactcaggggcccctgctgtcaacaatcgatgacttttggcagatggtcttggaaaataacagcaacgttatcgccatgattacacgtgagatcgaagggggaatcattaaatgctaccattattggcctatctcactcaagaaacctctggagctgaaacacttccgcgtgtttctcgaaaattaccaaatcctgcaatacttcattattaggatgtttcaagtcgttgaaaagtccaccgggacttcacactcagttaagcagttgcagtttacgaaatggcccgaccacggaacacccgcttctgccgactcgtttatcaaatatattcgttacgccagaaagtctcatctcactgggcccatggtggtccattgtagcgcagggattggaaggaccggtgtgttcctgtgtgtggacgtagtcttctgtgcaatcgtgaaaaactgtagtttcaacatcatggacatcgtggcccagatgagagagcagcgctccggtatggtgcagaccaaggagcagtatcacttctgctacgatatagttcttgaagtattacgtaagctgctgaccctcgactag

SEQ ID NO: 17461 - DNA, 654 bp, synthetic construct
  source 1..654: mol_type = other DNA; note = Synthetic coding sequence
atgattgtgaacgattatgaaggtaatgactccgaagctgaggatttgaacttcagggagacccttccctcatcaagccaggagaacactcctcgttctaaagtttttgaaaataaggtgaactccgagaaagtcaaactctcacttaggaatttcccccacaatgactatgaggacgtctttgaagaaccaagcgagtctgggtccgacccctccatgtggactgccagaggtccgttcagacgggacaggtggtcctccgaagatgaagaagccgcaggcccctctcaggccttatcccctcttttgagtgacacaaggaaaatcgtgtctgaaggcgagctggaccagctggcgcagatcaggcctttgattttcaacttccacgagcagaccgcaatcaaggactgcttaaaaatccttgaagagaagactgctgcttacgatattatgcaggaatttatggcgctcgaactcaagaacttacctggagagttcaacagcgggaaccagcctagcaaccgagaaaagaacaggtaccgagatatacttccattccagcaccacggttatagcggccccaacgagagaactaccttttggcacgggtccaatgagggtgccgtatctttgctcctcagatattgcgcctag

SEQ ID NO: 17462 - DNA, 438 bp, synthetic construct
  source 1..438: mol_type = other DNA; note = Synthetic coding sequence
atgtggacagcccgcggtccctttcgaagggacagatggtcaagcgaggatgaggaggctgcaggaccctcacaggccctgtcaccgctcttgagcgacacacgcaagatcgtctcggaaggggagcttgaccagctcgctcagattcggcctctgatttttaactttcacgaacaaactgccattaaagattgtctgaagatcctggaggagaaaaccgctgcgtacgacatcatgcaggaattcatggccctggagttaaaaaacctgcccggcgaatttaactctgggaaccaacccagtaatcgggaaaaaaatcgctaccgggacatacttccttttcagcaccatggctactctgggcctaacgagagaactaccttctggcatggatctaatgaaggagctgtatctctattactccggtactgtgcctag

SEQ ID NO: 17463 - DNA, 207 bp, synthetic construct
  source 1..207: mol_type = other DNA; note = Synthetic coding sequence
atgtctagcccccgcgattttcgagccgaacccgtgaatgactatgagggcaacgacagtgaggcagaggatctcaacttccgcgagaccctgccctcaagctcacaggaaaacaccccccgatcgaaagtcttcgagaataaggttaactcagaaaaggtgaaattgtctcttagaaactttccacataacgattacgaagactag

SEQ ID NO: 17464 - DNA, 525 bp, synthetic construct
  source 1..525: mol_type = other DNA; note = Synthetic coding sequence
atggccaagtataacacaggaggtaatcctaccgaagacgtcagcgtgaattcccgaccctttcgcgtgaccggacctaactcttctagcgggattcaggccagaaagaatctgtttaataatcaaggtaatgccagtccccctgcaggcccctccaacgtgcctaagtttgggtcaccaaaacctcctgtcgctgtgaaaccgagttcagaggagaaacctgacaaagagcccaaaccaccatttctcaagccgaccggcgctggccagagatttggcacaccggcgtcactgaccactcgggatcccgaggctaaagtaggtttcctcaaaccagttggccccaaacctataaacctgcctaaggaagacagcaagcccaccttcccatggccccctggtaacaaaccaagtttacacagcgtcaaccaagatcatgatttgaaacccttggggccaaagagcggaccaacccccccaaccagcgaaaacgagcagaaacaggctttccctaaacttacttag

SEQ ID NO: 17465 - DNA, 405 bp, synthetic construct
  source 1..405: mol_type = other DNA; note = Synthetic coding sequence
atgagcgatgacgccggagatactctggccacaggagacaaagccgaggtcacagagatgcccaactccgactcactcccagaagacgctgaggtccactgtgatagcgcggcagtgagccacgagccgacccccgccgacccgaggggagagggacacgaaaacgccgccgttcagggagcaggcgcggctgctatagggccgccggtgcagcctcaggatgccaatgctcttgagccccctctcaacggcgacgtgacagaggacactctggctgagtgcatcgactcagtaagtctggaagcggagcctcgatccgagattcccttacaggaacagaactacctggctgtagactcacccccttctgggggaggttgggctgggtggggaagctgggggtag

SEQ ID NO: 17466 - DNA, 432 bp, synthetic construct
  source 1..432: mol_type = other DNA; note = Synthetic coding sequence
atgaagcgtggaaggctacccagttcttccgaagatagtgatgataatggcagtctgtccactacttggagtcaaaatagtcggtctcagcatcggaggtcttcttgctccagacacgaggaccggaagccttccgaagtattcagaacagatctcattaccgcgatgaaactgcacgacagctaccagttgaatcccgacgagtattacgtcctggctgacccctggcgccaggaatgggagaaaggcgtccaggtgcccgtgtcacctggcacaattccacagccagttgcccgggtggtgtcggaggaaaagagccttatgttcatcaggcctaaaaaatatatcgtgtcgtcaggatccgagccccccgaacttggctacgtggacattagaacactcgccgattctgtgtgtcgctacgatctgtag

SEQ ID NO: 17467 - DNA, 1200 bp, synthetic construct
  source 1..1200: mol_type = other DNA; note = Synthetic coding sequence
atggactttttctcttcacatctgcttgcagactcatctagcccggccacaaacagctcccatactgatgcgcatgaaattttagtgtcggattttctggtcagtgacgagaacctgcagaagatggaaaacgtactggacttgtggtcgagtggtctgaagacgaatattattagcgaactgtccaagtggcggctgaactttatagactggcaccgaatggagatgaggaaggaaaaggagaaacatgctgcacacctgaaacaactgtgcaaccagatcaatgaactcaaagaactgcaaaagacgttcgagatctctattgggcgtaaagacgaggtgatcagttctctgtcccacgccattgggaaacagaaggagaaaatcgaactgatgagaacctttttccattggagaatcggccatgtgagagcaagacaggacgtgtatgaaggtaagctcgcggaccaatattatcagagaacacttctgaagaaggtgtggaaagtgtggcggtccgtggtccagaaacagtggaaagacgtagtcgagcgtgcatgtcaggcaagggcagaggaagtctgtattcaaatttctaatgattacgaagcaaaggtggccatgctttcgggggcgctcgagaatgccaaggctgaaatccaaaggatgcagcacgaaaaagagcacttcgaggactctatgaagaaagcgttcatgcggggagtttgtgccctgaatctagaggcaatgaccatctttcagaaccgaaacgatgccggcatcgactcaacaaataacaagaaggaggagtacgggccgggcgttcagggtaaggaacactctgctcacctggacccttcagccccccccatgccattgccagtcacatcccctttactcccctcaccaccagcggctgtcggcggagctagcgccacggctgttccttccgccgcgtctatgaccagcacgcgcgccgcctctgcttcgtccgttcacgtgcctgtcagcgccctcggggctggtagtgcagccaccgccgccagcgaggagatgcagacaatcccacaggcaacagctgctaagtaccctagaacgatccatcccgaaagctctacgtcggccagccgcagcctcggaacaaggtccgcccatacccagagcctgacgagcgtacattctatcaaagtggtagattag

SEQ ID NO: 17468 - DNA, 240 bp, synthetic construct
  source 1..240: mol_type = other DNA; note = Synthetic coding sequence
atggatgagtccgccctgctggacctcttagaatgtccagtgtgcctggaacggcttgatgcgagcgctaaggtcttgccttgccagcacaccttttgtaagcgttgtctattagggatcgtcggatccaggaacgaactgcgctgccctgaatgtcgtaccctcgtggggagtggagtagaggaactcccatcgaacatcctgctggtgagactgcttgacggcattaagcagagatag

SEQ ID NO: 17469 - DNA, 621 bp, synthetic construct
  source 1..621: mol_type = other DNA; note = Synthetic coding sequence
atgtcgagcccacgtgacttccgggccgagccagttaacgattacgaagggaatgattccgaggctgaggatctcaattttagggagacattgcccagcagttcgcaagagaacacaccgagatctaaggtcttcgagaataaagtgaattcagaaaaagttaaactgtccctcaggaactttccacacaatgattacgaggacgtctttgaggagccatccgagagcggatctgacccttctatgtggaccgccagaggccctttccgcagagacaggtggtcctcagaggacgaagaagccgctggaccttctcaagctctatctcccctcctctccgacacccgcaagatcgtatcggagggggaattagatcagcttgcacagatccggccacttatttttaactttcatgagcaaacggctatcaaagactgcttgaaaatcttagaggagaaaacagccgcatacgatattatgcaggagttcatgttcaacatcatggatatcgtggctcagatgagagaacagcgatccgggatggtgcagaccaaggagcaatatcatttctgctacgacattgtcttagaagtgcttagaaaattgctcacattggattag

SEQ ID NO: 17470 - DNA, 501 bp, synthetic construct
  source 1..501: mol_type = other DNA; note = Synthetic coding sequence
atgaaggcgattaagaagtccctcaccgaggaagagtatctgtatctggatttctcccaccagactgaagggtgcattttccctctacatacttcagttaccctgttcctgctgagctactgtgattgcaaaatctttaagatctgtctcgtggtgacaaaggaggtttcaagggactcaagcctcctccgggacgatctgattcaagacgtcgagattcagattatctcccggcaggaacttccgccgatcgtgcagaactgttgtctgccggcagtcgtggaacggagcgacaatttttgccgagcaggcctggctgtggtccttcgacatatcatccaaaagtcctacgaggctgacccactgaaaaaagaactgctggaattgctcggttttaagaagacatgcttaaaagcttgtgccgaggtctctcagtggacacggctctgtgaattgacaattcccctcgccattgaaaattttttacgagaatcctcatag

SEQ ID NO: 17471 - DNA, 363 bp, synthetic construct
  source 1..363: mol_type = other DNA; note = Synthetic coding sequence
atgtggaaagtggttaacctgccaacagatcttttcaactcagtcatgaatgtcgggcgctttaccgaggagattgaatggctgaagttcttggctctggcctgtagcgccctcggagtaactattacaaagacactgaagatcgtgtgcgaggtccttagttgcgaccataatgggggcctacctcgaattccattttcaaccttccagtttctctacacttatattgcagaggtggacggcgagatctgcgcatctcacgtgagcagaatgctcaattacattgagcaggaggtgatcgggcccgacggtttgataaccgttaatgactttacacaaaatccaagggtatggctcgaatag

SEQ ID NO: 17472 - DNA, 351 bp, synthetic construct
  source 1..351: mol_type = other DNA; note = Synthetic coding sequence
atggtgatggaaaagcctagccccctgcttgttggcagagagtttgtgaggcagtactacactcttctaaataaggcacccgaatatctccacaggttctatggacgcaactcctcttacgttcatgggggggtggacgctagtggcaagccacaggaggccgtctacggccagaacgacatacaccacaaagtattatctttaaatttttcagagtgccacacaaaaataagacacgtcgatgctcatgcgactctgtcagacggagtggtagtccaggtgatggggctgttgagcaattctggacagcccgaaagaaagtttatgcagacattcgtgctggctccctag

SEQ ID NO: 17473 - DNA, 480 bp, synthetic construct
  source 1..480: mol_type = other DNA; note = Synthetic coding sequence
atgtccgatcataggtacggggacggcggaagcactttccagagcaccactggacattgcgtgcacatgcgaggactgccctacagggcgacggaaaacgatatttacaattttttctcccccctgaatcccgtgcgtgtccatatcgagatcggtccagacggcagagtcactggcgaagcagacgtggagttcgctacacacgaagacgcagttgccgcaatgagcaaggacaaagcaaacatgcaacatcgttacgtagagctgttcttgaattctaccgcaggagcttcaggcggcgcgtatggcagccagatgctcggcggaatggggctttcaaaccagtcaagttacggtgggccagcctctcagcagctgtccgggggctacggcgggggatatgggggccagagcagcatgagcggctatgatcaggtgctgcaggaaaacagctcggactttcagagcaacatcgcatag

SEQ ID NO: 17474 - DNA, 411 bp, synthetic construct
  source 1..411: mol_type = other DNA; note = Synthetic coding sequence
atgatcgtcaatgattacgaggggaacgactctgaggcggaagatcttaacttccgggagacacttccctcgtcatctcaggaaaatacaccccggtccaaagtgtttgaaaataaagtcaatagcgaaaaagtgaagctctcattacgcaactttccccacaacgattatgaggacgtgtttgaggagccctctgagagcgggtccgatccttccatgtggaccgcacgcgggcctttccggagagaccggtggagcagcgaggacgaggaggcagccgggccctcccaggccctatcaccccttctctcggtgcagcaccatggctactctggtcctaatgagcgcaccaccttttggcacggatctaacgaaggagccgtaagccttctcttacggtattgcgcatag

SEQ ID NO: 17475 - DNA, 462 bp, synthetic construct
  source 1..462: mol_type = other DNA; note = Synthetic coding sequence
atgaaactaacgagcgagaaactgcccaagaaccctttctacgctagcgtgagccaatacgccgctaaaaatcagaaattttttcagtggaaaaaggaaaagactgattacacacatgccaatctggtcgataaggcccttcagttactgaaggaaaggatcctgaaaggggatacactggcctattttctgcgggggcaactctatttcgaagaggggtggtacgaagaagccctagaacagttcgaggagataaaggaaaaggaccatcaggccacttaccaactgggagttatgtattatgacggcctggggaccacattggatgcggaaaagggcgtggactacatgaagaaaatcctagatagcccttgtcccaaagcgagacacttgaaatttgcagctgcatacaatttggggcgggcctactatgagggtaagggcgtgaaacgtagcaattag

SEQ ID NO: 17476 - DNA, 489 bp, synthetic construct
  source 1..489: mol_type = other DNA; note = Synthetic coding sequence
atggaggccttgcttgagggcatacagaacagaggccacggcggagggtttctcacttcatgcgaggcggagttgcaggaattgatgaagcagatcgatattatggtggcccataagaagagcgaatgggagggcaggacgcatgctctggagacgtgtcttaagatacgggaacaggaactgaaaagccttcggagccagctggacgtcacccacaaagaggtggggatgctgcaccagcaggtggaggagcacgaaaagattaagcaagagatgaccatggagtataagcaggaattgaagaagctgcatgaggaactgtgcatcctcaagagatcatacgagaaactgcagaaaaaacagatgagagagttccggggtaacacaaagaaccacagggaggaccgcagcgagatagagaggctgaccgccaaaattgaggaatttaggcaaaaatccctggactgggagaaacagcggttgatatag

SEQ ID NO: 17477 - DNA, 1530 bp, synthetic construct
  source 1..1530: mol_type = other DNA; note = Synthetic coding sequence
atgaagcgcggaaggctgccctcctcatctgaagactcagacgataacggaagcctaagtaccacctggagccagaattcaagatcccagcatcgccggagttcctgctctcggcacgaggacagaaagcccagcgaggtgtttcgcacggacctgattactgctatgaagctgcacgactcctaccagctgaaccccgacgagtactacgttctggctgacccctggcgtcaggagtgggagaagggcgttcaggtccccgtgtcccctgggacgattcctcagccagtggcccgtgttgtcagcgaggagaaatccctcatgttcattcgccccaaaaaatacattgtgtcctccgggagtgagcccccggaactgggctacgttgatatccggacactggcagatagcgtttgccggtatgatctgaacgacatggacgctgcttggcttgaactaacaaatgaagagtttaaagaaatgggaatgcctgaattggatgagtacactatggaacgcgtccttgaagaatttgaacagcgctgctatgataacatgaatcacgcgatcgagactgaggaaggcctcggcattgagtacgatgaggatgtggtatgcgacgtatgccagtctccagacggagaggacggcaacgagatggtattctgcgacaaatgtaacatctgtgtgcatcaggcctgctatggtatcctgaaagtacccgagggttcatggctgtgtcgtacgtgcgctctgggagtccagccaaaatgcctcttgtgtccgaagaaaggtggagccatgaagcccacacgaagcggcaccaaatgggtgcatgtttcatgcgccctttggattccggaggtcagtattggatcccccgaaaaaatggagcccatcaccaaggtatcccacatcccttcctctagatgggcgctagtgtgctccctatgtaacgagaaattcggagcctctattcagtgttctgtgaaaaattgtcgcacggctttccatgttacctgcgcttttgacagagggttagaaatgaaaaccatacttgccgaaaatgatgaggtgaagtttaaatcttactgtcctaagcacagtagccacagaaagccagaagaatcccttggtaagggggctgctcaggagaatggcgcccctgagtgctctcctaggaaccccctggaacccttcgcatctttagaacaaaatagagaggaggcacacagagtgtctgtgcggaaacagaagctgcaacagctggaagatgaattctacacgttcgttaatcttctggatgtggctagagccctgaggctgccggaggaggtggtagactttttataccagtactggaaacttaagcggaaagtgaactttaataagcctttgatcactcctaaaaaggacgaggaagataatttggctaaacgggaacaggatgtgctgtttagaaggctccagcttttcacacatcttcgacaggatctggagcgtgttatgatagacacagatacactgtag

SEQ ID NO: 17478 - DNA, 90 bp, synthetic construct
  source 1..90: mol_type = other DNA; note = Synthetic coding sequence
atgaacggaagagctgatttccgagagcctaatgccgaggtcccacggcccattccgcatataggccccgattacattcccaccgaatag

SEQ ID NO: 17479 - DNA, 1236 bp, synthetic construct
  source 1..1236: mol_type = other DNA; note = Synthetic coding sequence
atgatcgtgaacgattatgaagggaacgactccgaggccgaggacctgaattttcgcgagacccttcccagctcgtcccaagagaacacgccacgttccaaagtgtttgaaaacaaagtgaactcggaaaaggtcaagctgagcttgcgtaatttccctcacaatgattacgaggatgtgttcgaagaaccttccgaatctgggtcggatcccagtatgtggaccgcccgcggtccttttcgtagagaccgttggagtagcgaagacgaggaagctgcgggcccctcccaggcactttctccactgctcagcgacacacgtaagatcgtctccgaaggcgaactggatcaactggcacagattaggccactgatcttcaacttccacgaacagaccgccattaaggactgtctgaagatcttagaagaaaagactgcagcatatgacatcatgcaagaatttatggctctggagttgaaaaatctgcccggagaattcaacagtggaaatcagcctagcaaccgggagaaaaataggtatagagacatcctcccctacgatagcacacgcgttccacttggcaagtcaaaagactatattaacgcatcgtacattcggatcgtaaactgcggagaagagtatttttacatcgccactcagggcccactgctgtccacaatagacgatttctggcagatggttttggaaaataacagcaacgtcattgccatgataacacgagagatagaaggaggaataatcaaatgttatcactattggccaatttccctaaaaaagccccttgagctgaaacatttcagggtgttcttggaaaactaccagattctgcagtacttcatcattaggatgttccaggtggtcgaaaagtcaaccggtactagccatagtgttaagcaattgcagttcacaaaatggccagatcacggcacacctgcctccgctgattccttcatcaaatacatcagatacgcgcggaaaagccacctgaccgggcctatggtggttcattgtagtgccggaattggtcgtactggggtcttcctctgtgtggacgttgttttttgtgccatagtgaagaactgcagttttaatatcatggacattgtagcccagatgcgagagcagcgctccgggatggtgcaaacaaaggagcaatatcacttctgctacgatatcgtgctcgaggttctgagaaaactcctgactcttgactag

SEQ ID NO: 17480 - DNA, 300 bp, synthetic construct
  source 1..300: mol_type = other DNA; note = Synthetic coding sequence
atggtcatggaaaagccctcgccccttcttgtgggaagagagttcgtgcgccagtattacaccctattgaacaaagcaccagagtatctccaccgtttctacggtcgaaactcgagctacgtgcacggtggcgtcgatgccagtggcaagccccaggaggcggtttatgggcagaacgacatccaccacaaggtcctgtcactgaattttagtgaatgccacactaagatcagacatgtcgacgcacatgcaacacttagcgacggagtagtcgttcaggtgatgggattgctcagttag

SEQ ID NO: 17481 - DNA, 705 bp, synthetic construct
  source 1..705: mol_type = other DNA; note = Synthetic coding sequence
atggcctcttccgccaaatccgctgagatgcctacaatctccaaaaccgtgaatcccactcccgacccccaccaggaatatctcgacccaagaataaccatagcactgtttgagatcggttctcattcccccagcagttgggggagcctgccctttctgaaaaattcatctcatcaggtgaccgaacagcagaccgcccaaaagtttaacaatctgctgaaagaaatcaaggacatcttaaagaatatggccggctttgaggagaagatcacagaggcaaaggaactgtttgaagaaaccaatatcacggaagatgtctcggcccacaaagaaaacatccggggactcgacaaaattaacgagatgctaagtacaaatctgccggtctccctcgctccagaaaaggaggacaacgagaagaagcaggagatgatactggagaccaatatcacagaagacgtgtccgcccacaaggagaacattcgtgggctggacaaaattaatgagatgttgtcaacaaatctgccagtctctctggctcctgagaaggaagacaatgaaaagaagcagcaaatgattatggagaaccagaattctgagaatactgcacaggtattcgcccgtgacctggtgaacagactggaagagaagaaggtcctcaacgagactcaacagagtcaagagaaggccaagaatagactatag

SEQ ID NO: 17482 - DNA, 1095 bp, synthetic construct
  source 1..1095: mol_type = other DNA; note = Synthetic coding sequence
atgtacttttgttggggcgccgattcccgcgagctgcaaaggaggcgaacagctggaagtcccggcgctgagttactgcaggcagcatctggtgagcggcacagtttgttgctgctgactaatcatcgcgttctcagctgtggagacaatagcaggggtcagttgggcagaagaggggcacagagaggggagctccccgagccaatccaagccctagagactctcatcgttgacctcgtctcctgcgggaaggagcacagcttagctgtttgccacaagggccgagtttttgcctggggcgcaggatctgaaggccagcttggaattggcgaattcaaggagatctccttcacacctaagaagataatgacgctgaacgatataaagatcatccaggtgagctgtggacattatcacagtctcgcactgagtaaggactctcaggtgttcagctggggaaaaaactcccacgggcagctgggcctcggcaaagaattccccagtcaagcgtcgcctcagcgcgttcgcagcttagagggcattcctcttgctcaggtggctgccggtggggcccacagctttgctctgtcactatgtggtacctcatttggctggggttctaatagtgccggtcagctcgctctctctggtcggaacgtccctgtgcagtcaaacaagccgctgtcagtgggcgccttgaagaacctcggggttgtgtacatctcatgtggggatgcccatacggccgtcttgacacaggatgggaaagtcttcacgttcggtgataaccggtctggccaacttgggtattccccaacaccagagaaaagagggcctcaactcgtggaaagaatcgacggcttagtgagccagattgactgtgggtcttaccatacattagcttacgtgcataccaccggccaggtggtttcctttgggcatgggccgtccgacacatccaagccgacgcatccagaagccctcaccgaaaacttcgatatctcctgtctgatcagtgccgaggatttcgtcgacgtgcaggtgaaacacatctttgccggtacttatgccaactttgtcaccacgcaccaatag

SEQ ID NO: 17483 - DNA, 348 bp, synthetic construct
  source 1..348: mol_type = other DNA; note = Synthetic coding sequence
atggccaaatacaatacgggaggcaatcccactgaggatgtttccgtgaactcaagaccgtttagagtcactggtcctaactcttcctcaggaattcaggcacgcaagaaccttttcaataatcaggggaacgcgtccccaccggccggtccctccaatgtcccaaaattcgggtccccaaagccccccgtggccgttaagccctccagcgaggagaagccagacaaggagcctaaacctccttttctgaagcccacaggtgcaggacagcggtttggcacccccgcaagcctgaccacccgggaccccgaagctaaggtcgggttcctgaaacccgtggggccgtag

SEQ ID NO: 17484 - DNA, 486 bp, synthetic construct
  source 1..486: mol_type = other DNA; note = Synthetic coding sequence
atggccggaatcctccggctggtggtgcagtggcctcccggaagactacagacagtcaccaagggtgtcgaatccctgatctgcaccgattggatcagacataaatttaccagatcacgcatacctgagaaagtgttccaggcatcgccggaagatcacgagaaatatggcggagaccctcaaaacccccataaattacacatcgttacgaggattaagtcaacgaggcgacgaccctattgggagaaagatattataaaaatgttgggattagagaaggcgcacacgccccaggtacacaagaacatcccgagcgtgaacgcgaagctaaaagtagttaagcacctgatcagaatcaagccactcaagctcccacagggtctgccagccgaggaaaatatgagcaacacctgccttaagtctactggcgaactggtggtccaatggcacctcaaacccgtggagcagaaggcgcacgagtcctag

SEQ ID NO: 17485 - DNA, 516 bp, synthetic construct
  source 1..516: mol_type = other DNA; note = Synthetic coding sequence
atgaacggccgcgcagactttagagagcccaatgccgaggtaccgcgtccaattccacatatcggacccgactacattcctaccgaggaggagcgaagagtctttgccgaatgcaacgacgagtctttttggttccgctcagtgccattggcagctacttccatgctgatcactcaaggcctcatttccaagggcatcctgtcttcacatccaaaatacggcagcattcccaagctgattttagcctgtataatgggctatttcgcagggaagctttcctacgtcaaaacctgtcaggagaagttcaaaaagctcgaaaactcccctctcggagaagccctccggtcgggtcaggcacggcgaagttcccccccaggccactactatcaaaagagcaaatacgattcttcggtgagcggacagtcatccttcgtgacctcccctgccgctgacaatatcgagatgctgccgcattatgagccaatacctttttcaagctcaatgaacgaatcgtag

SEQ ID NO: 17486 - DNA, 438 bp, synthetic construct
  source 1..438: mol_type = other DNA; note = Synthetic coding sequence
atgtcaagtccccgcgattttagagcagaacctgtaaacgattatgaggggaacgatagtgaggcagaggacctgaacttcagagagaccctgccttcttcttcccaggaaaataccccgaggagcaaagtgttcgaaaacaaggtgaattcagagaaggtgaagctgagtctgcgcaattttccccacaacgactatgaagatgttttcgaagagccttccgaaagtgggtctgacccatctatgtggacagcacgtggtcctttccggcgcgatcgttggagctctgaagacgaggaagctgcaggcccctctcaggcactatcgcctctgctgtccgtgcaacaccatggctattcaggtccaaatgaaagaaccaccttctggcacggatccaatgaaggagcggtctcactattgctccgttattgtgcttag

SEQ ID NO: 17487 - DNA, 243 bp, synthetic construct
  source 1..243: mol_type = other DNA; note = Synthetic coding sequence
atggtcaccagcctgaacgaggacaacgagtccgtgacagttgaatggattgagaatggtgacactaaggggaaagagattgatttggaatctattttttccctgaatcctgaccttgtacctgacgaggagattgagccatcacctgaaacacccccaccacctgccagctccgccaaggttaacaagatcgttaagaacagacgaaccgttgcttccatcaagaacgacccacctagttag

SEQ ID NO: 17488 - DNA, 123 bp, synthetic construct
  source 1..123: mol_type = other DNA; note = Synthetic coding sequence
atgaaagcaatcaagaagagtttgaccgaagaagagtatctgtacctggatttttcccaccagaccgaggggtgcatctttcccctgcacacaagcgtgaccctgttccttctgagctactag

SEQ ID NO: 17489 - DNA, 192 bp, synthetic construct
  source 1..192: mol_type = other DNA; note = Synthetic coding sequence
atggaagcgctactcgaggggatccagaatcgcggtcatggcggaggcttcctgacctcctgcgaggctgaattgcaggaactcatgaaacagatcgacatcatggtggctcacaaaaagtcagagtgggaaggccgcacccacgcgctcgagacctgtctgaaaatcagagagcaggagctgaaatcatag

SEQ ID NO: 17490 - DNA, 594 bp, synthetic construct
  source 1..594: mol_type = other DNA; note = Synthetic coding sequence
atgtggaccgccaggggacctttccgccgagataggtggtcgtcagaagacgaggaggcggccggtccctctcaagctctgagccctctcctgtcagacaccagaaagatcgtgtcagagggagagctggatcagctggcccagatccggcctctgatcttcaattttcacgagcagacagcgattaaggactgcctcaagattttggaggagaagacagcggcctatgacattatgcaggagttcatgaccgggacgtcgcacagtgtcaagcagctgcagtttaccaaatggccagatcacggcacccccgcttctgcggactcttttattaagtacataagatacgcgcggaaatctcacctgaccggccctatggttgttcattgctctgccggtatcggacggacaggggtattcctctgtgtggacgtggttttctgcgcgattgtgaagaattgctccttcaatatcatggacatcgtggcccagatgcgcgagcagcggtctggaatggtgcaaacaaaagaacagtatcatttttgctacgatattgttctcgaggtgctgaggaagcttctgacactggactag

SEQ ID NO: 17491 - DNA, 2529 bp, synthetic construct
  source 1..2529: mol_type = other DNA; note = Synthetic coding sequence
atgaaaaggggtagactgcctagctcttcagaggactctgacgataacggttccctatccaccacctggtcccaaaacagccggtcacagcacaggcgatctagctgctcccggcacgaggatcggaaaccgagcgaagtgtttcggactgatttaatcaccgcgatgaagttacacgactcctaccagttgaatcctgacgagtattacgtcctggctgatccctggagacaagaatgggagaagggagtccaggttccagtgtctccaggcactatccctcagccagttgcacgtgtggtatctgaggagaagtcactcatgtttataagaccaaagaagtacattgtgtcatctggaagcgagcccccggaactcgggtacgtagatatacgaacactggccgacagcgtctgcagatacgacctcaatgatatggacgctgcctggttggagctgactaatgaggagtttaaggagatgggcatgccagagcttgacgagtatacaatggaacgggttctggaggaattcgaacaaagatgctatgataatatgaatcacgcaatagagactgaggaaggtttggggatcgaatacgatgaggatgttgtgtgcgatgtttgtcaatcaccagacggcgaggacggcaacgagatggtcttttgcgataagtgtaacatttgcgttcatcaggcttgttacggcatcttaaaggtgccggagggtagctggttgtgccgtacttgcgctctcggggtacagccgaaatgtctcctatgtcctaaaaaggggggggccatgaagcccactcgctccgggacaaagtgggttcatgtgagctgcgcactgtggattccggaggtctctatagggtcccccgaaaaaatggagccaattaccaaggtcagccacatcccctcatctcgatgggccctggtgtgctcattgtgtaacgaaaaatttggcgcctctatccagtgcagcgtcaagaattgccgcaccgcttttcatgtcacgtgtgcctttgacagggggctggagatgaagaccattttggcagagaatgacgaagtaaaattcaaaagctactgtccgaaacacagtagccatcgaaagcccgaggagagtcttggaaaaggagccgcgcaggagaacggggcaccggagtgttctcctcggaatccgctcgaaccttttgcgagcttggagcaaaaccgcgaagaagcccatagagtctcagtgaggaagcagaagctgcaacaactcgaagacgagttttacacttttgtcaatctgttggatgtagccagggcgttacgactgcccgaggaggtggtcgactttctgtaccagtattggaagctcaagcgcaaggtcaattttaacaaacccttgattactcccaagaaggacgaggaagacaacctggctaagcgcgaacaggacgtgctattccgccgtcttcagttattcacccacctaaggcaggacttagaacgcgttcgaaatcttacgtacatggttacccgaagggaaaagatcaaacgctcggtgtgcaaggtgcaagagcagatcttcaatctttacacgaagctcttagaacaggagagagtgagcggcgtgccttccagctgctcttcctccagcctggaaaatatgctgctctttaatagcccatctgtcggtccagatgctcccaaaatcgaagatctcaaatggcatagcgctttcttccggaagcagatgggaacatccttggtacattctctgaagaagccccataagcgggaccctctacagaattcaccagggtcagaaggaaagaccctgctgaaacagcctgacctgtgtggccgcagagagggaatggtggtccctgaaagtttccttggcctcgagaagacattcgccgaagcccgccttatttcggctcagcagaagaacggggtggttatgccagaccacgggaagaggcgcgataatcgatttcactgtgacctcattaagggagatctgaaagacaaatcttttaaacagtctcataaacccctgcgatctaccgatgtaagccagcgccatctggataacacccgcgcggcaacatctccaggggtcggacagagcgcccctggaactagaaaagaaatcgtgcctaagtgcaacgggtcattgatcaaggtgaactataaccaaacagcggtgaaggtcccgaccaccccagcatctccggtgaagaactggggggggtttcgcatccccaagaagggtgagcgtcagcagcaaggggaggctcacgacggagcctgccatcagcacagcgattatccttaccttggcctggggcgagttcccgcgaaggagcgtgcaaaatcaaaactcaagagtgataacgagaatgacgggtacgttccggacgtggagatgagcgattctgagtctgaggcaagtgaaaaaaagtgcatccacacatcaagtaccatttctaggaggacggacatcattaggcgctctatccttgcctcatag

SEQ ID NO: 17492 - DNA, 2490 bp, synthetic construct
  source 1..2490: mol_type = other DNA; note = Synthetic coding sequence
atggccaaatacaacaccggaggtaacccaaccgaggatgtctcggtgaactcgcggcctttcagagtgacaggaccaaactcaagcagcggtatccaggcccggaagaatctgttcaacaatcaaggaaatgccagccctcctgccgggccaagtaatgtgccaaagtttgggagccccaaacctcctgtagctgtgaaacccagtagtgaagaaaagcccgataaggaaccaaagcctccatttcttaaaccaaccggcgcagggcagcggttcgggactccggctagcctcacaactagagacccagaggccaaagtaggattcctgaaacctgtggggcctaaaccaataaacctgcccaaagaggattcaaaacctaccttcccttggccccccggtaacaagccctctctgcattctgtcaaccaggaccacgatttgaagcccctggggccgaagtccggccctactccacctacgtcggagaatgagcagaagcaagctttcccaaagctgactggagtgaaggggaaattcatgtccgcgtcccaggatttggagccgaaaccgctattcccaaagcctgctttcggccagaaaccacctctgagtactgaaaatagtcacgaggacgagagtccaatgaagaacgtgtcgtcctcaaaaggttcacccgctcctctgggggtgcggagcaagagcggaccactgaaaccggcgagggaagattcagagaacaaggatcatgcaggcgaaatttctagtctgcccttcccgggagtggtgctgaaaccagccgccagcagaggcggcccaggattatccaagaatggggaagaaaagaaagaggatcggaagatcgacgctgccaagaacacattccagagtaaaattaatcaggaggaacttgcatcaggcacacctcccgcaagatttcctaaagctccctctaagcttaccgtcggcggtccatgggggcagtcgcaggaaaaggagaagggagataaaaatagcgccaccccaaagcagaaacccctccctccattatttacactcggacccccaccaccgaagcccaacaggccgcccaacgtggacctgaccaagtttcacaagacttcatccgggaactccacttccaagggccagaccagctactccaccacttccttacctccaccgccaccttctcatcctgcatcccaacctccgttgccagcctcccatccttctcagccacccgttccatctctccccccaagaaacattaagcccccttttgatctgaagtcccccgtcaacgaggacaaccaggacggagtgactcattcagacggggctgggaacttagatgaagagcaggacagtgaaggagagacctacgaggatatcgaagcctcaaaggagcgggaaaagaagagagagaaggaagagaagaagcggctggagttggagaagaaggaacagaaggaaaaggaaaagaaagaacaggagatcaaaaaaaagttcaaattgaccggaccaatccaggttatccatctagcaaaagcctgttgtgatgttaagggagggaagaacgagctctcctttaagcagggagaacaaattgagattattaggatcaccgacaatcctgaggggaagtggctgggccgcactgcccgcggatcatatggctatatcaagactactgccgttgaaattgactacgatagtcttaaacttaaaaaagatagcctgggggctccatcacgacccattgaggacgaccaggaagtgtacgacgacgttgcggagcaggatgatattagttcccacagtcagtccggctctggcggcatatttcctccaccacctgacgacgatatttatgacgggattgaagaagaggatgccgatgatggtagcacacttcaggtccaggagaaatcaaacacttggtcatgggggattctgaagatgctgaagggcaaagatgacagaaagaagagcattcgggagaagcctaaggtatccgactctgacaacaacgagggaagtagtttccccgcccctcccaaacagttagacatgggagacgaagtgtacgatgacgtggatacctcagatttcccagtgagctcagccgagatgtctcagggcacgaacgtgggaaaagctaaaacagaggaaaaggacctcaaaaagctgaaaaagcaagagaaagaagaaaaggactttcgtaagaaattcaaatatgacggggagatccgcgtgctctactcgacaaaggtgactacttcaataactagcaagaagtggggcacccgggaccttcaggtgaaacctggtgaatcgctcgaggtgatccagacaacggatgatactaaggtgttgtgcagaaatgaggaaggaaaatacggctatgtgctgagatcatacttggcggataatgatggcgagatttacgacgatatcgccgatggttgcatttatgacaatgactag

SEQ ID NO: 17493 - DNA, 810 bp, synthetic construct
  source 1..810: mol_type = other DNA; note = Synthetic coding sequence
atgattgtcaatgattacgaaggcaatgactccgaggccgaggatcttaatttcagggagacactcccctcctccagccaggagaacactccaagatcgaaggtgtttgagaacaaagtcaattcagagaaagtcaaactgtctctgcgaaattttccgcacaatgactatgaggatgtgttcgaagagcctagtgagtccggctcggacccatctatgtggactgcccgcggcccttttaggcgggatagatggtctagtgaggacgaggaggcagccgggcccagccaagcactctccccactgctgtcagacacgcgtaagatagtgagcgaaggtgagctggaccagctcgctcagattcggccactgatattcaactttcatgagcagactgcgatcaaagattgcctgaagatcctagaagaaaaaacagctgcgtacgacatcatgcaggagtttatgactggcacttcacactctgtgaagcagctacagtttacaaagtggccagaccatggaacaccagcttccgcagatagttttatcaaatacatcagatatgcaagaaagagtcacctcacgggccccatggtggtccactgctcagcggggatcggtaggacaggtgtgttcctgtgcgtcgacgtggtgttctgtgccatcgtgaagaattgtagtttcaatattatggatattgtagcccaaatgcgagagcaaaggagcggaatggttcagacaaaagagcagtatcacttttgctacgacatagtgcttgaagtactcagaaagctccttaccctggactag

SEQ ID NO: 17494 - DNA, 492 bp, synthetic construct
  source 1..492: mol_type = other DNA; note = Synthetic coding sequence
atgatgttgggcaccgaggggggtgagggcttcgttgttaaggtcaggggacttccgtggtcctgctccgccgacgaagtgcaacgtttcttttccgactgtaaaattcagaacggggctcagggtatccggttcatctacacaagagaaggacggcccagtggcgaagcatttgtcgagttggagtcagaagacgaggtgaaattggctcttaaaaaagacagagagaccatgggacacagatacgttgaagtgtttaagtccaacaacgtggaaatggattgggtcctcaagcacaccgggcccaacagcccggatactgccaacgacggctttgtacggctccgcggcctcccctttgggtgcagtaaagaggagatcgtgcagtttttttccggattagagatcgtacctaacggtatcaccctgcctgtggattttcagggcagaagtaccggggaagcttttgtgcagttcgccagccaggagtag

SEQ ID NO: 17495 - DNA, 759 bp, synthetic construct
  source 1..759: mol_type = other DNA; note = Synthetic coding sequence
atggccgccactgcacgagaagatggggcaagcggtcaggagagggggcaacggggctgcgagcactatgacagagggtgcctgctcaaggctccttgctgtgataagctttatacttgtagattgtgtcacgataacaatgaggatcatcagcttgatcgctttaaagtaaaggaggtccagtgcatcaattgcgaaaagatacaacatgcccagcaaacctgcgaagaatgtagcaccctcttcggcgagtactactgcgacatctgtcacctgtttgataaggataaaaagcagtaccactgcgaaaactgtggaatttgtcgtatcggaccgaaagaagatttcttccactgtttgaagtgcaacttgtgtctagcaatgaatctccagggacggcataagtgcatcgaaaacgtctcgagacagaattgtccaatttgcctggaagatatccacacatctcgagtggtcgcccacgtcttgccttgtggccacctcctccaccggggttacagatgcccactctgtatgcacagcgccctcgatatgactcgctactggcgtcagctcgatgatgaagtggctcagacccccatgcccagtgagtaccaaaatatgacagtggacatactctgtaatgattgcaatggtaggagcactgtgcagttccatatattgggaatgaaatgcaagatctgcgaatcttataataccgctcaagcagggggacgacgaatctccctggatcaacagtag

SEQ ID NO: 17496 - DNA, 594 bp, synthetic construct
  source 1..594: mol_type = other DNA; note = Synthetic coding sequence
atgtggacagcgaggggcccctttaggcgggacaggtggagttcagaggacgaggaggctgccgggccctctcaggccctgtcccctctgctgtccgacactcgcaaaattgtctcagagggcgaactggaccaattggcccaaatacgccctctgatctttaacttccacgagcaaacagctatcaaggactgcctcaaaattttggaggaaaaaaccgccgcctatgacatcatgcaggaattcatgaccggcacctcccactcagtgaagcagctgcagtttactaagtggcctgatcacggaacgcctgccagtgcggatagctttattaagtatatcaggtacgcaaggaagagtcatctgacagggcctatggtggttcattgttccgccggaataggccgcacaggcgtttttctttgcgtcgacgttgttttctgcgctatagtgaagaattgcagcttcaatattatggatatcgtggcccagatgcgcgaacagcgctctggaatggtacaaaccaaggaacagtatcatttttgttatgacatcgttctggaagtgttaagaaagctattgactctggattag

SEQ ID NO: 17497 - DNA, 4203 bp, synthetic construct
  source 1..4203: mol_type = other DNA; note = Synthetic coding sequence
tgacctccacccccccccccaccaatgtggaaccccatgattccagcttttgatctcttccagggcaaccatggcttcgtggccccagtcgtgacgacagctgctcattggaggtcggtaaactacacgttcccgccctctgtaatctcgcacacatcaccaacgaaggtatggcgaaataaggacggaacaagtgcgtaccaggtccaggagacaccagtgtcacaagtagtgcggaagaaaacttcctatgtgggtctcgtcttagtgttgctgcgaggcctgccaggctccggaaaaagctttctggcacggactctgcaggaagataaccctagtggagtcattttatcaaccgatgattatttctacatcaacggacagtaccagttcgatgtcaagtaccttggagaagcgcatgagtggaaccagaaccgtgctaaagaggcctttgaaaagaagataagcccaattattatcgataacactaacctgcaggcttgggaaatgaaaccttatgtagcactgtcccagaaacacaagtacaaggtcttgtttcgagaacctgatacgtggtggaagtttaagccgaaagagctagcacggagaaacattcacggggtgtctaaagagaagattacccgtatgcttgagcactaccaacgcttcgtaagtgtgccaatcataatgtcctcctccgtgcccgagaaaatcgagcgcattgagttatgtgcatactcatgtgaagatagaagcacttccccaagggatgacgaggacattatctccgagaaggaagaaaacattctcagtctgagccttaaacacttggagtttacggaggagaaaaacttggacgtcacaaaggagaccatgctgccagaaaatgtggcttatctgagcaatgccgacttgaacaagcggcgtaaagagatctccgatatgaacccatcgatccagagtgccctcatcttagagactcctcacatgtacttctccgactcggagtctaagctgcaagcgacagacaagtccgagaatgagcagatagagatggtagccgttaaaggatatagcaagacggacactgattcaagtatggagcgggtctccccttccacttgttgctccgagaacaatcaagaggattgtgatttggcgaactccggaccgttgcagaatgaaaagtccagtccaggtgagatcgtggaggaacgcgccacagtgaccaagaaagcctttggcaagcagaaatccaagagcacactagagaagttcccccgccatgagctgtcgaactttgttggtgattggccggtcgacaagacaattggtcaaaggactaaacgcaacaggaaaactgagaagacctcatccgtgcaaagtgacaaaaagtacaactacccccaaagtcacaagttagtcaattctgtcagcgtgaacaccgattgcgtccagcagagagggtcaccccatgaaagcgtggaggacggtaggaagtcccaatgtgatgacgcaagcgaaccattgaactcctataagtatgatgcctacaaaaatatcgataagaacagcttcaacatcatgggcgattggccgagcagtgattcactggcccagcgtgaacaccggtcccggatgcctaaaaccggactgtccgagcctaacctggaaatcggcacaaatgacaagatgaatgagatcagcctgtctaccgctcacgaagcctgttggggcacaagttcccagaagcttaaaacattaggcagtagcaacctaggcagctcggaaatgctgctgagtgaaatgacatgcgagagtcagacttgcctatcaaagaagtcccatgggcaacatactagcctacccttgacattcacaaattcagctcctaccgtctctggcgtagtggagccacagacgctagctgagtgtcaggagcagatgcctaaacgcgaccctgggaaagaggtcgggatgtgcactcaaacagaacctcaggacttcgccttgctgtggaagattgaaaaaaacaaaatttcaatatccgatagcatcaaagtactaactggacgacttgatgggttcaagccaaaagtgtttaacataaatacgaaatcggatgtccaggaagcgatcccttacagggtgatgtatgacaaaagcacgttcgtggaagagtcagagctaacatctgctgacgaatcagaaaatcttaacatcctctgcaaactgtttggatccttttcactggaagctcttaaggacctgtatgagcgctgtaacaaagatataatctgggctacatctctcctcctagatagtgagaccaagctttgtgaggacaccgaattcgaaaacttccagaaatcatgtgacgggagtcaaatcgggccctttagcctgggactgaaccttaaggagattatcagccaacgagggaccctggagaactctaatagtccagtacccgagttttcacacgggatcggaatttccaacgctgattcgcagtccacatgcgacgccgaaagggggaattccgagcaggcagagatgagagcagtgactcctgagaatcacgagtccatgacgtccatttttccctcagcagcggttgggctgaagaacaacaacgatatcctccccaacagccaggaagaacttctctactcgagcaagcaatcctttcccggcatcctgaaggcaacaactccaaaggatatgagcgagacagagaagaaccttgtggttactgagactggcgataatatacatagtcctagccatttttccgacatcttcaacttcgtgtctagcactagcaaccttgaactcaatgaggagatctattttactgactcactggaaataaagaggaacgagaactttcccaaggattatgtgaaatttagcgacgaggaggaatttatgaacgaagacgagaaagaaatgaaagagattctcatggcaggtagttctcttagcgccggagtaagtggcgaagataaaacggagatactgaatcctacaccagcaatggcaaagtcactaacaatagactgtctcgaactagcattgccccccgaactcgcatttcagctgaacgaattattcgggccagtggggatcgacagcggctctttgaccgtggaggattgtgtggtccacattgatttaaatctggccaaggtgatacatgagaagtggaaagagagcgtgatggaaagacagcggcaggaagaggtttcctgtggaaagtttatgcaagacccgtccctcgtgggtcacacaggcctcgataatccggaacagaaatctagccaaaggactggtaaaaagcttcttaagaccctgacagcctcagaaatgctgccactccttgaccattggaacacccaaacaaagaaggttagtttgcgcgaaatcatgtccgaggagatcgccctgcaggagaaacacaatctcaaacgtgagaccctgatgtttgagaaggactgtgccacaaagctgaaagagaagcagctgtttaaaatttttcctgccataaaccagaatttccttgtcgacattttcaaggaccacaattacagcttagaacataccgtgcagttcctgaattgtgtgctcgagggcgaccccgtgaagactgtcgtggcgcaggaattcgtgcaccaaaatgagaatgtcacgtcccacaccgggcagaagtccaaggaaaagaaggattttgaatacccggactatgatgactatagggcagaggcctttctgcaccagcagaagcggatggaatgttactccaaggccaaggaggcctatcgtatagggaagaagaacgtggccaccttctatgcccagcaggggacccttcatgaacaaaaaatgaaggaagctaatcaccttgccgccatcgagattttcgagaaagttaatgctagcttgctgcctcagaacgttctggatctccatggcctccatgtggatgaggccctcgaacaccttatgcgcgtgctggagaagaagacggaagaattcaagcagaatggcggtaagccctacctctctgttatcaccggacggggcaatcacagtcaaggaggtgtagcccgtatcaaacctgctgttatcaagtaccttatctcccactctttcagattttcagagatcaagcccggctgcctgaaagttatgctgaagtag

SEQ ID NO: 17498 - DNA, 237 bp, synthetic construct
  source 1..237: mol_type = other DNA; note = Synthetic coding sequence
atgctgtgttggggctactggtcactcggccagccaggtattagcaccaatctgcagggtatcgttgcagaaccccaagtttgcggattcatttctgatcgaagtgtgaaggaggttgcttgtgggggaaatcactctgtatttctgctggaggatggtgaggtttatacttgcggtctgaacaccaaagggcagcttggccatgagcgagaaggcaacaagcccgagcagatttag

SEQ ID NO: 17499 - DNA, 738 bp, synthetic construct
  source 1..738: mol_type = other DNA; note = Synthetic coding sequence
atgaatggcagagccgacttcagggaaccaaacgcagaggtgcccagaccaataccacatattggaccagactatatccccaccgaagaggagaggagagtcttcgccgagtgcaacgatgaatctttctggttccgatctgtgccactcgccgccaccagcatgcttataacccagggacttatttcaaaaggcatcctgtcctcacaccctaagtacggaagtatccctaaacttatcctcgcatgtattatgggatacttcgcaggaaagctcagctatgtgaagacctgtcaggagaaatttaagaagctggaaaacagccctctgggtgaagcattgcgctcagggcaagctcggagatcctcaccacctgggcattattatcaaaaatcaaaatacgacagctctgtatctgggcagtctagtttcgtgaccagtcccgccgccgacaatatcgagatgcttccccactacgagcctatcccattctcgtcaagcatgaacgagtctgctccgacaggtattacagaccatatcgtgcaaggtccggatcccaatctggaggagtcaccgaagaggaagaacattacatacgaagagttgaggaacaaaaacagagagtcttatgaagtgagcctcactcaaaagacagacccttctgtgaggcctatgcatgagagagtccccaaaaaggaagtgaaggttaataaatacggagacacctgggatgagtag

SEQ ID NO: 17500 - DNA, 2112 bp, synthetic construct
  source 1..2112: mol_type = other DNA; note = Synthetic coding sequence
atggaagctttgctcgaagggatacagaacagagggcacggcgggggctttttgacatcctgtgaagctgaattacaggagctgatgaagcaaattgatatcatggttgctcacaaaaaatctgaatgggagggcagaactcacgccctggaaacctgcctgaaaattcgggagcaggaactgaagagtttacgatctcaactcgatgtgactcacaaggaggtcggtatgttacaccagcaagtcgaggaacatgagaagatcaaacaggagatgactatggagtataaacaggagctgaagaagctgcacgaggaactctgcattttgaagagatcttacgaaaaactgcagaagaagcagatgcgcgagttccgcggcaacacaaagaaccatcgggaggaccgatccgagatcgaaagattaaccgccaaaatcgaggaatttagacagaaaagcctggattgggagaagcagaggctcatataccaacagcaggtgagctccctggaagcccagcgaaaagccttagccgagcagtctgagattatccaggcacagctggtcaatcggaagcagaaattggagtctgtggaactcagcagccagagtgagattcaacacctgtcttctaagctggagcgtgccaacgacactatttgcgctaacgaactcgaaattgaacggttgacaatgagagtgaacgacttggttgggacatcaatgaccgttctgcaagaacagcagcaaaaggaggaaaaattgagggagagcgaaaaacttctggaggccctgcaggaggaaaaacgagaactcaaagctgctctgcagtcccaggagaatctcatccatgaggcaagaatccaaaaggaaaaactgcaggagaaagtgaaggccacaaatacccagcacgccgtagaagccatcagacctcgagaggagtcgctggccgagaagaagtacactagtcagggtcagggcgatttggactctgtgctgtcccaattgaacttcacacatacttctgaggacctgctgcaagctgaggtcacgtgcttggagggctcgttggagtcggtctctgcaacctgcaagcagctgtcgcaagagctcatggagaagtacgaagagcttaaaagaatggaggctcacaataacgagtacaaagcggaaatcaaaaaattgaaggaacagatcctgcaaggcgagcagtcatactcaagcgcgctggagggcatgaagatggagatcagccacctcacccaggagctgcaccagcgcgacatcaccatcgcttccacaaagggcagttcatccgacatggaaaagagattaagggctgagatgcagaaggccgaagacaaggcagtcgaacacaaggaaatactcgaccaactagagagcctcaagctcgaaaatagacacctttccgagatggtgatgaagcttgagttaggactgcatgaagcgaaagaaatctctctcgccgacttgcaagagaactatattgaggccctgaacaaactggtctccgagaaccagcagttacaaaaagatctgatgaacactaagagccagctcgagattagtactcagatgtgtaaaaaacaaaatgaccgcatatttaagcccactcactctaggaccaccgaattcaagaatacagaatttaaaccaacgcacggacagcatagacacgatggtattaaaacagaacattacaagactgatctgcattcccctagagggcaagcttccgactctatcaacccgatgtcgagagttcttagccctctgagccctcagatttcgccctgcagtagcacccggtccttgaccagttacagcctctgcaagacacattcactcccctccgctttggataccaatgaggcaaatttctcagacactatgagtgagtcaatgaatgaccaggaggagtttatttcctcgtgtagcctgccagttagccccttgggtagcatcgccactcgattcctggaggaggaggagctgcggagccatcatattcttgagagactggatgcgcatattgaggagttgaaacgggaaagcgagaaaacagtgcggcagttcacagctctcaagtag

SEQ ID NO: 17501 - DNA, 573 bp, synthetic construct
  source 1..573: mol_type = other DNA; note = Synthetic coding sequence
atggcaggcaccgcgaggcatgaccgggagatggctattcaagctaagaagaagcttactactgccactgaccccattgagcgtctgagactccagtgcctcgcacgtggctctgcagggatcaaggggctgggacgagtattcagaattatggacgacgataataaccgcaccctggattttaaagagttcatgaaaggattgaatgattatgctgtcgtgatggaaaaagaagaggtcgaagagctgtttcgtagatttgacaaggatggtaatggtaccattgattttaacgagttcttgcttacccttagaccccccatgagcagggctcgcaaagaagtcatcatgcaggctttccgcaagttggacaaaactggtgacggcgtcatcacaatcgaagacctccgcgaggtctacaatgctaagcaccaccccaaataccagaatggcgagtggtccgaggagcaggtgtttaggaagttcttggacaactttgactccccatatgataaagatggcttggtaacgccagaggagtttatgaattactacgcaggcgtgtccgcttag

SEQ ID NO: 17502 - DNA, 231 bp, synthetic construct
  source 1..231: mol_type = other DNA; note = Synthetic coding sequence
atgaccccaccccagcagccaccacctttgcgatctgagccaggaactctgggctcagctgcgagctcttatagtccattagggctcaacggggtgcccggaagcatttgggactttgtaagcggtagtttctcaccgagccccagtccgatcctctctgctggaccgccttccagcagctcggcctcacctaacggggccgagctggccagagtccggcgccagctttag

SEQ ID NO: 17503 - DNA, 108 bp, synthetic construct
  source 1..108: mol_type = other DNA; note = Synthetic coding sequence
atggctactctggtggtgaacaagctgggcgctggggtggattcagggagacaaggcagcagagggactgctgtggtgaaggttctagaatgcggagtgtgtgaatag

SEQ ID NO: 17504 - DNA, 477 bp, synthetic construct
  source 1..477: mol_type = other DNA; note = Synthetic coding sequence
atggaagcagacatcatcaccaatctgagatgtagactgaaggaggctgaggaggagcggcttaaagcagcccagtatgggctccagctggtggaatcccaaaacgagctgcagaatcagctggacaaatgcaggaatgaaatgatgaccatgaccgagtcatacgagcaggagaagtacacattgcaaagagaggtcgagctcaagtcacgcatgctcgaaagccttagttgtgagtgtgaggctatcaaacagcagcagaagatgcatttggaaaagttggaagaacaactgtccaggagccatggacaggaagtcaacgagttgaaaacaaaaatcgagaagctcaaggtcgagctcgatgaggccagattatctgaaaagcagctgaagcatcaggtggaccatcagaaggagctgctttcttgcaagtctgaagaactcagagtgatgagtgaaagggtgcaggagtcgtag

SEQ ID NO: 17505 - DNA, 393 bp, synthetic construct
  source 1..393: mol_type = other DNA; note = Synthetic coding sequence
atggcacagacggacaagcctacctgcatccctccagagctgccgaaaatgctgaaggagttcgccaaggcagccatcagggctcaaccccaagatttgatccagtggggcgccgactattttgaggccttatcgagaggtgagactccacccgtgcgagagaggagtgagagggtagctctctgcaactgggccgaactgaccccggagctgctgaagatcctgcattctcaggtagccgggaggttaatcattcgcgctgaggagttggcgcagatgtggaaagtggttaacctacccaccgacctctttaacagcgtgatgaacgtgggacggtttacagaggaaatcgagtggctgaagttccttgctctggcctgctccgccctctag

SEQ ID NO: 17506 - DNA, 693 bp, synthetic construct
  source 1..693: mol_type = other DNA; note = Synthetic coding sequence
atggaggccgatatcataacaaatctcagatgccgcttgaaggaggcagaggaagaacgactgaaagccgcccagtatggtctgcaactggtggagagtcagaacgagttgcaaaatcagctggacaagtgccggaacgaaatgatgaccatgaccgagagctacgagcaggaaaagtacacactgcagcgcgaggttgaacttaagagccgcatgcttgagtcactcagctgtgagtgtgaggccattaaacagcaacagaagatgcatctggagaaactcgaggagcagttgagccggtcgcacggacaggaggtgaacgagctcaaaacaaaaatcgagaagctgaaggttgagctggacgaggcgcgcctctcagagaagcaactcaagcatcaggtggaccatcaaaaggaactcctgtcgtgcaaaagtgaagagctgagggtgatgagtgaacgcgtgcaggagagcatgtcatcagagatgctagccctgcagattgagctgaccgaaatggaatccatgaagaccacccttaaagaggaggtcaacgagctacagtatcggcaggagcaattagagcttttgattacaaatctgatgcgacaggtcgatcggctgaaggaggaaaaggaggaacgtgaaaaagaagcagtttcgtactataacgccctagagaaggctaggtag

SEQ ID NO: 17507 - DNA, 639 bp, synthetic construct
  source 1..639: mol_type = other DNA; note = Synthetic coding sequence
atggctcagaccgataagcccacctgtattccacctgagctgcctaaaatgctgaaggagttcgcaaaagcggcgatccgtgcccagcctcaggatctgatccagtggggggctgattacttcgaagcactctctcggggtgagactccgcccgtgcgcgagaggtcagagagggtggctctgtgtaactgggccgagctgacacctgaactcttaaaaatcctccatagtcaggtggcaggcagacttattatcagagcagaggagctggctcagatgtggaaggtcgttaatctgccgaccgacctcttcaatagtgtgatgaacgtcggaagattcaccgaagaaattgaatggttgaaattcttggccctggcttgctctgcacttggagtgaccattaccaagaccttgaaaattgtgtgcgaggtgctgtcctgtgatcacaacggaggcctgcccagaatccccttcagcacttttcagttcctgtatacttatatagcagaggtggacggagaaatctgtgctagtcacgtcagtcggatgctcaattatatagagcaagaggtcattggacccgatgggcttatcaccgtcaacgattttacccagaatccacgagtgtggctcgaatag

SEQ ID NO: 17508 - DNA, 2844 bp, synthetic construct
  source 1..2844: mol_type = other DNA; note = Synthetic coding sequence
atgaacttcctgaggggggtcatgggtggacagagcgccggtcctcagcacaccgaggctgagacggtgcgaggcgcagcagaccctaaagtaacctccagttgtggccttaagtttcggcacagcttccggctggtcaagcacattctctaccatgtaactatcaacgtgtacagtgattctgagattatcggctacgccctggacacactctacaacattatctcgaacgaagaggaagaagaggttgaggaaaactctacaagacagtcagaggacctcggaagtcagttcacagagattttcatcaagcagcaggaaaacgtcacgctgctactgtcgctcctggaggaattcgacttccatgttcgctggccgggtgtgaaactgctgacttccctgttgaaacaattgggaccgcaggttcaacaaataatccttgtgtcacccatgggggtgagtcggctaatggatcttctagctgattctagagaagttattaggaacgacggcgtattactcctgcaggcgctgactcgatctaatggggctatccagaagatcgtcgcatttgaaaatgcatttgaaaggctgctggacatcatcagtgaagagggtaacagtgatggagggatcgtggtggaggactgtcttattttgctgcagaaccttctcaaaaataacaactctaatcagaacttttttaaggaggggagttatatccagcggatgaagccatggttcgaagttggggacgaaaactccggctggagcgcccaaaaagtaactaatcttcatctgatgctccagctcgtgagggtgctcgtgagcccgaccaacccccccggggctacttccagctgtcagaaagctatgtttcaatgcgggctcttacaacagctttgtaccatcctgatggccactggagtcccggctgacatcctgaccgagactatcaacacagtgagtgaggtcatcagggggtgtcaggtgaatcaggactactttgcttctgtgaatgctcctagcaaccctcccagaccggcaatcgttgtgctcctgatgtcaatggtcaatgagaggcagccgtttgtgcttcgctgtgctgtgttgtattgcttccagtgcttcctctacaagaaccaaaaaggtcaaggagaaattgtttccactcttctcccttctactatagatgcgacaggcaacagcgtgtccgcggggcaactgctctgcggcgggctgttcagcaccgatagcttgtctaattggtgtgcggcagtggccctggcgcatgcattacaggagaacgcgactcagaaagagcagttgttgcgagtccaactggctacatctattggtaaccctcccgtgtccttactgcagcaatgtacgaatatcctgtcccaaggctcaaagatccagaccagagtcggcctactgatgctcttgtgcacgtggttgtcaaactgcccaatcgccgtcacccattttttgcacaactctgcaaatgtcccatttcttactggccagatagcagagaacctgggagaggaggaacagttggtgcagggcctgtgtgcactcctgttaggcatctctatctattttaacgacaactcattggaatcctacatgaaggagaagctgaagcagttaatagaaaagcgaatagggaaagagaatttcattgagaagctcggttttatttcaaaacatgaattgtactctcgggccagccagaagccacagccaaatttcccaagcccagaatacatgattttcgaccatgaattcaccaagctggttaaagaactggaaggggtgatcactaaggctatctacaaatcttccgaagaggataaaaaagaagaagaggtcaaaaaaactctggagcaacacgacaatattgtgacacattataagaacatgatcagggagcaggacttacagcttgaagagcttagacagcaagtctccacactcaagtgtcagaatgagcagctccagaccgcagtcacacagcaggtttcccagattcagcagcataaggaccagtacaacctgttgaagattcagttaggcaaagacaaccagcatcagggcagctactcggaaggagcccagatgaacgggatccaacctgaggaaattggtcgactgcgagaggagattgaggaattgaagcggaatcaggaactgctacaaagccagctgaccgagaaggattccatgatcgagaacatgaaatccagccagacctccggtacgaacgagcagagctcggccatcgtctccgcgcgggactctgagcaggttgccgaacttaaacaggaactggctactctgaaaagtcaactcaatagccagtctgttgagatcaccaagctgcaaacagaaaaacaggaactattgcaaaaaaccgaggcttttgcaaaatcagtggaggtccagggggagaccgagaccatcattgcaaccaagacgacagatgtcgaaggcaggctatcagcactcctccaagaaaccaaagaactgaagaatgagattaaggccctgtccgaagaaagaacagccataaaagagcagctagatagctcgaatagcacaattgcgattcttcagacggaaaaggacaaattggagctagaaatcacggattccaaaaaggaacaggacgacttgctggtgctcctggcagaccaggatcaaaaaattctcagtcttaaaaataagctcaaggacctaggtcatcccgtggaggaggaagatgaactcgagtcaggagatcaggaggacgaagacgatgagtccgaagacccgggaaaggatctcgatcatatttag

SEQ ID NO: 17509 - DNA, 1095 bp, synthetic construct
  source 1..1095: mol_type = other DNA; note = Synthetic coding sequence
atggtgaaactgttcatcggcaacttgccccgggaggccactgagcaggaaattcggtcactgttcgagcagtatgggaaagtgttagaatgcgacattatcaagaattatggatttgtgcacatcgaggacaagaccgcggcagaagacgccatccggaacctgcatcactacaaactccacggcgttaacattaacgtggaagcaagtaagaacaagagcaagacttcaactaagcttcatgtcggaaacattagccctacatgcacaaacaaagagttgcgggcaaaattcgaggagtacgggcccgtgatcgaatgcgacatcgtaaaggattatgcattcgtccacatggagagagcagaggatgcggtcgaggctatcagaggcctggacaacaccgagttccagggtaagcggatgcatgtgcagctcagcacctccagactaaggacagcccccggaatgggcgatcagtcagggtgctaccgctgcgggaaggaagggcactggtccaaagagtgcccaattgaccgtagtggacgagtggcagacctgaccgagcagtacaacgaacagtatggtgcggttagaacaccttataccatgtcatatggggattctctctattacaataacgcttatggggcattggacgcatattacaaaaggtgtcgggctgcgcggagctatgaggcagttgccgcagctgcagccagcgtctataattatgccgaacagactctgtctcagctcccacaggtgcagaacaccgcgatggccagtcatctcacttctactagtctcgacccatatgataggcatctgctccctacctccggggctgcagccaccgccgcggccgcagcagcagccgctgcagcagtgactgcagcaagtacttcttattacggacgggatcgctccccgttacgaagggctacagcacctgtgcccacggttggggagggatatgggtatggacacgaatctgagttgagccaagcctctgctgctgctcggaatagcctgtacgatatggccaggtacgagagggagcagtatgctgatagagcccgctattcagcgttttag

SEQ ID NO: 17510 - DNA, 1236 bp, synthetic construct
  source 1..1236: mol_type = other DNA; note = Synthetic coding sequence
atgattgtcaatgactacgagggcaatgattcggaggccgaggacctgaactttagggaaacactgccctccagttcacaggagaacacccctcgatccaaggtctttgagaataaagtcaactctgagaaagtcaaactgtctttgagaaacttcccacataacgactacgaagatgtttttgaggagccttcagagtccggctctgatccttctatgtggaccgcacgcggccctttcaggagggacaggtggagcagtgaggatgaagaggctgccggccctagtcaggcactgagtcctctcctgtcagacacacggaagatcgtttcagaaggcgaacttgatcagcttgcacagatccggccactcatcttcaattttcacgaacaaaccgctatcaaagactgcctgaagatccttgaagaaaagactgccgcttatgacataatgcaggaatttatggctttggaactgaagaacctgccaggcgaatttaacagcgggaatcaaccgagcaatcgtgaaaaaaatcgctaccgagacatcctaccatatgattcaacacgcgtgcccctcggcaagtcaaaagattatatcaacgctagttatatcagaatagtgaattgcggagaggagtacttctatattgcgacccagggcccgctactcagcaccattgacgatttttggcagatggtgctggagaataattccaacgtaattgcgatgatcacgcgggagatcgagggaggcattattaagtgctaccattattggcctatcagcttgaagaagcccttggagctgaagcatttccgcgtatttctcgaaaactaccaaatcctgcaatattttattattcgcatgttccaggtggtggagaagtccacaggcacctcgcactccgtgaagcaactacagtttaccaagtggcccgaccacggaacacccgccagtgccgacagctttattaagtacatacgctacgcgaggaagtcacatctgacgggcccgatggtagtacactgctctgcgggcattggtcgaacaggggtttttctgtgcgttgatgtcgtgttctgtgcgatcgtaaagaactgttcatttaatattatggatatcgtggcacaaatgagggagcagaggagcggaatggtgcagactaaggaacaatatcatttttgctacgatatagtccttgaagtgctccggaagcttttgaccctggactag

SEQ ID NO: 17511 - DNA, 810 bp, synthetic construct
  source 1..810: mol_type = other DNA; note = Synthetic coding sequence
atgatcgtgaacgattatgaaggaaatgacagcgaagccgaagacctgaatttccgcgaaacgttacctagtagtagccaggagaacacaccgcgcagcaaagtctttgaaaataaagtgaacagcgaaaaggtgaaactgagtctgcgtaattttcctcacaatgattatgaagacgtcttcgaggaaccgtcagaaagtgggtccgaccctagcatgtggactgcccgtggacccttcagaagagaccgttggagctctgaggacgaggaagccgctggacctagtcaggctctcagccctctgctaagcgatacaagaaagattgtgagcgagggcgagttggaccagttagcacagattcgccccttgatctttaatttccatgagcagaccgcgattaaggactgtctcaagattttggaagagaagactgcagcctacgatatcatgcaggaattcatgactggtaccagtcatagtgtaaagcaacttcaattcaccaagtggcccgatcatggtacaccagcctccgcagacagctttattaaatatattcggtacgctcgtaagagtcacctgaccggccctatggtggtacattgttctgctggaattgggcgcacaggcgtgtttctgtgcgtcgatgttgttttctgtgccatcgttaaaaattgcagctttaatatcatggatatagtggctcagatgcgagaacagagaagtggcatggtgcagacaaaagagcagtaccacttctgctacgacatcgttctggaggtgctgcggaagctcctgaccctggattag

SEQ ID NO: 17512 - DNA, 360 bp, synthetic construct
  source 1..360: mol_type = other DNA; note = Synthetic coding sequence
atggcctctcagctccaggtgttcagtccaccctccgtctcaagtagtgcattttgctccgcaaagaagttgaaaatcgaacctagtggttgggacgtcagcggccagtcttccaatgacaagtattacacccactctaagaccttgcccgccactcagggccaagccaacagtagccaccaggtcgccaatttcaatatccctgcctacgatcaggggcttctgctgcccgctccagccgtggagcatattgtcgtcactgccgcggattccagtggctcggccgccacaagtacctttcaaagttctcagaccttgactcacagatcaaatgtctctctgttggaaccttaccagtag

SEQ ID NO: 17513 - DNA, 339 bp, synthetic construct
  source 1..339: mol_type = other DNA; note = Synthetic coding sequence
atggctaccggcgatctgaagcggagtcttcggaacctggaacaggtgttgaggctgctgaactatccagaggaagttgattgcgtgggcttaatcaagggcgaccctgctgcatccctacctattatcagctactcttttacctcttatagtccttatgtgaccgagctgataatggagagtaatgtggaattaatagccaaaaacgatttacgcttcatcgacgccgtgtacaagctgttgagggatcagttcaattacaaaccaatcctcactaaaaaacagttcatccagtgtggttttgccgagtggaagattcagatcgtttgtgacatatag

SEQ ID NO: 17514 - DNA, 54 bp, synthetic construct
  source 1..54: mol_type = other DNA; note = Synthetic coding sequence
atgaaacgggggcgcctgcccagctcctccgaggatagcgacgacaatgggtag

SEQ ID NO: 17515 - DNA, 810 bp, synthetic construct
  source 1..810: mol_type = other DNA; note = Synthetic coding sequence
atgaatcaagaggatttagatcccgattctaccactgatgttggtgacgtgaccaatactgaggaggagctgatccgggaatgtgaggaaatgtggaaagatatggaagagtgtcaaaacaaattatccctgattggcacggaaacactcaccgactccaacgcccagctgagccttttgatcatgcaggtgaaatgccttacagcagagctatctcagtggcaaaaaaagactccagagaccatccctcttaccgaggacgtcttgatcaccctgggcaaagaagaattccagaaattgaggcaggatcttgagatggtgctatcaacaaaagaaagtaagaatgagaagctgaaggaggatctggaacgcgagcagcggtggctcgatgaacagcagcaaatcatggaaagtctgaatgtactgcatagcgagcttaagaacaaggtagaaaccttctcagaatcaagaatctttaacgaactgaagacaaaaatgctaaacataaaggagtacaaggagaagctgctgtctaccctcggcgaatttctcgaggatcattttccgcttcctgacagatctgtgaaaaagaaaaagaagaatatccaggaatcttccgtgaacctgatcaccctgcatgagatgctggaaatccttattaaccgcctgtttgacgtacctcacgacccctatgtgaagatcagtgatagcttttggcccccttatgtcgaactgctgttaaggaacggcattgcccttcgacaccccgaggacccaacaaggattagactagaggcattccatcagtag

SEQ ID NO: 17516 - DNA, 339 bp, synthetic construct
  source 1..339: mol_type = other DNA; note = Synthetic coding sequence
atgaatggaagagccgattttcgtgaaccgaacgcagaggttccaagacccatcccacacatcggaccagattacattccgacagaagaagagcggagggtgttcgccgaatgcaacgatgagagcttctggtttaggtctgttcctcttgcagcaacttctatgctgataacccagggcttaatttctaaaggtattctgagctcccacccgaagtatgggtctattcctaagttaatcctggcttgcattatggggtatttcgccggaaaactcagctatgtgaaaacatgccaagaaaaatttaaaaaactggagaactctccgctgggcgaatag

SEQ ID NO: 17517 - DNA, 687 bp, synthetic construct
  source 1..687: mol_type = other DNA; note = Synthetic coding sequence
atggaggaacagccacagatgcaagatgcagacgaacccgctgattccggcggtgagggtagggccggagggccccctcaggtggccggagcccaggcagcctgttcagaagatagaatgacactcttactgaggctgcgagcccaaacaaagcagcaattgctggaatacaaatctatggtggatgccagcgaagaaaagaccccggagcaaatcatgcaggaaaaacaaatcgaggcaaagattgaggacctcgagaatgagattgaagaggtcaaagtggcatttgagatcaagaaacttgccctcgactcagtcctgatggacaacatgaaacatctgctagaactcaataagctgatcatgaaaagccagcaagaaagttgggaccttgaggagaaactccttgacatacgaaagaagaggctgcagctcaagcaggccagtgagtccaagcttttggagatccaaaccgagaagaataaacagaagatcgacctggatagtatggagaattccgagaggataaagattattaggcagaaccttcaaatggaaatcaagataacgacagtgattcagcacgttttccagaaccttatcttggggagcaaggtaaactgggccgaagatcccgcattaaaggagatagttctgcagctggaaaaaaatgtggatatgatgtag

SEQ ID NO: 17518 - DNA, 2352 bp, synthetic construct
  source 1..2352: mol_type = other DNA; note = Synthetic coding sequence
atggctaaatataacactggagggaatcccaccgaggatgtctccgtgaattcacggccctttagagtaaccgggccaaattcatcatcaggcatccaggcacgaaagaacctgttcaacaatcagggcaatgcgtccccacccgccggcccctcaaacgtgcccaagtttggctcacctaagcccccagtggccgttaagcccagctccgaagagaaaccagacaaggaaccgaagccccccttccttaaacccactggggccgggcagcgcttcggtacacctgcttctctgactacccgtgatcctgaggctaaggtcgggttcctgaagcccgttggcccaaagcccattaatttgccaaaagaagactcgaagcctacttttccctggcccccggggaataagcccagtctccattctgttaatcaggatcatgatttaaagccattagggcctaaatcagggcctaccccacccacatcagagaacgagcagaaacaagcgtttccaaaacttacgggggtgaaagggaaatttatgagtgctagccaggacctcgagcccaagcccctgttccccaagccggcattcggacagaaaccgcctctcagtaccgagaacagtcacgaggacgaatctccaatgaagaatgtctccagttccaaaggctcccccgctcctctaggagttaggagcaagagcggcccgctaaaacctgcccgcgaggattcagaaaacaaagaccatgccggcgagatcagttctctccctttcccgggggtcgtattgaagcctgccgcaagccgtggtggccccggactgtccaaaaacggtgaggaaaagaaggaagataggaaaatcgacgccgccaagaatacattccaaagcaaaataaaccaggaggagctggccagcgggacaccaccagctcggttcccaaaagcaccaagcaaactcactgtgggaggtccttggggccaatcacaggaaaaggaaaagggcgataagaactctgctacacccaaacaaaaaccactaccacccctgttcaccctgggccctccaccccccaagcccaaccgacctcctaatgtggatcttacgaaattccacaaaacgagcagcggtaacagcacctctaaggggcagacctcctattcaacaacctccctgcctccaccaccacccagtcaccccgcctcccaaccaccactgcctgcaagccatccaagccagccccctgttccatcattgccaccccgaaatatcaagccaccatttgaccttaaatctcccgtgaatgaggataaccaggatggagtaactcactctgatggggccggcaaccttgatgaagagcaggatagcgagggcgaaacatacgaggacattgaagcatccaaggagcgcgaaaagaagcgcgaaaaggaagagaaaaagaggctggagctggaaaagaaagagcaaaaagagaaggagaagaaagagcaggagatcaaaaagaagtttaaacttacagggccaattcaggtgattcacctcgcaaaagcttgctgtgatgtcaaaggaggcaagaacgagttgagctttaaacagggagagcagatcgagatcatccgtatcactgacaatccagaaggaaaatggttaggcagaaccgcccggggttcctacggatatattaagaccacagccgtggaaatcgactatgattctctgaaactgaaaaaggattcactgggcgcccccagtcgccctatcgaagatgatcaggaggtgtacgatgatgtcgctgagcaggacgatatctccagtcattctcagtctggatccggtgggattttcccccccccaccggatgacgacatctatgatggcatcgaggaggaagacgccgacgacgggtttcctgccccccctaaacagctggatatgggtgatgaagtgtatgatgatgtggacacatcagactttcctgtctcttccgcagaaatgagtcagggcaccaatgtgggtaaagcgaaaaccgaggagaaagatctgaaaaagctcaagaaacaggagaaagaggagaaggattttcggaagaaatttaaatatgatggcgaaatccgggtcttatactcaactaaggtgaccacttctatcacaagtaaaaagtgggggacaagagaccttcaggtcaagccaggtgagtccctggaagtgatccaaaccactgatgacaccaaagttctatgtcgaaacgaagagggaaaatatgggtacgtgctgcggtcgtatctcgccgacaacgacggcgaaatctacgacgacattgcagatggttgtatatatgataacgactag

SEQ ID NO: 17519 - DNA, 393 bp, synthetic construct
  source 1..393: mol_type = other DNA; note = Synthetic coding sequence
atgatgctgggtacagagggtggcgaaggtttcgtggtgaaagtacgaggactgccctggtcctgcagcgctgatgaggtccagaggttcttttcggactgtaaaatccaaaacggggcccagggtataaggtttatctatacccgcgagggacgcccctcaggcgaggcatttgtggaactggaatccgaagacgaagttaaacttgccctaaagaaggatcgagaaactatgggtcaccgctatgtggaagtatttaaatctaataacgtcgaaatggactgggtcctaaaacacacaggccccaatagccccgacaccgccaacgacggctttgtacggctgagagggctaccttttggctgttccaaggaggagatagtgcagttctag

SEQ ID NO: 17520 - DNA, 267 bp, synthetic construct
  source 1..267: mol_type = other DNA; note = Synthetic coding sequence
atggaagccgatatcattactaacctgagatgtagactcaaggaggccgaagaggaacggctgaaagctgctcaatacgggctgcagctggtggagtcacagaatgagctgcaaaaccagctcgacaagtgtagaaatgaaatgatgaccatgacagagtcttatgagcaagagaaatatactttgcagcgagaagtggagttgaagtccaggatgctcgaaagcctgtcttgcgagtgtgaggccattaagcagcaacagaagtag

SEQ ID NO: 17521 - DNA, 1902 bp, synthetic construct
  source 1..1902: mol_type = other DNA; note = Synthetic coding sequence
atgaaagctatcaaaaaaagcctgaccgaggaagagtatctctatctggacttttcccatcagactgagggttgcatcttcccactgcatactagtgtcaccctttttctgctttcatattgtgattgtaaaatctttaaaatctgtctggttgtgactaaggaagtgagccgtgatagttcccttctgagggacgacttgatccaggacgtggaaattcaaatcatctcccgccaggagctacctcccatcgtgcagaactgttgcttaccagcggtggtggagagatccgataacttctgtcgggccggtctggctgtggtgctgcggcatatcattcagaagagctacgaagctgacccattgaaaaaggaactgctggagcttctgggattcaaaaagacctgtcttaaggcatgtgcagaggtatcccagtggacaaggttatgcgagctcacaatcccactcgccatcgagaactttcttcgcgaatctagcgaccagccgcctacaatacccgtggagatcctgcaactggagaaaaagctgtcagaacctgtccgcgtgcacaacgatgacaagctccgccgccagaaactgaagcagcagaaagcagatggagtgggccctcccctgacaaagggcaaggcgaaaagcaaggtccatacacaggaaacctccgagggactggatagctctagtaaatccctcgaactcaaagtcgcattttctaagcttactgtgcaggaggaacctgccacaacaaacagagagccctcccacatccgcaaggccaaggccagcgatctgccccctttggagcacgtgtttgcggaaggcttgtacttcacgctggctgacatcgttctgttgccatgcattcaccactttctcgttataatcagtcgcaagttttccgagaagctcgtggaattccccctcctcgcttcttggtatcagaggatccaggaggtgccaggggtcaagacagccgcatctaaatgcggcatacagttcttgcaccttcccaagctactgacaacatccacagagcaacatcctaacctgtgtgaggtccctggcgtggaagaacaatctgatcctctattcatcggcgggccccggcctaccatggcaaaactcatggaaaaaggcatcgaagtcatgttcagcccacacccctgccccacctggactttagactggaatgtgctacccgccgccgtgagcccgaaggaggggaaaatgagctccgaccgcgccctaagaaagcagcagcaactgaacaatttagtttacgtggtcaccaatcaggctaagcccggggaccggattgttgatttctgttcgggcggagggcacgttgggatcgttctcgcccacatgctgcccagctgtcaggtaaccttaatcgagaacaaagagctcagccttataagggccaagaaaagatccgatgaattgggccttagcaacatctggtttatccaggcaaatatggaatactttaccggaatgttcaatataggcgtggcactgcacgcttgtggcgtggccacagatatggttatcgagcattgtatcaagactcgtgcaagctttgtgacctgcccttgctgttacgggtttatccagaatacatccaaatttaactttcccaagtccgaacaatttaaaaagacgctatcctacaaagaacacatgatcttgtgccgattcgccgatcaaacagcagttcagttaccacctcagcgaagactgatcggcaagcagtgtatgtgtctcgtcgacctggatagggcccgagccgccgaagaatgtgggtacagcgtgcaagtgatcagcatggaaccggaatcctgcagccccaagaacaacatgatcgtgggagtgcccatttag

SEQ ID NO: 17522 - DNA, 597 bp, synthetic construct
  source 1..597: mol_type = other DNA; note = Synthetic coding sequence
atggcaaccggcgatctcaagcggtccctacggaacttggaacaagtcttgagactgcttaactaccccgaagaagtggactgtgtggggctgatcaaaggggatcccgccgcgagcttgccgataatttcctattcgtttacctcttatagcccctatgtgacagaactgattatggagtctaatgtggagctgatcgctaagaacgacctgcggtttatagacgcagtttacaagctgctgcgtgatcaattcaattacaagcccattctgacaaagaagcagttcattcagtgtggatttgcagagtggaagatccaaattgtgtgtgatattctgaattgtgtgatgaagaaacataaggagctctccagccttcagaagattccctcccagcaacgtaaaaaaatctccagcgggaagtccgaaccccccctggggaacgagaaaatctccgcagaggccgtgggggtggacatttccgggaggttcatgaccagcggaaagaaaaaagccgtcgtaattcgtcatctgtataatgaagacaatgtggacataagtgaagacactctgtctccaatcactgacgtgaattag

SEQ ID NO: 17523 - DNA, 336 bp, synthetic construct
  source 1..336: mol_type = other DNA; note = Synthetic coding sequence
atggtgatggaaaagcccagccctctgctcgttggtagggagttcgtacgccaatactataccctactgaataaggccccagagtatctgcataggttttatggtcgcaatagttcatacgtgcatggtggcgtggacgctagtggaaagcctcaggaggcagtctatggccaaaatgacatccatcacaaagtcttgtcactcaatttcagtgaatgtcatacgaagatcagacacgtggacgcccacgccacactgagtgatggcgtggtagtccaggtaatggggctgctgtccaattctggccagcctgaacgcaagttcatgcagacttag

SEQ ID NO: 17524 - DNA, 681 bp, synthetic construct
  source 1..681: mol_type = other DNA; note = Synthetic coding sequence
atgagttctccaagggacttccgcgccgaaccagtgaatgattacgagggaaacgacagcgaggccgaggatcttaattttagggaaactcttccaagcagttctcaagagaacactccaagatccaaagtcttcgaaaacaaggtgaactccgaaaaggttaagctttccctgaggaactttccacataacgactatgaggacgtgttcgaagaacctagcgagtctggcagcgatcctagtatgtggacagcaagggggcctttccggagagatcgatggtcaagcgaagacgaggaggcagcgggcccaagtcaggcattatccccactattgtcagacacacgcaagatcgtgagcgagggtgagctggaccagcttgcccagatcagaccattaatcttcaacttccacgaacagaccgccatcaaggactgtttgaaaatactggaggagaaaacagctgcttacgacatcatgcaggaatttatggctctcgaattaaagaatctacccggcgaatttaattctggaaatcagcccagcaacagagagaaaaataggtatcgggatatcctgcccttccagcatcacggctactctgggccaaatgagcgtactaccttctggcacggcagcaacgaaggcgcggtgtcactcctgcttaggtactgcgcctag

SEQ ID NO: 17525 - DNA, 1872 bp, synthetic construct
  source 1..1872: mol_type = other DNA; note = Synthetic coding sequence
atgagcgatgaagtgttttccaccactctagcatataccaaatctccaaaagtgacgaaacgaacaacatttcaggacgagttgatcagggcaatcacggctaggtcagcgagacagcgaagctctgaatactcagatgatttcgatagtgacgaaatcgtaagcctaggcgactttagcgataccagcgccgacgaaaattctgtcaataagaagatgaatgattttcatatcagcgacgatgaagagaagaacccctccaaactcttattcctgaagacaaacaagtccaatggtaacatcactaaggacgaacccgtttgcgccataaaaaatgaggaagaaatggcacctgacgggtgcgaagatattgtggtaaagagtttcagtgagagtcaaaacaaggacgaagagtttgaaaaggacaaaataaaaatgaaaccaaagccacgcatcttatccatcaagtccacatcaagtgcggagaacaacagtctcgatacagacgatcatttcaaaccttccccgagacccagaagtatgctgaagaagaaatctcacatggaagaaaaggacgggcttgaggataaggagaccgccctgagcgaagaactcgaactgcacagcgcaccaagcagtctgcccactccaaatgggatccagcttgaggccgaaaagaaggcctttagcgaaaatctagatccagaagacagctgcttaacgtccctggccagctcgagcctaaaacaaattctgggcgacagtttctcccccggttctgaaggaaacgcatcgggcaaagcagatcatgtcacaactgctgtcgagaaaagcaaagaatcccaggtgacggctgacgacctagaagaagagaaagcaaaggctgaattgattatggacgatgacaggaccgtagacccccttctgagtaagtctcagagcattctgatctccactagcgccactgcgagttctaagaagacaatcgaagatcgcaacattaagaacaagaagagcacaaataatcgggcttcctcagccagtgccagactcatgacatctgaatttctgaaaaaatcatcatccaagcgacgcactccttcaactactacctcctcccactatctgggcactctaaaagtgctcgaccaaaaaccctcccagaaacaaagcattgaacccgatagagcagataacattcgtgccgccgtctatcaggaatggctcgaaaagaaaaatgtgtacctgcacgagatgcatcgtatcaagagaatagaatccgaaaacctgcgtatccagaatgaacagaaaaaagccgccaagcgagaagaagccctggcgagtttcgaggcatggaaggcgatgaaggagaaggaagccaagaaaattgccgcaaaaaaaagattggaggagaaaaacaagaagaagactgaagaggagaatgctgcacgaaaaggggaggcattgcaagccttcgagaagtggaaggagaaaaagatggagtacctcaaagaaaaaaacaggaaggaacgagagtacgagcgggctaagaagcagaaggaagaagagactgtcgctgagaaaaagaaagacaacctcacagcagtggagaaatggaacgagaaaaaagaggcattcttcaagcagaaggaaaaagaaaagataaacgagaagcggaaggaggagctgaaacgcgcagagaaaaaagataaagacaagcaggctattaatgaatatgagaagtggctggaaaacaaagaaaagcaggaaagaatcgagagaaagcagaagaagcggcactcatttctcgaaagcgaggcattacctccttggagcccaccttcccgcaccgtatttgctaaagtgttttag

SEQ ID NO: 17526 - DNA, 255 bp, synthetic construct
  source 1..255: mol_type = other DNA; note = Synthetic coding sequence
atgatgttggggactgagggaggggaagggtttgttgtaaaggtcaggggcctgccttggagctgcagcgcagacgaagtgcagaggttcttttctgattgcaagatacagaatggagcccaaggaatcagatttatttacacaagagagggacggccaagcggggaagcttttgttgaactggaaagcgaagatgaagtgaaacttgccctgaagaaagatagagaaacaatggggcaccgatatgtggaatag

SEQ ID NO: 17527 - DNA, 993 bp, synthetic construct
  source 1..993: mol_type = other DNA; note = Synthetic coding sequence
atggatcagggagacactccaactctggaggaggatctgaagaaattgcagttgagcgaattcttcgacatttttgagaaggagaaggtagacaaagaggcactagcactctgcacggacagagaccttcaggagattggaatacccttgggacccaggaaaaagattctgaattacttttccacccgcaagaactcaatgggcataaagcgccccgccccgcaaccggcctccggcgcaaatatacctaaggagtcagagttttgtagctcttccaacacacgtaacggagactatctcgacgtgggcatcggtcaagtcagcgttaagtacccccggctgatttacaagcccgagattttttttgcattcggaagcccgatcggcatgttcttgacagttcgggggctgaaacgaatcgacccaaattaccggttcccaacatgtaagggattttttaatatataccatcccttcgatcccgtcgcgtacaggatcgagccaatggttgtgcccggagtggagtttgagcccatgcttatcccacaccacaagggaagaaaaagaatgcacctggaactcagggaagggctaaccaggatgtccatggacctgaagaacaatctcctcggttctctccgcatggcctggaagtctttcaccagagctccatacccagccctccaagcatcagagactcctgaggagacagaggccgagccagagtcaacgtccgagaaacctagcgatgttaacacggaggaaacctctgtcgccgtgaaggaagaagtgttgccaatcaacgtcggaatgcttaacgggggacagagaattgactacgtgttgcaagaaaagccaatcgagagcttcaacgaatatctgtttgccctccagtcacacttatgttattgggagtcagaggataccgtcctattggttctaaaggagatctatcagacacaaggtatcttcctggaccagccccttcagtag

SEQ ID NO: 17528 - DNA, 1383 bp, synthetic construct
  source 1..1383: mol_type = other DNA; note = Synthetic coding sequence
atggacagtgaactcatgcactctatcgtgggcagctatcacaagccccccgagcgggtttttgtaccttccttcacacagaatgaaccctctcagaactgtcaccctgctaacctggaagtgacatctcctaaaatcctccactcccccaattctcaggcactgatactggcgctgaagacactccaggaaaagatacacagactcgaactcgaacgcactcaagccgaagacaatttgaatatcctgagcagggaggctgcccagtacaagaaagcactggagaacgagactaacgagagaaacttggctcatcaggaactgatcaaacaaaaaaaggacatctctatccaactttcttctgctcaaagccgctgtactcttcttgaaaagcagctggagtacaccaagcgcatggtgttgaatgtggaaagggagaaaaacatgatcctggaacagcaggcacagctacaaagagagaaagaacaggaccagatgaagctgtacgctaagttagaaaagcttgatgtcttggaaaaggagtgctttcggctcaccaccacccaaaaaaccgcggaagataaaatcaagcacctggaggaaaaactgaaagaggaagaacatcagcgaaagcttttccaggacaaggcatctgaactgcaaacgggattggaaattagcaagatcataatgtcctcggtgagtaacctgaagcacagcaaagaaaagaaaaaaagctccaagaagacaaaatgcatcaaaaggcgccccccatggcagatctgctcaaagttcggtgccctgccatttgtggccgagaagatgagacagcacagggacccacatatcctgcagaagcctttcaacgttaccgagactaggtgcttgcccaaaccctctaggaccacatcttggtgcaaggctattccccccgattccgaaaagagtatctcgatttgcgacaatctttctgagctgcttatggcgatgcaggacgagcttgaccagatgtcaatggaacaccaggagcttctcaaacagatgaaggagactgaaagtcattccgtgtgcgacgatatagaatgtgagctcgagtgtcttctgaagaagatggagatcaaaggagagcagatcagcaaactgaagaaacatcaagacagtgtctgtaaactgcagcagaaggtccagaattctaagatgtccgaagctagcggcatccagcaggaagacagttatcccaaagggtccaagaacatcaagaacagccctagaaagtgcctgactgacacaaacttgttccagaaaaactccagcttccatcccatacgcgttcacaacttgcagatgaagcttcgccgggacgacatcatgtgggagcagtag

SEQ ID NO: 17529 - DNA, 1068 bp, synthetic construct
  source 1..1068: mol_type = other DNA; note = Synthetic coding sequence
atgaccggctcagcagccgacacacatcgttgcccccaccctaagggcgcgaagggcacacggtcacgctcttcgcatgctagaccagtgagcctggcaacctccgggggctcagaggaggaggataaagacggaggtgtgctgttccatgttaacaaaagcgggttcccaatcgacagccacacatgggagagaatgtggatgcatgtggccaaggtgcaccccaaaggcggcgagatggtcggagctatcaggaatgccgccttcctggccaagccctccattccccaggtacctaattacaggctctccatgaccattcccgattggctccaagccatccagaactatatgaagactctacaatacaatcacactggcacccagttttttgagattagaaagatgaggccactatctgggctcatggaaactgccaaggaaatgacgagggagagcctccccattaaatgcttagaggcggtaattctcggtatctatttaactaatggtcagccctcaatcgaacgtttccccatttcctttaagacgtacttctccgggaactatttccaccacgtcgtgctcggaatatactgtaatgggcggtatgggagtctcggcatgtcacgccgcgctgagctcatggataagcctcttacctttcgaaccctcagcgacctgatttttgatttcgaagactcctacaaaaagtacctccacaccgtcaagaaggtgaaaatcggactgtacgttccacacgagcctcactcgttccaacccatcgaatggaaacaactagttctgaatgtgtcgaagatgttgagagcggatattcgtaaagaattggagaaatatgctcgtgacatgaggatgaagattctgaagcccgcttccgcacacagccctacccaggtgcggtctcgcggcaaatcccttagccccaggcggagacaggcctcaccacccaggcggctgggccgacgggagaagtctccagctctgccggagaaaaaggttgccgacttgtctacactgaatgaggtgggctaccagatccgcatctag

SEQ ID NO: 17530 - DNA, 384 bp, synthetic construct
  source 1..384: mol_type = other DNA; note = Synthetic coding sequence
atggcctctaatcataaaagttccgcggcacgaccagtctcacgcgggggggtggggctcacaggacggcctccatctgggattcggcccctatccggcaacatcagggtggccacagctatgccacctgggactgctcggcctggctcacgtggctgcccaatcggaacgggaggggtgttgtcctcccagataaaagtcgcccacaggccagttactcaacagggattgactggaatgaagaccggcactaagggcccgcagaggcaaattctggacaagtcctactacctagggctactgcgttccaaaattagcgagctgaccactgaagtgaataagcttcagaaaggcattgagatgtacaaccaagagaattcttag

SEQ ID NO: 17531 - DNA, 510 bp, synthetic construct
  source 1..510: mol_type = other DNA; note = Synthetic coding sequence
atgcacaagcttcagagcgggatcgggcgccttatcctaaaggaggagatgaaggctagatcaagctcgtacgccgacccatggaccccccccaggtccagtacctcttcgcgcgaggctcttcatactgctggctatgagatgtctctgaatggtagtccaaggagtcattacctcgccgattctgaccccctgatctctaagtcggctagtcttccagcctaccgaaggaatggcctccacaggacccctagcgcggatctatttcactacgactctatgaatgccgttaactgggggatgagagagtacaagatttacccttacgagctgcttctcgtcaccactagagggcgtaatcgactccccaaagacgtcgatcggactcgcctcgagagacatctgagccaggaagaattctatcaagtctttggcatgactattagcgagtttgaccgtctcgcactctggaaaaggaacgaattaaagaagcaggccagacttttctag

SEQ ID NO: 17532 - DNA, 144 bp, synthetic construct
  source 1..144: mol_type = other DNA; note = Synthetic coding sequence
atggcatccgtcttatcacgcagattaggcaagaggagcctgctcggcgcccgcgtgctgggccctagcgctagtgaaggaccttccgccgcacccccaagcgaacctctgttagaaggagcagctcctcagccattcacttag

SEQ ID NO: 17533 - DNA, 558 bp, synthetic construct
  source 1..558: mol_type = other DNA; note = Synthetic coding sequence
atggacgacagtataaataataggtttagttacgtaacgcacgaagacatttgcaactgtttcaacggcgacaccctgctggccatccaggctccttccggcacccaactggaggtgcccatacccgaaatgggacagaatgggcaaaagaaataccagattaaccttaaatcacactccggcccgattcacgtgctcctaattaacaaggaaagctcaagtagtaaacccgtcgtgttccccgtgccaccccctgatgatctgacccagccttcgtcacagtcgcttaccccagtgacaccccagaagagctccatggcaactcaaaatcttcccgagcagcatgtgagcgagcgctctcaggcactgcaacagactagtgcgaccgacataagtagcgcaggttctatcagcggggatattattgatgaactgatgtcgagcgacgtttttcctcttttgcgtttaagcccaacaccagctgatgattacaacttcaatctggacgataacgaaggcgtttgcgatctttttgacgttcagattctcaattactag

SEQ ID NO: 17534 - DNA, 492 bp, synthetic construct
  source 1..492: mol_type = other DNA; note = Synthetic coding sequence
atgcccagtatcaagctccagagctcagatggcgaaatctttgaagttgacgttgagatcgctaaacagtcagtgactattaaaacaatgctggaggacctcggcatggacgacgaaggcgacgatgatccggtccccctgcctaatgtcaatgcagcaatcctgaagaaagtgatacagtggtgtactcatcataaggatgacccgcctccccctgaggatgatgaaaacaaagaaaaacggacagacgacattccagtctgggaccaggagttcctgaaggtagaccagggcacgcttttcgaactcatcctcgctgccaattatcttgatatcaagggtctgctggacgtgacatgtaagacagtcgccaatatgattaaaggtaagacgcctgaagagataagaaagacctttaatatcaaaaacgattttaccgaagaagaggaagcccaagtaagaaaggaaaaccaatggtgcgaagaaaaatag

SEQ ID NO: 17535 - DNA, 915 bp, synthetic construct
  source 1..915: mol_type = other DNA; note = Synthetic coding sequence
atgtccaagagaaggaggctgaaacaaggagaaccaattatgacgggcaagactcagacaagcaacgttaccaacaagaatgatcccaaatccattaattccagagtgttcatcggcaatctgaacaccgcaatagtgaagaaagtggacatcgaggcgatcttcagcaagtatgggaagatcgtaggttgctcagtccataaaggctatgccttcgtccagtacatgagtgagcgccacgctcgggctgcagttgccggggagaacgctagggtcatagccggccagcccctggacatcaatatggctggagaacccaaaccctatcggcccaaacccggcaacaagaggcctctatctgcattgtataggctggaatctaaggagccctttttgtcagtgggaggctacgtgttcgattatgattattatcgggatgatttctataataggttgttcgactatcatggccgagtgccacctcccccaagggccgtaatccctctgaaacgccctcgtgtcgcagtgactacaactcgccggggaaaaggggtcttcagtatgaaaggtggttctcggtcaacggcatctgggtcaaccggcagtaagctgaagagtgacgagctgcagaccatcaagaaagaactgacccagattaaaaccaaaatagactccttgctcggcagactggagaagatcgagaaacaacaaaaagcggaagctgaggctcaaaagaagcaattagaggagagtttggtgctgatacaggaagagtgcgtgagtgaaattgctgatcactccacggaagagccagctgaaggaggacctgatgccgacggagaagagatgaccgatggaattgaggaagacttcgacgaggatggcgggcatgagcttttcttacaaataaagtag

SEQ ID NO: 17536 - DNA, 405 bp, synthetic construct
  source 1..405: mol_type = other DNA; note = Synthetic coding sequence
atgccatctgctgaggcaaagctgaagaaaaatagatgcgctaactgctttgactgccccgggtgtatgcatacattatctacacgggcaacaagtattagtactcagctgccagacgaccccgcaaagaccaccatgaagaaggcatactacctcgcatgcggcttttgccggtggaccagtcgcgatgtcggaatggcagataagagtgtggctagcggaggctggcaggagcccgaaaacccccacacgcagaggatgaacaagctgatcgaatattaccagcaactggcacaaaaagaaaaagttgaacgggatcgcaagaaattggcaagacggcgaaactacatgcccttggcattcagcgataaatacggcctggggactcgcctacagagaccctag

SEQ ID NO: 17537 - DNA, 1230 bp, synthetic construct
  source 1..1230: mol_type = other DNA; note = Synthetic coding sequence
atgtggcgcgtcatcgagcccccctgccccggcgcccctagtaccgagaacggtaagagtgtccattggaaactaggggcggataaggaagtgtgggtgtgggtcatgggcgaacatcacctcgacaagccgtacgatgtgctatgcaacgagatcattgcagagcgcgctagactgaaggccgagcaggaggccgaggagccaaggaagacccattcggaggagttcacaaacagcctaaagactaaatcccagtaccacgacctgcaagctccggacaaccagcaaaccaaggatatctggaaaaaggtggctgagaaggaggaactggagcagggctcacgccccgcccctacccttgaagaagagaagattagaagcctgtcaagttcgtcaagaaacatacagcagatgctggctgactcaataaataggatgaaggcgtacgcctttcaccaaaaaaaagaaagtatgaagaagaaacaggacgaggaaataaaccaaatcgaagaagaacggacaaaacaaatctgtaaatcgtggaaggaggactctgagtggcaggcgtccctgagaaagagcaaagctgccgatgagaagaggcgctcccttgcaaagcaggcccgggaagattacaaaagacttagtctgggagcgcaaaaggggagggggggagaacggcttcagagtcccctgagagtcccacagaaaccagagcgcccccctctgccccccaaaccgcagtttttaaactccggagcatatcctcagaagcccttgcgtaaccaaggagtagttcgaacactgtcttcaagcgcacaggaggatataatcagatggtttaaggaggagcagctcccactgagggccggttaccagaagactagcgacactatcgccccgtggttccacgggattctgactcttaaaaaagcgaacgaactcttgttgtcaaccgggatgcctggttcctttctgatccgtgtgtccgagcgaatcaagggttacgccctgagttatctctccgaagacgggtgtaaacacttcctgattgatgccagcgccgacgcttatagtttcctcggcgtagatcagctacagcatgcaactctcgccgatctggtggaataccacaaagaggagccaattactagcctcggtaaagagctgcttctctacccatgtggtcagcaggatcagctgcccgattacctcgagctctttgagtag

SEQ ID NO: 17538 - DNA, 390 bp, synthetic construct
  source 1..390: mol_type = other DNA; note = Synthetic coding sequence
atgtccgacaaaagtgatctaaaagccgagctggagaggaaaaaacagagactcgctcagatcagagaggagaagaagaggaaagaggaggagaggaaaaaaaaagaggcagatatgcagcagaaaaaggaacctgtgcaggacgacagcgatttagaccgcaagaggcgcgagaccgaagcacttctgcagagcatcggcataagcccagagcctcccctcgtccctacccctatgtccccttcgtctaagtccgtcagtaccccgtccgaagccggaagccaggactccggcgatctgggaccccttactcggactctgcagtgggacacggatccatcggtgctgcagctccaatccgattccgagctcggatacatgagtgcttag

SEQ ID NO: 17539 - DNA, 780 bp, synthetic construct
  source 1..780: mol_type = other DNA; note = Synthetic coding sequence
atggttggcagggaaaaggagttgtccatccacttcgttcctgggtcctgcaggctcgttgaagaagaagtgaatattcctaaccgtcgggtcctggtcacgggtgccactggactactgggcagggccgtgcataaggaattccagcagaacaactggcacgcagtgggctgtggctttcggcgcgccaggcctaaatttgaacaggtgaatttactggatagcaatgccgtgcaccatattatccatgacttccagccacatgttatcgttcattgtgcagctgagcgacggcccgacgtggtcgaaaatcaacccgatgctgcatctcagttaaacgtggacgctagcgggaatctcgccaaggaggccgcagctgtgggagcgttcctgatttacatcagctcggactatgtcttcgatggcactaacccgccctacagggaggaagatattcccgcccccctgaatttgtacggaaagacaaaactggacggggaaaaagccgtcctggaaaataaccttggggcggctgtcctgcgcatccccattctatatggtgaggttgaaaagctcgaggaaagcgccgtgacagtgatgtttgataaggtccagttttctaacaaaagtgctaatatggaccattggcagcagaggttcccaactcacgttaaagacgtggctacagtttgtcgccagctggcagaaaagcggatgcttgtcagaaggatcccggagtcctgtctgtccgaagggcccctctgcctatttcatgcctag

SEQ ID NO: 17540 - DNA, 549 bp, synthetic construct
  source 1..549: mol_type = other DNA; note = Synthetic coding sequence
agctatgactcaactttttcctatgtcactcatgaagacatctgtaactgcttcaatggcgatactcttctggccattcaggcaccgtctggtacccaactggaggtgcccatccctgagatgggccagaacggtcagaagaagtaccagattaatctcaagtctcactccgggcccatccacgtattgttgatcaataaggagagttcgtctagtaaaccagtagtcttcccagttcccccgcccgatgaccttacacagccctccagtcaatccctgacccctgtgactcctcaaaaatccagtatggccacccaaaacctccctgaacaacacgtgtctgagagaagccaggccctacagcaaacaagcgctaccgatataagtagcgccgggtccatctctggcgatattattgatgaactgatgtcttccgatgtctttccactgctcagactcagcccaacacctgccgatgactacaacttcaacctggatgacaacgagggtgtgtgtgacctctttgacgtccagatcctgaattattag

SEQ ID NO: 17541 - DNA, 162 bp, synthetic construct
  source 1..162: mol_type = other DNA; note = Synthetic coding sequence
atggacagcgaactgatgcactcaatagttggctcctaccacaaaccgcccgagagagtattcgtgccaagctttacacagaacgagccttctcagaactgccaccctgctaacctggaggtaacctctccaaagatcctgcacagcccaaattcacaatag

SEQ ID NO: 17542 - DNA, 3018 bp, synthetic construct
  source 1..3018: mol_type = other DNA; note = Synthetic coding sequence
atggctggcgccctgagaaggggcagggcactagggtctagaccctccggtcccactgtttcctccagacggtcaccccagtgtccggtcgcccaggagggcctcggagctcgaagccgtcctcgggtggctcctaggtctttggcccggtgtggcccgagctcccgcctcatgggatggaagccctctgaggccaggggccagtctcagtccttccaggcatcagggttgcagccacggtctcttaaagccgcaagacgggctactggtcggccagatcggtcaagagctgctcggcctactatggacccctcggcacatcggagtagagcagcacctccaaatatggaccccgatcctcaggcaggggtccaggttgggatgcgcgtcgtcaggggagttgattggaaatggggacagcaagacggaggggagggaggtgtggggaccgtcgttgaacttggcaggcacggcagcccttcaacacccgaccgcaccgtggtggttcaatgggaccagggaacgcggaccaactacagggcaggttaccagggcgcccacgatctgctgctgtatgacaatgcacagatcggtgtgaggcaccccaacattatttgcgattgctgcaaaaaacatgggttgcgcgggatgcgttggaagtgtcgtgtttgtcttgactatgacctttgcacccaatgttatatgcacaataagcacgagctggctcacgcctttgatcgctatgagacagcccattcacggcccgtaaccctgtcaccccgacaggggctgccccgaatccctctgcggggcatttttcagggcgcaaaagttgtccgcgggccagattgggagtggggatctcaggatggcaagccagcggagctgcagaggagggtgtcagcagacagccagcctttccagcatggggacaaggtcaagtgcttgcttgacacggatgtgctccgcgaaatgcaagagggacacggaggttggaacccgcgcatggccgagtttatcggccagaccggaacagttcataggattactgaccggggtgatgttagggtccagttcaaccatgaaactagatggactttccaccctggcgccctcacaaagcatcactccttttgggtgggggatgtcgtgcgggtgatcggcgacctggacaccgtgaaacgcctgcaggctgggcacggtgaatggactgatgatatggcccccgctttagggcgagtggggaaggtcgtgaaggtgtttggagatggaaatctgcgtgttgctgtcgctgggcagcgttggactttctctccatcttgtctggtggcttaccgcccagaagaggacgccaacctagacgtggctgaacgcgccagggaaaacaagtctagcctgagtgtggccttggataaactccgtgcgcagaagtccgatcccgaacacccaggtcgcttggtggtggaggttgcattgggcaatgccgccagagccttagacctcttgcggcgacggcccgagcaggtggacaccaagaatcaggggagaactgcgctgcaggtagcagcttacctaggccaggttgagctaatcagacttttgcttcaggccagggccggggtggatttaccagacgatgagggcaatactgccctccactatgctgcactagggaaccaacctgaagccacacgagtgttgctatcagccggctgccgggccgacgccatcaactccacccagtctactgctttgcacgtcgccgttcagaggggattcttggaggtcgtgcgggcgctgtgcgagcgcggctgtgacgtgaatttgcccgacgcccattcagacactccccttcactctgcgataagcgctggcacgggcgcgagtggcatcgtagaagtcctgacggaagtgccaaatattgacgtgaccgcaactaacagccaaggattcacattactgcatcacgccagcctgaaaggtcacgctttggcagtacgcaaaatattggcccgggccaggcagcttgttgacgcgaaaaaagaggacggatttacagctttacatctggccgctttaaacaaccaccgtgaggtcgcccagatcctcattagagagggccggtgtgatgtaaatgtccggaaccggaagctccagagccctttgcatttggccgtccagcaggcccatgttggcctggtgcctttattagtggatgccggatgtagtgtgaatgctgaggacgaagaaggagacactgccctccatgtggccctccagcgtcaccaacttctcccgcttgtggccgacggcgcagggggcgaccctggacctctccagcttctgtcccgcctgcaggccagtggactgccagggtccgctgagctcacagtgggtgccgcagtcgcttgcttcttagccctcgagggcgctgatgtgagttacactaaccatcgagggcggtctcctctcgacttagctgccgaagggcgggtattgaaggctttgcagggctgtgcccagaggttccgagagcgccaggcaggaggaggagccgcaccagggcctcgccagacgctcggaacgccaaataccgtcactaatctccacgttggcgcagcgcctggccctgaggctgccgagtgcctcgtgtgtagtgagctggcactgttggttctgttctctccatgccaacatcggacggtgtgtgaggagtgtgccagacggatgaaaaagtgtatccgttgccaggttgtcgtttcaaaaaaactcaggcctgacgggtcagaggtagcttctgcggcacccgcccctgggccacctagacagctggtggaggagttgcaatccagatatagacagatggaagaaagaataacatgcccaatctgtatcgattcacatattcgcctggtgttccagtgcggccacggtgcatgtgccccgtgcggttctgcactcagtgcatgccccatctgtcgacaacctattagagatagaatacagatatttgtgtag

SEQ ID NO: 17543 - DNA, 294 bp, synthetic construct
  source 1..294: mol_type = other DNA; note = Synthetic coding sequence
atggcctcaagcgcagagcttgatttcaatttacaggcactgctggagcaactgtctcaggatgagctgtcaaaattcaagagcctcatccgaactatctcccttggcaaagaacttcagacagtccctcagactgaggtggataaagccaacggcaaacagctcgtcgaaattttcacatcccactcatgctcatactgggccggcatggcagccatccaggtgttcgaaaagatgaatcaaactcacctatctggccgcgctgatgaacactgtgtgatgccgccaccatag

SEQ ID NO: 17544 - DNA, 693 bp, synthetic construct
  source 1..693: mol_type = other DNA; note = Synthetic coding sequence
atggattctgagctcatgcatagcatagtcgggagctaccacaaaccacccgaacgggtgttcgtgccttctttcacacagaacgaaccgtcccagaactgccatcccgctaatctagaagtgacaagtcccaaaatcctgcactctcctaattctcaggctctgattctcgcactgaagacccttcaggaaaagatccacaggttggagctggagagaacacaggctgaagataacctgaacattttatctagagaagccgctcagtataaaaaggcgctcgagaacgaaaccaacgaacgaaacctcgctcaccaggaactcataaagcagaagaaggatatttcaatccagctgtcatcggcgcaaagtagatgcacgctgttggagaaacaactggagtacactaaaagaatggtgctcaatgtggaacgggagaagaatatgattttagaacagcaggctcagcttcagcgcgaaaaggagcaggaccagatgaaactctacgccaaactcgaaaaactggacgtactagagaaagagtgctttaggctcacaacaacgcagaaaactgccgaggacaagatcaagcatctcgaggagaaactgaaagaagaagagcaccaaagaaagctttttcaagataaggcttcagaacttcagactggcctcgagatttccaagatcatctag

SEQ ID NO: 17545 - DNA, 624 bp, synthetic construct
  source 1..624: mol_type = other DNA; note = Synthetic coding sequence
atggatcgaggggagcagggtctgcttcgaaccgacccggtacccgaggaaggggaagatgttgcagcgacaatctccgccactgagaccctttctgaagaagagcaggaagagctgcgaagagagctcgcgaaggtggaggaagaaatacaaacattgtcacaggttctggccgccaaggagaagcacctagccgaaatcaagcgtaagttgggaatcaactctcttcaggagctgaaacagaatatagccaaaggctggcaggacgtgaccgctacttctgcctacaagaagacatctgagaccctttcacaggcggggcagaaggcatccgctgccttcagctccgtgggttctgtcattacaaagaagctcgaagatgtgaagttgcaggctttcagccactcattctctatcagaagcattcagcacagcatctcaatgccagccatgcgtaatagccccacctttaagtcattcgaggagaaagtcgagaatcttaagagcaaagtcggcggaacgaaacccgcgggcggcgacttcggcgaagtactgaattcagccgcaaacgccagcgcaaccacaaccgagccccttccagagaaaacccaagaatccctctag

SEQ ID NO: 17546 - DNA, 387 bp, synthetic construct
  source 1..387: mol_type = other DNA; note = Synthetic coding sequence
atgaaatttaatccatttgtcacaagcgatcgctccaagaatcggaaaagacactttaacgcccctagtcacgtccgccggaaaatcatgagcagtccactgtctaaggaactgagacagaagtataatgttagatccatgcccatccgcaaggatgatgaagtgcaggtcgtgcggggacactataagggacagcagattggtaaagttgtccaagtatatcggaagaagtacgtgatctacatcgagcgtgtgcagcgggagaaagccaacgggactactgtgcatgtgggcatccatcccagtaaggttgtgatcacacggctgaaattggataaagaccgaaagaagattctggaacgtaaggccaaaagccgacaggtgtag

SEQ ID NO: 17547 - DNA, 126 bp, synthetic construct
  source 1..126: mol_type = other DNA; note = Synthetic coding sequence
ggcttgacaaagcagctcctcgatgacacaattggcattcaccctacctgcggagaagtgtttactaccctggagataaccaagagctcgggactggacatcacccagaagggctgctgagggtag

SEQ ID NO: 17548 - DNA, 1365 bp, synthetic construct
  source 1..1365: mol_type = other DNA; note = Synthetic coding sequence
atgctgaagcaaatcctgtcagaaatgtacatagatcctgatctgttggcagagctgagcgaagagcagaagcagatcctgtttttcaagatgcgtgaggagcagatccggagatggaaagaaagagaggccgctatggaaagaaaggagtccttacccgtaaagccaagacctaaaaaggagaacgggaagtctgtgcattggaaactcggggccgacaaagaagtgtgggtgtgggtgatgggggagcaccacctggacaagccatacgatgtcctttgcaacgagattatcgccgagcgcgccaggctgaaagcagaacaggaagcagaggaaccacgtaagacacattccgaagagttcacaaattctcttaaaacgaagtcccagtaccatgatttacaagcaccggacaatcagcagacgaaagacatctggaagaaagtggctgaaaaggaggaacttgagcaggggtcccggcctgcgcccaccttggaggaagagaagatacgaagcttaagtagtagttctcgcaacatccaacagatgttggctgattctatcaacaggatgaaagcatacgcatttcaccagaagaaggagagcatgaaaaagaagcaagacgaggaaatcaatcagattgaagaagagcggaccaagcagatatgcaaatcgtggaaggaagatagcgaatggcaggccagtttacggaagagtaaagccgctgatgaaaaacggaggtccctagctaaacaagcgcgtgaagattataaacggctgtccctcggtgctcagaagggtcgaggtggagaaagacttcaaagccccttgcgagtgcctcaaaagcctgagcgacctccactgccccctaagccccaattcctgaatagcggtgcttacccacagaaacccctgaggaaccagggggtggttagaacactgtccagcagcgctcaggaggacattatcagatggttcaaggaggagcaacttccactgcgggccggataccaaaagacgagcgacacgatcgccccctggtttcacggcatcttaaccctgaaaaaggctaatgagttgctgctctccactggaatgcccggcagtttcctgatacgggtctcagaacgcataaaaggatatgctctctcatatttgtcagaggacgggtgcaaacactttctgattgacgcatctgcagacgcctacagcttcttgggggtagatcagttacaacatgcaacactagctgatttggtcgaatatcataaggaggagcccataacctcccttggcaaggagctgcttctttacccttgcgggcagcaggatcagcttcctgattatttggagctattcgagtag

SEQ ID NO: 17549 - DNA, 438 bp, synthetic construct
  source 1..438: mol_type = other DNA; note = Synthetic coding sequence
atgaagtttaacccctttgtgacgagcgataggtctaagaaccgtaagaggcactttaacgccccaagccatgtgcggagaaaaattatgtctagtcccttatctaaggagctccgccagaagtacaacgtgaggagtatgcctattcggaaggacgatgaagtgcaagtggtgaggggccattacaaagggcagcaaataggaaaggtagtacaggtgtacaggaaaaaatacgtaatttacattgagcgggtgcaaagggagaaagctaatggcacaaccgttcacgttggcattcatccgagtaaagtcgtcatcacgagactgaaattggataaagatagaaagaaaatccttgagcgcaaagccaagagcagacaggttggaaaggagaaaggcaaatataaggaagaactgatagagaagatgcaggaatag

SEQ ID NO: 17550 - DNA, 621 bp, synthetic construct
  source 1..621: mol_type = other DNA; note = Synthetic coding sequence
atggactcagagttaatgcattcaatcgtcggttcataccataagccgccagagagggtctttgttcctagcttcacacagaacgaaccatcccagaattgccacccagctaatcttgaagtgacctccccaaaaatccttcactcccccaattcacaggctctcattcttgctctgaagactctacaagaaaaaatccaccgtttggaattggaacgaacccaggccgaggataatctgaatatcctgtctagagaggctgcacagtataaaaaagcgcttgagaatgagacaaacgaaaggaatttggcacaccaagaacttattaaacaaaagaaggatatttctatccagttatctagcgcccaatccagatgcacattgttggaaaagcagctggaatacaccaagagaatggtgctgaatgtcgagagagagaagaatatgatcttagaacagcaagctcagctgcagcgagaaaaagaacaggaccagatgaaactgtatgcaaaactggaaaagctggacgtactggaaaaagagtgctttaggttgacgactacacagaaaacagctgaggataagataaaacacttggaggaaaagctgaaagaggaatag

SEQ ID NO: 17551 - DNA, 1050 bp, synthetic construct
  source 1..1050: mol_type = other DNA; note = Synthetic coding sequence
atggaagaccctcagagcaaagagcccgcaggtgaggccgtagcacttgcccttctcgaatcccctaggccggagggcggcgaggagccccctcggcctagccccgaggagacccagcagtgtaagtttgatggacaggagactaagggttcaaaattcatcacctcgagtgcctccgatttcagcgatccggtgtacaaagaaatcgccataactaacggctgcattaatcggatgagcaaggaggagctgcgggccaagctcagtgaatttaagctggaaacaaggggggtgaaggatgtcctgaaaaaaagactgaaaaactactacaagaagcagaaactgatgctgaaggaatcaaatttcgctgacagctactacgattacatatgtatcattgatttcgaagcaacctgtgaagaagggaatcctccagagttcgttcacgagattattgagtttccggttgtgttgctgaacacccacacacttgagattgaagatactttccagcagtatgtacgcccagaaatcaacacacagctttccgacttttgcatcagcctgacaggaattacccaagatcaggtagatcgcgctgatacatttccccaggtcctgaaaaaagtgatcgattggatgaagctaaaggagctgggcactaagtacaagtattcactgctgacagacggttcttgggacatgtctaaatttctcaacatccagtgtcagttgtctcgcctgaagtatccaccattcgccaagaagtggataaacataaggaaatcttatggaaatttttataaagtcccacgctctcagaccaaactcaccatcatgctggaaaagttgggcatggactatgatggaagaccccattgcggcctcgatgattcaaagaacatcgctcggatagccgtaaggatgctccaggacggctgcgagttgagaataaacgaaaagatgcacgcaggacagcttatgtctgttagctcatctttacccatcgagggtactccaccaccccagatgcctcactttcgcaagtag

SEQ ID NO: 17552 - DNA, 429 bp, synthetic construct
  source 1..429: mol_type = other DNA; note = Synthetic coding sequence
atgccctctattaagctgcagagctctgacggagagatcttcgaggtagatgttgagattgcaaaacaatctgtgactatcaaaacaatgctcgaagatctcggtatggacgatgagggtgacgacgaccccgtccctttgcctaacgtgaacgccgccattcttaaaaaagtgattcagtggtgtactcaccataaagatgacccacccccgcccgaggatgacgaaaataaagaaaagcggaccgatgacatacccgtgtgggaccaggaattcctgaaggtggaccagggaaccctttttgagctcatcctggccgccaattacctggacatcaaagggcttctggatgtgacctgtaagactgtggctaacatgatcaaaggaaaaactcccgaagagatccggaagacctttaatattaagtag

SEQ ID NO: 17553 - DNA, 375 bp, synthetic construct
  source 1..375: mol_type = other DNA; note = Synthetic coding sequence
atgtccgccactgtagtggatgcagtaaacgcagcccctctgtcaggtagcaaggagatgtctctggaggaacctaaaaagatgactcgcgaagattggaggaaaaagaaagagctggaagagcagcgcaaactgggtaatgccccagctgaggtcgatgaagaaggcaaggacattaatccccatatccctcagtacatcagtagcgtaccttggtacatcgacccttctaaacggcctactttgaaacaccagagaccacaacccgagaagcagaagcagttttcgagtagcggagagtggtataaacggggagtgaaggagaattccattattacgaaataccgcaaaggagcctgtgaaaactgcgggtag

SEQ ID NO: 17554 - DNA, 750 bp, synthetic construct
  source 1..750: mol_type = other DNA; note = Synthetic coding sequence
atggtagatagactggccaattctgaggctaatacccggcgcatctcaatcgtagagaattgtttcggcgctgccgggcaaccactcacaatacccggcagagtgctgatcggcgagggcgtactcacgaagctttgcaggaagaaaccaaaagcacgccagttttttctttttaacgacatccttgtctacggaaatattgtgatccagaagaaaaagtataataagcaacatatcattcccctggaaaatgtgactatcgactctatcaaagacgagggcgatctgagaaatgggtggctaattaaaactcctactaagtccttcgccgtgtacgcagctacagctactgagaaatcagagtggatgaatcacatcaacaaatgcgtgacagatctgctcagtaagtccggaaaaactccaagcaacgaacacgctgcagtgtgggttcctgatagtgaagccactgtgtgtatgaggtgtcaaaaggcaaaattcacacctgtcaacagacgccaccactgtcggaaatgtggattcgtggtatgcgggccatgttcggaaaagaggtttctgctcccctctcagtcatcaaagcccgtgagaatttgtgatttctgttatgatctgttgagcgccggagatatggctacatgccaaccagccaggagtgatagctacagtcagtcactcaagtcaccgcttaatgacatgagcgacgacgatgacgacgatgatagttccgactag

SEQ ID NO: 17555 - DNA, 120 bp, synthetic construct
  source 1..120: mol_type = other DNA; note = Synthetic coding sequence
atgaagttcaacccctttgtgacaagtgaccgctctaaaaaccggaagcgccactttaacgcaccttcccacgttaggagaaaaataatgagcagccctttaagcaaggagctgaggtag

SEQ ID NO: 17556 - DNA, 1401 bp, synthetic construct
  source 1..1401: mol_type = other DNA; note = Synthetic coding sequence
atgggttggatcactgaggacctgatccggagaaatgcagaacataatgactgcgtcattttttcacttgaagagctgagcctccaccagcaggagatagaacgtctggagcatattgacaaatggtgtcgggaccttaaaattctttaccttcagaacaatctaatcgggaaaattgaaaacgtgtctaagcttaagaagctagaatacctcaaccttgcactcaataatatcgagaaaatcgagaatctggaaggctgtgaagagctcgccaaactcgatttaaccgtgaacttcataggggagctctcatcgatcaagaatcttcagcataatattcacctaaaggagctgttcctgatggggaatccatgtgcctccttcgatcattacagggaattcgttgttgcaactctgccccaactgaaatggctggatggtaaagaaatcgaaccatcagagcggatcaaggctctgcaggattattccgtgattgaacctcagatccgcgagcaagagaaggaccactgcctgaagcgggctaagctcaaggaggaagcacagaggaagcaccaggaggaagacaaaaacgaggacaaacgatcgaacgctggatttgacggacggtggtacacagacatcaatgccacgctaagctccctggaatctaaggatcacctccaagctccggacactgaggagcacaataccaagaaactggataacagtgaagatgacctcgagttttggaataaaccttgcctcttcacaccggaatcccgcttagaaacgctacggcatatggaaaagcaaaggaagaagcaggagaaactgagtgaaaaaaagaagaaggtcaaaccaccccggacactgattaccgaagacgggaaagccttaaacgtgaacgaaccgaaaatcgattttagtcttaaagataacgagaagcagatcatcttggatctggctgtttacaggtatatggatacctctcttatcgacgttgacgtgcaacctacttacgtccgagtgatgatcaagggtaaaccctttcaactggtactgccagccgaggttaaacccgatagctctagcgcaaagcgttcgcaaactacagggcacctggtcatttgtatgccgaaggtgggagaggtaatcaccggcggtcagagggcgttcaaaagcatgaaaacgacaagtgatcggagccgtgaacagaccaatacacgaagtaagcacatggaaaagctagaggtggacccctccaagcattcctttcctgatgtgacaaacatagtgcaggagaagaagcacacccctaggcgcagacctgaaccgaagatcattcccagtgaggaggatcctacattcgaggacaatccggaggtcccacccctgatctag

SEQ ID NO: 17557 - DNA, 528 bp, synthetic construct
  source 1..528: mol_type = other DNA; note = Synthetic coding sequence
atggcctcaaaccataaaagttcggctgcacgccccgtgagtcgtggtggtgtggggctgactggccggccccccagcggtataagacccctaagcggcaacatacgggttgcaactgccatgccccctggtaccgctcgaccaggttcgaggggctgcccaataggtaccggaggagtgttaagctcccagattaaagtcgcacatcggcctgtgactcagcagggcctcacgggaatgaaaactggaaccaaaggacctcagcggcagattctcgacaaatcttactatcttggacttctgaggtccaagattagcgaacttacaactgaagttaacaagctgcagaagggtatagagatgtacaatcaggagaactccgtgtatctgtcatatgagaaacgcgcagaaacactggccgtggagatcaaggagctgcagggccagcttgcagactacaacatgttggttgataagctgaacacgaataccgaaatggaagaggtaatgaacgactacaacatgtag

SEQ ID NO: 17558 - DNA, 438 bp, synthetic construct
  source 1..438: mol_type = other DNA; note = Synthetic coding sequence
atgaagttcaacccatttgtcacatcagaccgctcaaagaaccggaaacggcatttcaacgcaccctcacatgtgcggaggaagatcatgtcttcacctctgagtaaagaacttcgccagaaatataacgtgcggagcatgccgatcaggaaagacgatgaggtccaggtggtaagaggacactataaagggcagcagatcgggaaggtggttcaggtgtatcgtaaaaagtacgtcatttacattgagcgggtgcagcgggagaaagccaacggcacaaccgtgcacgttggcattcacccttctaaggtggtgattacccgcctcaagctcgataaggataggaagaaaatcctggaacgcaaagctaaatcacgccaagtaggcaaggaaaaggggaaatataaggaggagctgatcgagaagatgcaagaatag

SEQ ID NO: 17559 - DNA, 2136 bp, synthetic construct
  source 1..2136: mol_type = other DNA; note = Synthetic coding sequence
atgtcaagcgtgcagtcacagcaagagcagctctcacagtccgacccgtctccttcacctaacagctgctcttcgtttgaactgattgacatggacgcagggtctctgtatgagccggtaagtcctcactggttttattgcaaaataatagactcaaaagagacatggatcccatttaattccgaagattctcagcaactggaagaagcttattcttccggcaaagggtgtaacggacgagttgtgcccactgatggcggtcgttacgacgtacatcttggcgagcggatgagatacgccgtgtactgggacgagctggcttctgaggttcgacgctgtacctggttttataagggggacaaagataataagtacgtcccatactccgagtctttttcccaggtcttggaggagacctatatgttggccgtcacattagacgagtggaagaagaagcttgagtcccctaacagagagatcatcatcctgcacaacccgaagcttatggtgcactatcaacccgtggccgggagcgatgactggggtagcacacccactgaacagggccggccacgtactgttaagagaggggtggaaaacatctcagtggacattcactgtggagagcccctgcagattgaccatttggttttcgttgtgcatggcatcgggcctgcctgcgatctgagattccgctcaatagtccagtgtgtgaatgatttccggagtgtcagcctaaatctgctccaaacacattttaaaaaggcacaagaaaaccagcagatcggtcgggtggagttcttaccggtgaactggcattctcccctgcatagcacaggggtcgatgtggatctacaacgaatcacacttcccagtatcaacagacttagacacttcaccaacgatactatcttggacgtcttcttctacaatagccctacttattgtcaaaccatcgtggacacggtggccagtgaaatgaacagaatatataccttatttctgcaacgaaatcccgatttcaagggtggagtgagcattgccgggcattccctagggtctctaatactgttcgatattctgaccaatcagaaggatagtctcggtgacattgattcagaaaaagattccttgaacatcgtgatggaccagggcgacacacccacactcgaggaggacttgaagaagttacaactcagcgagtttttcgatatattcgagaaagagaaggtggacaaggaggccctagccctttgtactgaccgtgacttgcaggagataggaattccattgggtccccggaaaaaaatcttaaattatttctctactaggaaaaattccatgggcatcaagagacccgctccccagccagcatcaggagcgaatatcccgaaggagagtgagttctgctcttccagtaacacgaggaatggtgactatctcgacgtcgggatcgggcaagtgtccgtgaaataccctcgtctgatctacaagccagagatcttcttcgcctttggctcccccattggcatgttccttactgtccgaggacttaaaaggatcgaccctaattatagattcccaacatgcaaagggttcttcaacatttatcaccctttcgatcccgtagcctaccggattgagcccatggtggtccctggcgtggaattcgagccaatgctgattccacatcataagggtaggaaacggatgcacctcgaactccgagagggcttgacacggatgtcaatggacctcaagaacaacctcctgggctctttgcggatggcctggaagtcctttactcgcgccccctatcccgcactccaggcgtctgagactcccgaggagactgaggccgaacctgagagcacatccgagaaaccatctgacgtgaacaccgaagagacgagtgtagccgtcaaggaggaggtactccccattaatgtcggcatgttgaatggcggccagcgaattgattatgtgttgcaggagaagcccatagaaagcttcaatgagtatctcttcgccctacaaagtcatctgtgttactgggagtctgaggacacagtactcttggtcttaaaagaaatctatcagacgcaggggatttttctcgaccaaccccttcagtag

SEQ ID NO: 17560 - DNA, 471 bp, synthetic construct
  source 1..471: mol_type = other DNA; note = Synthetic coding sequence
atggcatcagtgctctcgaggcgtctgggcaaaagaagcctgttaggggctcgggttctcgggcccagcgcgtcagaggggccaagcgccgcccctccttcagagcctctgctcgagggcgcagccccccagccgttcaccacctctgacgatactccttgtcaggaacaaccaaaggaagtgctgaaggctccttccacttccgggctccagcaggttgcatttcagccagggcagaaggtatatgtatggtatggagggcaggaatgcacggggctagtggagcagcacagttggatggaaggccaggtgaccgtgtggctgctggagcagaaattgcaggtctgctgccgagtggaggaagtgtggctggcagagcttcaagggccttgcccccaagcaccccctctggagcccggggcccaggcccttgcctacaggcctgtaagccgtaatattgacgtcccttag

SEQ ID NO: 17561 - DNA, 309 bp, synthetic construct
  source 1..309: mol_type = other DNA; note = Synthetic coding sequence
atgccaagcattaaactccagtcctctgatggagaaatctttgaagtggatgtcgagatcgccaaacaatccgtgacaataaagaccatgctggaggatctcggaatggacgatgagggcgatgatgaccccgtcccgttacctaatgtcaatgcagcaatcctgaagaaggtgattcagtggtgcacccaccataaagacgatccaccacctccagaggatgacgagaacaaagaaaaacggaccgacgatattcccgtctgggatcaagagttcttaaaggtggatcaaggcacacttttcgaatag

SEQ ID NO: 17562 - DNA, 465 bp, synthetic construct
  source 1..465: mol_type = other DNA; note = Synthetic coding sequence
atggccgatgacttggattttgagacaggtgatgccggcgcctctgctacctttcccatgcagtgcagcgcacttcgtaagaatggttttgtagtcttaaagggctggccctgcaagatagtggagatgagtgcatccaagaccggcaagcacgggcacgctaaagttcacctggtaggcattgatatcttcacaggcaaaaaatacgaggacatatgcccatccacccacaatatggatgttcctaatatcaagagaaatgattttcaattaatcggtattcaggatggctatctttcactgttacaagactccggcgaagtccccgaggacttaagacttccggagggagatctggggaaggaaatcgagcagaaatatgattgcggggaggagattttaataacagtgctgtctgccatgaccgaggaggcggcagtggccattaaggccatggccaaatag

SEQ ID NO: 17563 - DNA, 306 bp, synthetic construct
  source 1..306: mol_type = other DNA; note = Synthetic coding sequence
atgagcgcaactgtggtggatgcagttaatgctgccccattgagtggcagcaaagaaatgagtcttgaagagcctaagaaaatgactagggaggattggcgtaaaaaaaaagagctcgaagagcagcgcaaattaggtaacgcccccgcagaggtcgatgaggagggtaaggatatcaacccacacattccacaatacatcagtagtgtcccttggtatattgacccatctaagaggccaacactcaagcatcagaggcctcagccggagaaacaaaagcagttctcaagcagcggggagtggtag

SEQ ID NO: 17564 - DNA, 3201 bp, synthetic construct
  source 1..3201: mol_type = other DNA; note = Synthetic coding sequence
atggccggggcactccgacgtgggagagccttaggttccagaccttctggacctactgttagcagcaggagaagtccacaatgtcccgtagcccaggagggcctcggggcaaggagcaggcctcgggtggcccctagaagcctggctaggtgtggaccgtcatcacgtcttatgggatggaaaccatcagaggcgaggggccagtcgcagagcttccaagcttctggacttcaaccccgaagtttaaaggctgcgagacgagccactgggaggcctgaccggagcagagcggctcgtccaactatggacccgtctgcccacagaagcagagccgctccccctaacatggatcctgacccacaggccggtgtacaggtggggatgcgagtcgttaggggagttgattggaagtgggggcagcaggatggcggcgagggcggcgtgggcaccgtggtggagttgggtcgacacggcagcccttcgacacccgatagaacagtggtggtgcaatgggatcaggggacccggacgaattacagagccggctaccagggcgctcatgatcttctgttatatgataacgcacagataggcgttcgtcacccaaacatcatctgtgactgttgcaagaaacacgggctccgcgggatgcgatggaaatgtagagtttgtctagattacgatctatgcacccagtgttatatgcataataagcacgagttggctcacgcattcgacagatatgaaacagcccacagccgcccagttactctgtcacctagacaggggttgcctagaatccctctgcggggcatttttcagggcgctaaggtagtacgggggccagactgggagtggggctctcaggatggaggcgaagggaaacctggacgggtggtggatatcagagggtgggatgtggaaaccgggaggtctgtggccagcgtgacatgggccgacggtacaaccaatgtttatcgcgtaggtcataaaggcaaagttgacctgaagtgcgttggcgaggctgcaggaggattttattacaaggaccacttgcctcgtctgggcaagccagcagaactgcaacggcgtgtgtcagccgattcgcagcctttccagcacggcgataaggtgaagtgtctactcgacacagatgtcttaagagagatgcaggaagggcatggagggtggaatcctagaatggcagaaacagggaccgtgcaccgcatcacagaccggggagacgttcgggttcagtttaatcacgaaaccagatggactttccaccctggcgcgcttacgaaacaccactctttttgggtcggtgacgtggtgcgtgtgatcggagacctggacaccgtgaagaggctgcaggccgggcacggcgaatggacagacgatatggcgcccgcattgggacgggtgggtaaggtcgtcaaggtctttggagacggcaatttacgcgttgccgtcgcggggcagagatggaccttcagcccatcatgccttgttgcctacagacctgaagaagatgctaaccttgacgtggcagagcgagctagggaaaataagagctcactgtcggtggccctggacaagctgcgggcacagaagtcagatccggaacatcccggcaggctggttgtcgaagtggctctcggcaatgccgcccgggccctggatctcctgagacgacggccggaacaggtcgatacaaagaaccagggtcggactgcgctccaggtcgccgcctatctgggccaggtggaactaatcaggttgctccttcaggctagggccggcgtggatctgccagacgatgaaggtaacaccgccttgcactacgctgcactcggcaaccagcctgaggctacccgggtgctgctgtctgccgggtgcagggccgatgcaattaattcaacacaatctacagcgctgcacgtcgccgtccagagggggttcctcgaggtggtccgggccttgtgtgaaagaggctgcgatgtcaacttaccagacgctcatagcgacactcccctgcactctgccataagcgcgggtacgggcgccagcgggatcgtcgaggtcctcaccgaagtaccaaatattgacgtgaccgcaaccaactcccagggatttacacttctccaccacgcctcactgaagggccacgcattggccgttcggaagatcttagctcgggcccgccaactcgttgacgcgaaaaaggaagatggttttacggcactgcatctcgccgcacttaataaccatagagaagtggcacagattttgataagggagggacgctgcgacgttaacgtcagaaacaggaaactgcagtcgccactgcatctcgccgtgcagcaggctcacgtgggactggttccacttctagtcgatgcggggtgctcagtgaatgccgaggatgaggaaggcgataccgcactgcacgtggcactgcagcggcatcaactgctcccgctggtcgccgacggcgctgggggtgatcctggaccgcttcagctactgtccaggctgcaggccagtgggcttcccggatcagccgaactgaccgtgggggcagctgtagcctgctttctcgccctagaaggagcagacgtatcttatacaaatcaccgaggtcggagcccactagacctggcagctgagggcagggtcctaaaagctctccagggatgtgcgcagcggtttcgcgagcgtcaggccggcggcggcgccgctcccggtcctcgacaaactctgggaacgccgaatactgtgactaatttgcatgtaggcgccgcgccgggacctgaggccgccgagtgcctggtctgcagcgagctggcgctgctcgtgctgttcagcccttgtcaacatcggactgtgtgtgaggagtgcgcccgccgcatgaaaaagtgtatccgatgccaagtagtagtgtccaagaagctgagaccggatgggtcggaagtggcctccgctgcgcccgcgccaggcccacctaggcagctggtcgaggagttgcagtctcgctatagacaaatggaagaacgcatcacatgcccgatatgtatcgatagtcatatccggttagttttccagtgtggtcatggcgcatgtgccccctgcgggagcgcactcagcgcttgccccatttgtcgccagcccattcgcgaccgcatccagatttttgtttag

SEQ ID NO: 17565 - DNA, 348 bp, synthetic construct
  source 1..348: mol_type = other DNA; note = Synthetic coding sequence
atgatgctgggcacagagggtggggagggatttgtagtgaaggtgagaggcctgccttggtcctgctcggccgatgaggtgcaacgattctttagcgactgcaaaatccagaacggtgctcaggggatcaggtttatctacaccagagaggggaggccatccggcgaggcgttcgtggagctggagagcgaagacgaggtgaagctggctctgaaaaaggaccgggagacgatggggcataggtacgtggaggtttttaagagcaataatgttgagatggactgggtgttaaaacacaccggccctaatagcccagacaccgcaaacgacggttttgtgagactgtag

SEQ ID NO: 17566 - DNA, 375 bp, synthetic construct
  source 1..375: mol_type = other DNA; note = Synthetic coding sequence
atggcttctgtactcagcagacgactcgggaaacgaagcctgttaggcgctcgagtcctcggaccaagcgcctccgaaggccctagtgccgcaccaccaagcgagcccttgctggaaggggcagcacctcaacctttcacgacatcagacgataccccctgccaggaacagcccaaagaagtattgaaagctccatctacctcaggtctgcagcaggtcgcattccaacctgggcaaaaggtctacgtttggtacggcggacaggagtgcactgggcttgttgagcaacacagctggatggagggccaagtgaccgtgtggctgttagagcagaagctgcaggtgtgctgtagagtagaggaggtttggctgtag

SEQ ID NO: 17567 - DNA, 438 bp, synthetic construct
  source 1..438: mol_type = other DNA; note = Synthetic coding sequence
atgaagtttaacccctttgtgacttccgacaggtccaagaatcgcaaacggcactttaatgcgccctcacatgtgcgtcgcaagattatgtcatcccctttatctaaggagttgcgccaaaaatataacgttaggtctatgccaataagaaaggacgacgaggtgcaggtcgtcagagggcattacaagggacagcagatcggcaaggtcgtacaggtgtaccgaaagaagtatgtgatctatatcgagcgcgtccagcgggagaaggcaaacgggacgacagttcacgtcggaattcatccgagcaaggtggtgatcacaaggctcaaactggataaggatagaaagaaaattctggagcgcaaggcaaaaagccgtcaggtcggtaaagagaaggggaagtacaaagaggagctcatcgagaagatgcaggagtag

SEQ ID NO: 17568 - DNA, 339 bp, synthetic construct
  source 1..339: mol_type = other DNA; note = Synthetic coding sequence
atggactctgagcttatgcacagcattgtggggtcctatcacaagccacctgagcgagtgttcgttccatccttcacccaaaacgaaccctctcaaaattgtcaccccgccaacctggaagtgacaagtccgaagatactgcacagccctaactcacaagctctgattctggctctgaaaacactgcaagaaaagattcaccgactcgagctggaacggacccaggccgaagataacctgaatattctttctcgggaagccgcacagtacaagaaggctttagagaatgaaactaatgagaggaatctggctcaccaggagttaatcaagcaaaagtag

SEQ ID NO: 17569 - DNA, 345 bp, synthetic construct
  source 1..345: mol_type = other DNA; note = Synthetic coding sequence
atgccttccgccgaggcaaagctgaaaaagaatcgatgcgccaattgcttcgattgccccggctgtatgcacacactcagcacacgtgctacctccattagcacacagctgcccgacgaccctgctaaaacgactatgaaaaaggcatattatttagcatgcggtttttgccgctggacgtccagagatgtggggatggcggacaaatccgtcgccagcggtgggtggcaggaacctgaaaatccacatacccaacgcatgaataaacttatcgagtactatcaacagcttgcacagaaagaaaaagtagaacgcgatagaaagaaactggctcgtaggcgctag

SEQ ID NO: 17570 - DNA, 648 bp, synthetic construct
  source 1..648: mol_type = other DNA; note = Synthetic coding sequence
atgccgggagaagctaccgagacagtccctgctactgagcaagagctaccgcagagtcaagccgagacaggctccggcaccgcaagcgattctggtgaaagcgtgcccggtatcgaggaacaggattcaactcagacgacaacccagaaggcctggttggttgccgccgccgagattgatgaggagccagttgggaaagccaagcagtcacggtctgagaaacgggctcgaaaggcgatgagcaagctggggctgctgcaggtaaccggcgttactagagtcaccatctggaagtcgaaaaatattctgtttgtcattactaaattggacgtctacaaaagccctgcctccgatgcatatatagtgtttggtgaggccaaaatccaagatctttcccagcaggctcagctcgccgctgccgaaaaattccgggtgcaaggcgaagctgtgggcaacatccaagagaatacccagactcccaccgtgcaagaggagtctgaggaagaggaggtagacgagacaggcgtggaggtgaaggatgtgaaactggtcatgagccaggctaatgtatccagggccaaagcggtgcgagcccttaagaacaactccaacgacatagttaatgccattatggagctgactgtgtag

SEQ ID NO: 17571 - DNA, 432 bp, synthetic construct
  source 1..432: mol_type = other DNA; note = Synthetic coding sequence
atgtcagctacagtcgtcgatgccgtgaacgccgctccccttagcgggtctaaggagatgtcactagaggagccgaagaagatgacacgagaagactggaggaagaagaaagagctggaggaacagcgcaagttaggtaatgcacctgctgaagtggatgaagaaggcaaggatataaatccccacatcccacagtacatttccagcgtcccgtggtacattgacccatctaagcgccctaccttaaagcaccagagaccccagcctgagaagcagaaacagttttcctctagcggagagtggtataaaaggggggtgaaagagaacagtattatcactaagtatagaaaaggcgcgtgcgaaaattgtggggctatgacacacaagaaaaaagactgttttgaaagaccgcgtcgggtcggagcaaaatag

SEQ ID NO: 17572 - DNA, 567 bp, synthetic construct
  source 1..567: mol_type = other DNA; note = Synthetic coding sequence
atggccagcgttctgtcccggaggctggggaagaggtcactgctgggcgcccgggtccttggaccatctgcttccgagggccccagcgctgctcccccaagtgaacccctgctagaaggagctgccccacagcctttcacaacctcagacgacactccatgtcaggaacaacccaaggaggtcctcaaagcaccatcaaccagtggtttgcagcaagtggcatttcagccaggacagaaggtgtatgtgtggtacggaggccaggagtgcactggactggtcgaacagcacagctggatggagggacaggtgacagtgtggctactggagcagaaactgcaggtgtgctgtagggtagaagaggtttggctcgcggagctacaggggccatgcccccaggccccacccctcgaaccaggagcccaagcgctggcttatagaccagtgagtaggaacatcgacgtaccaaagcggaaaagtgatgccgtggagatggacgagatgatggctgccatggtgctcacttcactgtcatgttccccggtagttcagtctccgccaggatag

SEQ ID NO: 17573 - DNA, 87 bp, synthetic construct
  source 1..87: mol_type = other DNA; note = Synthetic coding sequence
atgatgctcgggaccgaggggggggagggattcgtggtcaaagtgaggggtttaccttggtcttgttccgcagatgaagtgcaatag

SEQ ID NO: 17574 - DNA, 87 bp, synthetic construct
  source 1..87: mol_type = other DNA; note = Synthetic coding sequence
atggactcagaactgatgcacagcattgtcggcagctaccacaagccgccagaaagggtctttgtccccagtttcacccagaactag

SEQ ID NO: 17575 - DNA, 1074 bp, synthetic construct
  source 1..1074: mol_type = other DNA; note = Synthetic coding sequence
atgggaggagccgtgtcggctggggaagacaatgatgacctgattgacaatctgaaagaagctcagtacataaggaccgagagggtggaacaggcctttagagctatcgacagaggtgattattacttggaggggtatcgtgacaatgcgtacaaagacctggcatggaagcatggaaacatccatctttcagcaccttgcatttactctgaagttatggaagcgctgaaactgcaacctggactttcctttttaaacttaggctccgggacgggatacctttctacgatggtcggtctgatactgggacccttcgggattaaccacgggattgaactccactccgacgtggtggaatatgctaaagaaaagctggaaagcttcattaagaatagcgactcctttgataaatttgagttttgtgagcctgcattcgtggtcgggaactgcctccaaatagcctccgacagccatcagtatgacaggatctactgtggcgccggagtgcagaaggaccacgaaaactacatgaagatcctactgaaggtgggaggcatcctggtgatgccgatagaggatcagctcacccaaataatgagaacggggcagaatacttgggagagcaagaacatattagccgtgtccttcgccccgctcgttcaaccttccaagaatgacaacgggaaaccagattccgttgggctgcccccctgcgccgtccgtaatcttcaggatcttgcccgcatttacattcgacggaccctccggaatttcatcaatgacgaaatgcaggctaagggaataccgcaaagagccccaccaaaacggaaacggaagcgtgtgaagcagaggataaacacgtatgtgttcgtggggaatcaattaataccacaaccattggactctgaggaggacgaaaaaatggaggaggataataaggaggaggaggaaaaggatcacaacgaggcgatgaaaccggaagagcccccccagaatcttttacgagagaagatcatgaaacttcccttgcccgagtcccttaaggcctacctcacctacttcagggataaatag

SEQ ID NO: 17576 - DNA, 483 bp, synthetic construct
  source 1..483: mol_type = other DNA; note = Synthetic coding sequence
atgcccagcatcaagctgcaatctagcgacggagagatctttgaagtcgacgtggagattgccaagcagtccgttacaatcaagaccatgctagaagacctgggcatggacgatgagggggatgatgaccctgtcccgctgccgaatgtgaacgcagcaattctgaagaaagttattcagtggtgtacacaccataaggacgatcccccgcctcctgaggatgatgagaacaaggagaaacggacagacgacatccctgtgtgggatcaagaattcctaaaagtcgaccaaggaaccctcttcgaattgattttggctgcaaattacctcgatatcaaggggctgcttgacgttacttgcaaaaccgtagccaacatgatcaaagggaagacgccggaggaaattcggaagacattcaacattaaaaacgacttcacagaagaagaggaagcacaggtaggcagcacccaattctgtctttag

SEQ ID NO: 17577 - DNA, 342 bp, synthetic construct
  source 1..342: mol_type = other DNA; note = Synthetic coding sequence
atggatagtgagttgatgcactctattgtcggcagctaccacaagccacctgaaagagtgttcgttccgtcttttacacagaacgagccttcacagaattgccatcccgctaatctggaggtgacctccccgaagatactccactctcctaactcacaggccctgatcctggcgctgaaaacgctgcaggaaaaaatccatagactcgagcttgaacgcacacaggctgaagacaacctcaacattctgtccagagaagctgcccagtataaaaaagctctagagaatgagaccaatgagagaaacctggctcatcaagaactcataaaacaaaaaaagtag

SEQ ID NO: 17578 - DNA, 309 bp, synthetic construct
  source 1..309: mol_type = other DNA; note = Synthetic coding sequence
atggccagcgtgctgagccggcggctgggcaaaaggagtctgttaggcgcccgggtgttaggtccttcagcctctgaggggccatccgctgccccgcctagcgaacccctgctagaaggagccgccccacagcctttcacaacctccgatgatacaccatgtcaagagcaacccaaagaagtactgaaagctccttcaacgtccggccttcagcaggttgcttttcaacccggccaaaaggtatatgtctggtatgggggacaggagtgtaccggcctggtggagcaacactcctggatggaagggtag

SEQ ID NO: 17579 - DNA, 492 bp, synthetic construct
  source 1..492: mol_type = other DNA; note = Synthetic coding sequence
atgccttctattaagctgcaaagttccgacggcgagatatttgaagtggacgtcgagattgccaaacagtcggtgaccataaaaactatgctggaggacctcgggatggatgatgagggcgacgacgaccctgttccactcccaaatgttaacgccgccatcctaaagaaggtaatacagtggtgtactcatcacaaagatgatcctcctccccctgaagacgacgaaaataaggagaagaggaccgacgatatacccgtctgggatcaggagtttctcaaggtggatcaagggacattgttcgagctgattttggccgcaaactatctcgacattaaggggctactggatgttacctgcaagacagtggcgaacatgatcaagggcaagacccctgaggaaatccggaagacatttaacatcaaaaatgatttcacagaggaagaggaggcccaggtcagaaaggagaatcagtggtgcgaggagaaatag

SEQ ID NO: 17580 - DNA, 441 bp, synthetic construct
  source 1..441: mol_type = other DNA; note = Synthetic coding sequence
atgtgcccaggcaactggctgtgggcctccatgacatttatggcgcggttcagcagatcctcttctcggtctcccgtacgaacaaggggaactctggaagagatgcctacagtccagcaccccttcctaaatgtgttcgagcttgagagattattgtacactggcaaaacggcatgtaaccacgctgatgaagtttggcccggcctctacttgggggatcaagatatggcaaataaccggcgcgagcttcgccgcctaggcatcacccatgtcctgaatgccagtcactcccgatggcggggtacccctgaagcttatgagggcctgggcatcaggtatctcggcgtggaggcccacgattctcctgccttcgatatgtcaattcatttccagactgcagctgattttatacatcgggcccttagccagccaggtggctag

SEQ ID NO: 17581 - DNA, 1542 bp, synthetic construct
  source 1..1542: mol_type = other DNA; note = Synthetic coding sequence
atggcctccgtgttgtcccgaagactcggaaagcggtccctcctgggagcccgggtactgggcccaagcgcaagcgagggaccgtctgccgcgcccccgtctgagcctttgctcgagggtgcggctcctcaacctttcactacatccgatgataccccttgccaagagcagccgaaggaggtgttgaaagccccaagcacatccggattgcagcaagtggccttccagcctgggcagaaggtgtatgtctggtacggtgggcaggagtgcactggccttgtggaacagcatagctggatggagggccaggtgacagtgtggctgctggagcagaagttgcaggtctgttgtagggtggaggaggtgtggctggccgagctgcagggcccctgtccacaggctccacccctggagcccggagcccaggcactggcttataggcccgtgtcccgcaatatcgacgtgccaaagcgcaaaagtgatgctgtggagatggatgaaatgatggccgcgatggttctgaccagcctgtcatgctctcccgtggtgcagtctccacctgggactgaagctaatttctcggcatcccgggcagcatgcgatccatggaaggaaagtggggacatatctgactcaggtagctctaccacttcaggtcactggagcggcagcagtggcgtgagcaccccaagtcctcctcatcctcaggcttcccccaagtacctcggagatgccttcgggagccctcagaccgaccacggctttgagaccgacccagatccctttctgctggacgaacccgcccctagaaagaggaagaattctgttaaggtgatgtataagtgcttgtggcccaactgtggcaaggtgcttcggtcgattgtcggcatcaaaagacacgttaaagctctgcatctcggggacacggtggatagcgaccagttcaaaagagaagaggacttttactatacagaggtacagctgaaagaggagtctgccgccgccgcagcggcagcagccgccggaactcctgtccctggaaccccaactagtgagccagcccccacaccctccatgaccggcctgcccttgtcagccctgcccccaccccttcataaggcacagtcatcaggccctgaacaccctggccccgaaagctctctgccctcaggcgctctgagcaagtccgctccagggagcttctggcatatccaggccgaccacgcctatcaggcactcccaagcttccagataccggtgagcccacacatttatacatctgtatcctgggctgctgcccccagtgcagcttgctccctgtccccagtgagatcacgaagcttgtccttcagcgagcctcagcagccagcccctgcaatgaaaagccaccttattgtaacctctccaccccgggctcagagtggggcgagaaaagctaggggcgaagctaaaaagtgtaggaaggtctacgggatcgagcaccgagaccagtggtgcacggcctgtagatggaaaaaggcctgccagcgctttctggactag

SEQ ID NO: 17582 - DNA, 438 bp, synthetic construct
  source 1..438: mol_type = other DNA; note = Synthetic coding sequence
atggctgtgtccacgggggtgaaggtgccccgaaacttccgcctgttggaggagttagaggaaggccaaaaaggcgtaggcgatggcacagtttcctgggggttggaggacgatgaagatatgacgcttacaaggtggacagggatgataatcggtcctcctcgcactaattatgaaaaccggatttattctcttaaggtcgaatgcgggccaaagtatcccgaggctccgcccagtgtgaggtttgtgactaaaataaatatgaatggtatcaataactcctctggtatggttgacgcaaggtcgatccccgtgttagcaaagtggcagaacagctatagtattaaagttgtgttgcaggaactgcgtaggctgatgatgtctaaggaaaacatgaaattgccccagccccctgagggccagacctataataactag

SEQ ID NO: 17583 - DNA, 1542 bp, synthetic construct
  source 1..1542: mol_type = other DNA; note = Synthetic coding sequence
atggcatccgtactgagcaggcgactcggaaaacggtccctccttggcgctcgcgtgttaggtcccagcgccagcgaaggcccctccgcagctccaccttcagagccccttctcgagggggccgcccctcagccattcactacttccgacgatacaccttgccaggagcagcccaaagaggtccttaaggctccatccacgtcagggttacagcaggtcgcattccagcccggacaaaaagtgtatgtttggtacggcggccaggaatgtaccggcctcgtagagcagcacagctggatggaaggccaggttactgtatggttgctggagcaaaagttacaagtgtgctgtcgagtcgaagaagtctggctggcggagctgcaaggcccgtgtccgcaggcacctcctttggagccaggcgcacaggctcttgcataccggcccgtgtcgaggaacatcgacgtccctaagaggaaatccgatgctgtcgagatggacgaaatgatggctgcgatggttctgacatcactatcttgctcgcccgtggtccagtcccctccaggcactgaagccaacttttccgcatcaagggccgcctgtgacccatggaaagagtccggcgatattagcgattccgggtcctcgacaacgagcggtcattggtccggatcatctggtgtatccacacctagcccccctcaccctcaagcaagccccaaatatctcggcgacgcatttggctccccccagactgatcacggctttgaaaccgatcccgacccattcctgctcgatgagccggcacccagaaaaagaaaaaattcagtgaaagttatgtataagtgcctgtggccaaattgtggaaaagttcttcgctcaattgtaggcatcaagcgtcacgtgaaggccttgcaccttggggataccgtggattcggaccagtttaaacgcgaggaggacttctactatacggaggtgcaactgaaggaggagagtgcagcagcagctgcagcggccgcggctggcacccccgtccccggcactccaacctcagaaccggccccgactccgagtatgacgggtctcccactgtcagcactccccccacccctgcacaaggcacaatcctctggccccgagcatcctggacctgagtcgagtctcccatccggagcactttctaaatccgcccctggctctttctggcacattcaagctgatcacgcataccaggccctcccaagtttccagatccctgtgtccccccatatatacacttctgtatcatgggccgctgccccatccgctgcctgttctctttctccagttaggtctaggagcctgtcctttagcgagccccagcagcctgcacctgcgatgaagtcccaccttatcgtaacaagtccaccacgcgctcagtccggtgctcgcaaggcacgcggggaggctaagaagtgcaggaaggtctacgggatcgaacaccgtgatcagtggtgcaccgcatgccgatggaagaaggcctgtcagcgctttctggattag

SEQ ID NO: 17584 - DNA, 57 bp, synthetic construct
  source 1..57: mol_type = other DNA; note = Synthetic coding sequence
atgccctccataaaactccaaagtagtgacggggaaatattcgaagttgacgtatag

SEQ ID NO: 17585 - DNA, 1935 bp, synthetic construct
  source 1..1935: mol_type = other DNA; note = Synthetic coding sequence
gttgccagtgaagggtctgtccgtcgtccctccggccccgtgcctgctccccaaccccctgcttttagattcgtgtctcgccctggacgcgcccggtccgaaagcgaaaccctggagagatcccccccccagtcaccagggcctggtaaagccggtgacgcacctaaccgccggagcggccacgtccgaggagcacgggtgttgtctcccccgggtcggagagctcgattgtccagccccggaccttctaggtcctcagaagctagagaggaactgcgccgccacctcgtcggccttatcgagaggagccgcgtcgtcatattctctaagagctactgtccccattctacaagggttaaggaacttttcagttcacttggggttgagtgcaatgttctggagctggaccaagtggatgatggcgcacgggtgcaagaagtactgagcgagattactaaccagaagaccgtgcccaacattttcgttaacaaggtgcatgttggaggctgcgatcagaccttccaggcatatcagtccggactgttacagaagctgcttcaggaggatctagcgtacgactatgatctgatcattattggaggggggtcaggaggactgtcatgtgccaaagaagcggcaatactgggtaagaaagtgatggtacttgacttcgtcgtcccaagcccccaggggacgagttggggcttgggggggacatgcgtaaacgtgggctgtatacctaaaaagctgatgcaccaggcggcgctcctcgggcaagccctatgcgacagtcgcaagtttggctgggaatataaccagcaggtcaggcataactgggaaacaatgacaaaggcaatccagaaccacattagctctctgaattggggttaccgacttagcctgcgcgagaaagctgtggcgtatgtgaattcgtacggagaattcgtggagcatcacaagataaaggcaacaaataagaaaggccaggaaacgtactataccgccgcccagttcgtcatcgcaaccggagaaaggcccaggtatctcggcattcagggagacaaggaatactgtatcacttccgatgatttattttctcttccctattgcccaggtaagacactcgtggtcggcgcaagctatgtcgctctggaatgtgcgggcttcctggcaggtttcgggctggatgttacagtaatggtgcggtccatcctgctccggggtttcgatcaggagatggctgaaaaggtcgggagctacatggagcagcacggtgtgaagtttctgaggaagtttatccccgtaatggtccagcaacttgagaagggctcacctggcaagctcaaggtgctcgccaagagtacagaaggcaccgagaccattgaaggggtgtataatactgttctgctcgcaattggcagggacagctgtaccaggaagatcgggctggagaagatcggcgttaaaattaacgagaaatcaggaaaaatccctgtcaatgacgtggagcagacaaatgtaccgtacgtgtatgctgtgggggacatcctcgaagacaaacctgagctgacacccgtggcgatccagtcaggtaaactactggcccagcgtttattcggagcctcccttgagaaaatttaccacactctgttctggccactggaatggactgtggctggtcgagagaacaatacctgttatgctaagataatctgtaataagttcgaccacgaccgagtcatcggctttcacatcctcggccccaacgcgggcgaggtgacgcagggcttcgccgctgccatgaagtgcggcctgacaaagcaactactcgatgacacgattggaatccatcccacgtgtggggaggtcttcacaactctggagattacaaagtcttcaggtctggatattacccagaaaggttgttgagggtag

SEQ ID NO: 17586 - DNA, 1338 bp, synthetic construct
  source 1..1338: mol_type = other DNA; note = Synthetic coding sequence
atgaacaagggcattagcagtattcccattaacctacgagtgtacagtccacacgtgctgaatctcactctgattgacttacccggaataacaaaggtccccgttggggaccagcctccagatattgagtatcaaattcgtgagatgatcatgcagttcatcactcgggagaattgcctgatcctggccgtaactcccgcgaataccgatctggcaaattctgatgcacttaaattggccaaagaggtggatccacaggggctacggacaatcggggtgatcacaaagctggacctcatggatgagggtactgacgctcgggatgtgttggagaataagttgttgcctctgcgcagagggtatgtgggtgtagtgaaccggtcccagaaggatattgatggcaagaaggacatcaaagcggccatgctggccgaacgcaagttcttcttatcgcacccagcctatcgccacatagcagatcgcatgggaactcctcatttacaaaaggtgcttaaccaacagctgacaaaccacatccgggatacactgcctaatttcagaaacaaattacaaggacaactcctatccatcgaacacgaggtggaagcctataaaaatttcaagcccgaggacccgaccaggaagacgaaagccttactccaaatggtgcaacagtttgccgtggacttcgagaaacgcattgaaggctctggcgatcaagtggacacgctggaactgtccggtggggctaagatcaatagaatcttccacgagcgatttccatttgagattgtcaagatggaattcaacgagaaagaactcagacgcgaaatttcttatgcaataaaaaacatccacggaatccgaacaggattgttcacccctgatatggctttcgaagcaattgtaaagaaacagatcgtcaaactgaagggtccatccctgaaatcagtggacctggtcatccaggagcttatcaacacggtaaagaagtgtaccaagaagttagccaacttccctcggttgtgcgaggagacagagaggattgtcgcaaaccatattcgggagagagaagggaagactaaggatcaagtgcttcttttgattgacattcaggttagctacatcaacacaaaccatgaggactttattggattcgccaatgcccagcagaggagtagccaggtgcataagaagactaccgtcggcaaccaggtcatccgcaaaggctggctgacgatttcgaacatcgggatcatgaaaggtggatctaagggctactggttcgtattgaccgctgaaagcctctcttggtacaaggatgatgaggagaaatag

SEQ ID NO: 17587 - DNA, 1560 bp, synthetic construct
  source 1..1560: mol_type = other DNA; note = Synthetic coding sequence
atgctgcagctgatggactctggcattaccatatgccttaggaacggagctgccagcgtattcaaaaagaaggagtggtctacacagggggaagagaataagcaagactccaagctaaagaaactgtccgaggattcgttgacaaagcagccagaagaagtgtttgatgtgttagaaaagttgggcgagggtagttacggaagcgttttcaaggccattcacaaggagagcggtcaggtcgtggccatcaaacaagtgcccgtggaatctgatctgcaggaaattataaaggagatatccattatgcagcagtgtgacagtccatacgtggtgaagtactacggcagctatttcaagaacacggacctgtggattgtgatggaatactgtggggccgggtccgtgagtgacatcatcagacttaggaacaagacactaatcgaggacgagatcgcaaccatcttgaaaagcacactgaagggtctcgaatatctgcattttatgcggaagatccatcgtgacataaaagccggaaatatcctacttaacaccgaaggacacgctaagcttgcagacttcggggttgctgggcaactgacagacactatggccaaacggaacacagttatcggtacccctttctggatggcccctgaggtgatccaagaaatcggctataattgtgtggcggatatctggagcctgggaattacctctatcgagatggccgaggggaagcccccttatgctgatatccatcccatgcgggccattttcatgatcccgacaaacccgccaccgaccttccggaagccggagctatggtctgatgactttaccgatttcgtgaaaaaatgtttagttaaaaacccagaacaacgcgcaactgcaactcagctcctgcagcacccttttattaaaaacgccaagcctgtctcgattctgcgtgatcttataactgaggccatggagatcaaggccaaaagacacgaagaacaacagcgcgagctcgaagaggaggaagagaactctgatgaagatgaactcgacagtcatactatggtcaagacatctgttgaatctgtgggcactatgagggctacatctacgatgtctgaaggggcccagactatgattgagcataactcaacgatgttggaatccgacctgggcaccatggtgattaatagcgaggatgaagaagaggaggatggaacaatgaaaagaaatgccaccagtccacaggtccaacggccatccttcatggactattttgacaagcaggactttaagaacaagtctcatgagaattgtaatcaaaacatgcatgagcccttccccatgagcaaaaatgtgtttccagacaactggaaagtgccccaagacggagacttcgattttctcaagaatttgagtctagaggagctgcagatgaggctgaaagccttagaccctatgatggaacgcgaaatagaagagctgcgccagagatatacagcgaagaggcaacctatcttggacgctatggacgccaagaaacgcagacagcagaatttctag

SEQ ID NO: 17588 - DNA, 1392 bp, synthetic construct
  source 1..1392: mol_type = other DNA; note = Synthetic coding sequence
atgaagatcatggattctgaactgatgcacagtatagtcggatcttaccacaaaccacctgagagagtgtttgtgcctagctttactcagaacgaaccatcgcagaactgccaccctgctaatctagaagttaccagcccaaaaatcctccattccccgaattctcaggccttgatactggcactgaagacccttcaggagaaaattcaccgcctggagctcgagcggacacaggctgaggataatttgaatatcctgtccagagaagcggcacagtacaagaaggccctcgaaaacgagacaaacgagcggaaccttgcacaccaagagctcataaaacagaagaaagacattagtatccaattgtctagtgctcagtcccgttgtaccctgttggaaaaacaactcgaatatacgaagcgcatggtgttgaacgtggagcgcgagaaaaacatgattctcgaacagcaggctcagctccaacgtgagaaagagcaagaccaaatgaagttgtatgccaagctggagaaactggatgtgctggagaaggaatgtttccggctcacaacaactcagaagacagctgaagataagatcaaacacctcgaagagaaactgaaggaagaagaacaccaaaggaagctgtttcaagacaaagctagtgaactgcagacggggctggagatttccaagatcattatgagtagcgtgagtaatctgaagcattcgaaggaaaagaaaaagagctccaagaaaactaagtgcattaagcgccgacccccttggcagatttgctctaagtttggagctctacctttcgtcgcagaaaaaatgagacagcacagggatcctcatattctacaaaagcctttcaacgtaaccgagacgagatgcctgccaaaacctagtcgtactacatcatggtgtaaggcaatacctccagactccgaaaaatcaatttccatctgtgacaacctgtccgaattgctcatggctatgcaggacgaactcgatcaaatgagtatggaacatcaggagctgttgaagcagatgaaagagacagaaagccatagcgtctgtgatgacatcgagtgcgagctggaatgtctgctgaaaaaaatggagataaaaggtgaacaaattagcaaactgaaaaaacaccaggacagcgtctgtaagctccagcagaaggtccaaaacagcaaaatgtcagaagccagcggaattcagcaagaggacagctaccctaagggttctaaaaacattaagaactcaccgaggaagtgtctgactgacaccaatctgttccagaaaaactcctcattccaccccatccgagtacacaacttgcaaatgaagctgcgcagagacgatatcatgtgggaacagtag

SEQ ID NO: 17589 - DNA, 1050 bp, synthetic construct
  source 1..1050: mol_type = other DNA; note = Synthetic coding sequence
atggaggacccgcagtctaaggagccagctggggaggcagtcgccctggctctgctcgagagccctaggcccgagggtggcgaagagcctcctcgcccaagtcccgaagaaacccagcaatgcaagtttgatggacaggagacgaagggatctaagttcatcacctcctcagcctccgattttagtgaccccgtgtacaaagagatcgctatcacgaacggctgcatcaataggatgagtaaggaagaactccgggctaaactcagcgaattcaagctcgagaccagaggcgtgaaggatgtgttaaaaaaacgcctcaaaaactactacaaaaagcagaaattgatgttgaaggaaagtaattttgcagacagttattacgactacatttgcatcatcgattttgaggccacatgcgaagagggcaatccacctgagttcgtccacgagataatcgagtttccggtggtgctactcaacacacacaccctagaaatagaggatacctttcagcagtacgtcagaccggagataaatacccaactgagtgatttctgtatcagcttgaccggcatcactcaggatcaggtcgaccgtgccgatacttttccacaggtcctgaaaaaagtgatcgattggatgaaattgaaggagcttggtaccaaatacaaatactccctcctcactgatggctcctgggacatgtctaaattcctcaatattcagtgccagctgagtaggttaaagtaccctcccttcgccaagaagtggatcaatattcgtaagtcatacggaaacttctacaaggtgccccgatctcagaccaagttaacaattatgcttgagaagctcggtatggattatgatggacgcccgcattgtggtctggacgattccaaaaacatagcacgcatagcggttcggatgctccaggatggttgtgagctgcgtattaatgaaaagatgcatgccggccagttgatgagcgtgtcctcatctctacccattgaagggacgcctcctccccagatgccccactttagaaagtag

SEQ ID NO: 17590 - DNA, 636 bp, synthetic construct
  source 1..636: mol_type = other DNA; note = Synthetic coding sequence
atgtgccccggaaactggctctgggcatccatgacttttatggcacgattctctcggtctagctcgaggtcacccgtcaggactcgaggaacgctggaggaaatgcccacagtccagcaccctttcctgaacgtgtttgagctcgaacgtctactgtacactgggaagactgcttgcaaccacgcagacgaggtgtggcccggcctgtacctgggagatcaggatatggccaataatcggagagaactgagacgactggggataacgcacgtactgaacgctagtcatagccggtggaggggcaccccagaggcctatgagggactgggaatacggtatttgggcgtcgaggctcatgattcccctgcattcgatatgagtattcatttccagacagctgctgacttcatccacagggctctgagtcaacccggtgggaagatactcgtgcattgtgccgttggtgtgagtcgctccgcaactctcgtcttggcatacctgatgttgtatcaccaccttactctggtcgaggccatcaaaaaagtgaaggatcacagaggcatcattcccaatagaggctttctaagacaattgctagctctagatagacgcctgcgccagggcctggaggcttag

SEQ ID NO: 17591 - DNA, 438 bp, synthetic construct
  source 1..438: mol_type = other DNA; note = Synthetic coding sequence
atgatcccaatttggaaacaacaggctcggcctggcgatggaccagtgatttgggattaccatgtggtgctgctgcatgtgtcctccggcggtcagaatttcatctacgatttagatacagtgctgccctttccctgtctgttcgacacatacgtggaggacgcattcaaatctgacgacgatattcacccccagttccgcagaaaatttcgtgtcattcgagctgactcttacctcaaaaacttcgcttctgatcgatcgcacatgaaggactctagcgggaactggagagaacccccccctccgtatccttgcatcgaaactggcgatagcaaaatgaatctcaacgacttcatctccatggaccctaaagtgggatggggggcagtgtacaccctctcagagtttacacacaggttcgggtctaagaattgctag

SEQ ID NO: 17592 - DNA, 258 bp, synthetic construct
  source 1..258: mol_type = other DNA; note = Synthetic coding sequence
atgtccgacaagtcggacctgaaggctgaactggagaggaaaaagcaacggctagctcagataagagaggaaaagaagaggaaagaagaggaacgcaagaagaaagaagccgatatgcagcaaaagaaggagcccgtccaggatgattccgacttggatcggaaaaggcgcgaaacagaggcgctgctccagtctatcgggataagccctgaacctcctctggtccctaccccgatgagcccctcgtcaaagagctag

SEQ ID NO: 17593 - DNA, 588 bp, synthetic construct
  source 1..588: mol_type = other DNA; note = Synthetic coding sequence
atggactctgaacttatgcatagtatagtagggtcctaccacaagccccctgaaagagtctttgtcccttctttcacgcagaatgagccatcccagaactgccatcctgccaacttggaggtcaccagccccaagatactgcattctccaaattcacaagcgctgatactcgccctgaaaacactgcaagagaaaatccatagactggaacttgagcggacacaagccgaggacaacctcaacattctgtccagggaagccgcacagtacaaaaaggcacttgaaaacgagaccaatgagaggaatcttgcgcaccaggaattgattaagcaaaaaaaagacatttcgatacagttgtcctcagcacagagccgatgtacacttctcgagaaacaactcgaatatactaaacgcatggtcctgaacgttgaaagagagaagaatatgatcctcgagcagcaagctcagctgcagagggagaaggagcaggatcagatgaagctctatgcaaaactcgagaagctggatgttctggagaaagaatgcttccggctgaccaccacccagaaaacagccgaagataaatag

SEQ ID NO: 17594 - DNA, 1272 bp, synthetic construct
  source 1..1272: mol_type = other DNA; note = Synthetic coding sequence
atggaggacaaacgaagcctcagcatggcacggtgcgaggaacgaaattctagaggacaggaccatggcctcgagcgtgtgccgtttcccccacaactgcagtcagaaacgtacttacatccagcagatccctcacctgcatgggatgatccaggctcaactgggagtccaaacctgcgactgcttaccgaggaaattgcctttcagcctctggctgaggaagcatcctttcgaagaccccaccccgacggagatgttcccccccaaggcgaggacaatctgctttccttgccattcccgcagaaactgtggagactggttagctcaaatcagttcagttctatatggtgggacgattccggagcctgtagagtaataaatcagaaattgttcgaaaaagagatactcaaacgcgacgtcgcacataaagtctttgccactacctcaatcaaaagcttcttccgccaactgaacttatatgggttccggaaaaggaggcagtgcacctttagaacctttacgaggattttttctgccaagcggcttgtgagcattctgaacaaactcgaattttactgtcatccatattttcagagagactcgccacatctgctcgtgcggatgaagagaagggtcggggttaagagtgctcccaggcaccaagaggaggataaaccagaggccgccgggagctgtctggcgcccgctgacaccgagcaacaggaccacacgtcaccaaatgagaatgatcaggtgacccctcagcaccgggaaccagcagggcccaacacacagatcagatccggatctgcaccgcccgctacccccgtcatggttcccgacagcgctgttgcttccgacaacagccctgtgactcagcccgcaggggaatggtccgaagggtcgcaggcccatgtaaccccagtcgcagcagtccccggcccggctgcgctgcctttcctttatgtgccagggtccccaactcaaatgaattcctatggcccagtcgtggccctgcctaccgcatctcgatccactctggctatggacacgacaggactgccggctcctggaatgctgcctttctgccacctgtgggtgccagtgactcttgtagcagctggcgcggcacaacccgccgcttcaatggtgatgttcccccatttacccgccctgcatcaccattgccctcactctcataggacatctcaatacatgccagcctcggatgggcctcaagcctacccagattacgccgatcagtctacctag

SEQ ID NO: 17595 - DNA, 2097 bp, synthetic construct
  source 1..2097: mol_type = other DNA; note = Synthetic coding sequence
ggagtgggtggccgtggcgagagactcccaagaggcttcgcccgcgtcgtacgggtggcctcagaaggcagcgttcgccggccctccggccctgttcccgcccctcagcctccagccttccgctttgtgtccaggcccgggcgcgcgcgctccgagtccgaaactctggagagatccccaccccagtcgcctgggcctgggaaagctggagacgcaccaaaccggcggtctgggcacgtgcgtggggccagggtactgtctccacctgggcgccgcgcaaggctgtcttccccgggcccgtcccggagtagcgaggcacgggaagagctacggcggcatctggtcggactgattgagcgctccagagtggtcatcttcagtaaatcctactgtccccactcaacccgagtcaaagagctcttctcaagtctcggggtcgagtgtaacgtgttagagctggatcaggtagacgacggtgcccgggttcaggaggtgctgtctgaaatcacaaatcaaaaaactgtcccaaatatcttcgtcaacaaggtccacgttggggggtgtgatcagacattccaggcataccagagtggtctgctccaaaagctccttcaggaggacctggcttacgactacgacctgattattatcggcggtggctcgggcggcctttcttgtgccaaagaggctgctattctggggaaaaaggtgatggtgctcgattttgtggtgcccagtcctcaaggaacatcctgggggctgggtggaacttgtgtgaacgttgggtgtatccctaaaaagctcatgcaccaggcagctttactgggccaggccctttgtgatagtcgaaagttcggctgggagtacaaccagcaggtccgacacaactgggagactatgacaaaggccattcagaaccacataagcagcttaaattggggctaccgattgtcgctaagggagaaggctgtggcttatgttaattcttatggggagtttgtggaacaccacaaaatcaaggccacgaataaaaaaggccaggaaacctactatacagccgctcagtttgtgatcgcaacaggcgagaggcccaggtaccttggcatccagggggacaaggagtattgtatcaccagtgacgacctattctcgctcccttactgcccaggaaaaacacttgttgtgggggccagctacgtggctttggagtgtgcggggttcctggccggattcggccttgatgttacagtcatggttagatccatcctcctcagaggttttgaccaggaaatggccgaaaaagttggcagctacatggagcagcacggtgttaagttcttaaggaagttcattccagtgatggtccagcaattggaaaagggatcgcctggcaagttgaaggtactggctaagtccactgaaggcactgaaacaatagaaggagtctacaacacggtactgctcgccattggacgcgacagttgtacccgtaagataggactggagaagattggagtgaaaatcaacgaaaaaagcggaaaaataccagttaatgatgtagagcagactaacgttccatatgtatatgctgtgggcgatattctggaggacaagccggagctgactccagtggccatacagagcgggaaattgctggcccagcgccttttcggagcgagcctagagaaatgcgactacataaacgtccccactacagtatttacccctctagagtacggttgttgcggtctgtcagaggaaaaggccatagaggtatacaaaaaagaaaacttagaaatttatcacactctcttttggccattagagtggactgtggcaggccgggagaacaatacctgctacgctaaaatcatttgtaataaatttgatcatgaccgggtgattgggttccacatcctgggtcccaatgccggtgaggtgactcaagggttcgccgccgccatgaagtgcggactgacaaagcagctgctcgatgacactattggaattcatcctacctgcggcgaggtgtttacaacactggaaataaccaagtcttccgggttggacatcacccaaaagggctgctgaggttag

SEQ ID NO: 17596 - DNA, 609 bp, synthetic construct
  source 1..609: mol_type = other DNA; note = Synthetic coding sequence
atgaccggctccaattctcacatcaccatactgacgctgaaagtcctgccccatttcgaatcactcggcaaacaggaaaagattcccaataaaatgagtgcattcaggaatcactgtccccacctcgattccgtcggggaaataactaaagaggacttgattcagaaatccctcggtacttgccaagattgcaaggtacagggccctaacctctgggcttgcctggaaaacaggtgctcatacgtggggtgtggtgagagccaagtggatcacagtaccatccactcgcaagagacgaagcactacctgacggtcaacttaaccacccttcgggtgtggtgttacgcttgcagcaaggaagtcttcctagaccggaagctgggaacacaacctagtctaccccatgtgcgacagccccaccaaatacaggagaacagcgtacaggacttcaagatccccagtaatacaacgctgaagacccctttggtagcagtctttgacgatctagacattgaagccgacgaagaggatgagctgagggcacggggcctgaccggcctcaagaatattggtaacacctgttacatgaacgccgcgctacaggcctag

SEQ ID NO: 17597 - DNA, 1443 bp, synthetic construct
  source 1..1443: mol_type = other DNA; note = Synthetic coding sequence
atggagacagaccttaatagccaggacaggaaagacttagacaagtttattaagttcttcgccttaaagacagtgcaggtgatagtgcaagctcggctgggagagaaaatttgcactaggagctcgagttctcccactggctccgattggttcaacttagctattaaggacataccagaggtgacacacgaggctaagaaagctttagctggtcaattacccgccgtaggccgctcaatgtgtgtggaaatcagcctcaagactagtgagggagattctatggaactcgaaatctggtgtctcgagatgaacgaaaagtgtgataaggaaattaaggtgagctacaccgtttataacagactcagccttttgctgaaatctcttctcgcaatcacgcgcgttaccccagcctatcgcttgagccggaaacagggccacgagtacgtgatactgtacagaatctacttcggcgaggtgcaactgagcggactgggagaagggtttcagacagtccgagttggcaccgtgggtacacctgtaggaacaataactctttcatgcgcgtaccgtatcaatctcgcctttatgagtactagacagtttgagcggactccgccaatcatgggcatcataatagatcatttcgtggacaggccctatccatcaagctccccaatgcatccatgcaattacaggactgccggcgaggataccggtgtgatttacccttctgtggaggattcccaggaggtttgcactacctcattctccacatcgccaccatcccagctcatggtccccggcaaagagggaggggtccctttagctccgaatcagccagtgcacggtacgcaggccgaccaggagagactggcaacttgtacaccgtcagaccgaactcactgtgccgcaaccccaagctcatcggaagacacagagaccgtctctaactctagcgaaggtcgtgctagcccccacgacgtactggaaacgatcttcgtcaggaaagtcggagcctttgttaataaaccaattaatcaggtgactctgactagtctggacataccttttgcaatgtttgcaccaaaaaacctagagcttgaggataccgatcctatggtgaacccacctgattcaccggaaactgaatcccccctccagggaagtttacacagtgatggctcctccggaggaagctcaggtaatacacacgatgacttcgtaatgatcgatttcaagccagccttttcaaaggacgatatactcccgatggacctgggaacattctatagggagttccagaaccctccccaacttagttcattgtcgatagatatcggggcgcagtcaatggccgaggatctcgacagtttgcccgagaaactggcggtgcacgaaaagaatgtacgggagttcgacgctttcgtagagacactgcagtag

SEQ ID NO: 17598 - DNA, 309 bp, synthetic construct
  source 1..309: mol_type = other DNA; note = Synthetic coding sequence
atgctcagtgaagaagagaaggaggagctgaaggcagaactggtgcaactcgaggacgaaatcactaccctgcgacaggtgctatcagccaaagagaggcatctcgttgagataaagcagaaattgggaatgaacctcatgaacgaactcaaacagaacttcagtaagtcttggcacgacatgcaaaccacaaccgcgtataagaagactcacgaaactctctcccacgccggtcagaaagcaaccgctgctttcagcaacgttgggaccgcaatctcaaagaagtttggggacatgaggagaaaatag

SEQ ID NO: 17599 - DNA, 318 bp, synthetic construct
  source 1..318: mol_type = other DNA; note = Synthetic coding sequence
atgagccagagcggcgctgtcagctgttgcccgggtgctacgaatggcagcctcggccgaagtgacggcgtagccaagatgtccccaaaggacctgttcgagcagcgaaaaaaatatagcaacagtaacgtgattatgcacgagacttcccaataccatgtgcagcatttagcaacttttatcatggataaatcagaagccatcacttctgtcgatgatgccatccgcaagctggtgcagcttagtagcaaagagaaaatctggacgcaggaaatgttacttcaagttaatgatcaatctctgcgtctgctggactag

SEQ ID NO: 17600 - DNA, 222 bp, synthetic construct
  source 1..222: mol_type = other DNA; note = Synthetic coding sequence
atgtccgccttccggaatcattgcccgcatctggatagcgtgggggagataacgaaagaagacctgattcagaaatctctgggtacgtgtcaggactgcaaggtgcagggaccaaacctctgggcctgcttagagaaccgctgctcttatgtaggctgcggagagtcacaggtggaccactctacgatccattctcaggagactaaacactacctgacgtag

SEQ ID NO: 17601 - DNA, 276 bp, synthetic construct
  source 1..276: mol_type = other DNA; note = Synthetic coding sequence
atggcaatgactgtggtgaccaaagaaaaaaacaaaaaggtccccactatcttcctctcaaaaaaacctagagagaaagaggttgattccaaaagccaggttatcgagggcatcagtaggctgatctgtagtgccaagcaacaacagacaatgctgagagtctctatcgacggggtggagtggagtgatataaagttcttccaactggccgcccagtggcccactcacgtgaaacattttcccgtggggcttttttcaggctcaaaagctacatag

SEQ ID NO: 17602 - DNA, 2535 bp, synthetic construct
  source 1..2535: mol_type = other DNA; note = Synthetic coding sequence
atgttctggaaattcgacctgcacagctcgtctcacatcgacactctcctggagagagaagacgtaactctcaaggaactgatggacgaggaagacgtcctccaggaatgcaaggctcagaatcgtaagctcattgaattcctcctgaaagctgagtgcctggaggatttggtgtcttttattattgaagagccccctcaggacatggacgagaagattcgctacaagtatcccaatatatcatgtgaacttctgaccagcgacgttagtcaaatgaacgaccgcttgggagaagatgaatcgctgctgatgaagttgtactctttcctgctgaatgattcccctcttaaccctctgttggcgtcttttttttcgaaagtgctaagcattctgatttcccggaaaccggagcaaatcgtagatttcttgaaaaagaagcatgattttgtggacctgattatcaagcacattgggacctccgctataatggatttgctccttagacttcttacctgtatagagccgccccaacctcggcaggatgtgctgaattggctcaatgaggagaagattattcaaaggctcgtcgaaatagtacacccaagccaggaagaggaccggcacagtaatgcgagccagagcttatgcgaaattgtaagattgagccgcgatcaaatgcttcagatacagaatagtacagagccagatccgctcttagccacgctggagaagcaagagatcatcgaacagctgctttctaatatctttcacaaggaaaagaatgagagtgccatcgtaagtgctatccaaatcctgctgaccctcctcgagacaagaagacctacttttgagggccatattgagatatgtccacccggaatgagccactccgcttgcagcgtgaacaagtcagtgttggaagccattaggggccggttaggatcattccacgaactactgttggagcctccgaaaaaaagcgtgatgaagacaacgtggggtgtcctggatccaccggtgggcaacaccagactgaacgtgattcgattaatcagtagcctgctgcagaccaatactagctccatcaacggggacctgatggaacttaactccatcggggtgatacttaacatgttcttcaaatacacttggaacaactttctgcatacccaggtcgagatctgcatcgcccttatccttgccagtccattcgaaaacacagagaacgctactattacagatcaggactccactggagacaacttgcttttgaagcacttattccaaaaatgtcagcttattgaacgcattttggaagcatgggagatgaacgaaaaaaaacaggcagagggagggcggagacacggatatatgggccatctgactaggatagccaactgcatagtgcacagtacagataagggccctaacagcgctcttgtacagcagctcattaaggacctgccagacgaagtgagagagcgctgggagactttctgtacttcttccctgggcgagacaaacaagaggaacactgtagacctggctttctcggactaccagatgcagcagatgacttccaatttcatcgatcagttcggattcaacgatgagaaattcgctgatcaggatgacatcgggaacgtgtcattcgaccgcgtgtcggacattaacttcacactgaacaccaacgagtccggaaacattgctctctttgaagcctgctgtaaagaaaggattcagcaatttgacgatgggggctcagatgaagaagacatctgggaagaaaaacacatcgccttcacccctgaaagccagagaagatcctcctctgggtcaacagactctgaggagtccactgattcagaagaagaagacggggctaaacaggatctcttcgagcctagctctgccaacactgaggataaaatggaggtggacctgtcagagccccctaactggagcgctaattttgatgtgccgatggaaaccacacacggcgcacctctcgactccgtgggatctgacgtgtggtcaactgaggagcctatgcctaccaaagagactgggtgggcttctttcagcgagttcacctcctcactttccaccaaggattccttgcggtcaaacagtccggtggaaatggaaacatcgacagagcctatggaccctctaacgccctcagcagccgcattggctgttcaacccgaggccgccggatcagtggcaatggaagcatcctcggacggagaggaagacgctgaatccaccgacaaggtgacagagacagtgatgaatggtgggatgaaggagactctttcactaaccgtagatgccaagaccgagacggctgtctttaagagcgaggaagggaagctctccacttcccaagatgccgcttgtaaggatgctgaggagtgcccggagaccgcagaagcaaaatgtgccgctccccgacctccttcatcatccccggagcagcgaacaggccagccgtcagctccaggtgatacaagtgtgaacgggccagtgtag

SEQ ID NO: 17603 - DNA, 2604 bp, synthetic construct
  source 1..2604: mol_type = other DNA; note = Synthetic coding sequence
atgttttggaaattcgacctacattcttccagtcacatcgatactttactcgagcgcgaggacgtgacgctcaaagagctgatggacgaggaagacgttctgcaggagtgtaaagcacaaaaccggaagctgatcgagttcctgctgaaggcagaatgtctcgaggacctggtttctttcattatcgaagaaccaccacaggacatggacgaaaagattcgttacaaataccccaatatcagttgtgaactgttgacctcagacgtcagccagatgaacgacaggctgggtgaggacgaaagcctcctaatgaaactgtactcgttcctccttaatgatagccccctcaatccacttctagcctcctttttctctaaagtcctaagcatactcattagtcggaaaccggagcagatcgtggattttttgaaaaaaaagcatgacttcgtggatctgatcatcaagcatattggcacttcagcgatcatggatcttctgctgcgattactgacctgtatcgaacccccccaaccacggcaggatgtcctgaattggctcaacgaggagaagatcattcaacgcttggtcgaaattgtgcacccgtcacaagaggaagacagacacagcaacgccagccaaagcctctgcgagatagtgcggctcagtagggaccagatgctgcagatccagaatagcactgagccagacccactcctcgccacgcttgagaaacaggagatcatagagcaactactctctaatatctttcacaaagaaaaaaacgagagcgccatagtctctgccatccagatcttgctgacgctgctggaaactcggagacccaccttcgaaggccacattgagatttgcccccctggaatgtcacactctgcgtgctccgttaacaagtctgtactggaggcaattagagggcgactggggagctttcatgagctcctgctggaaccccccaaaaaaagtgtcatgaagacaacctggggagtgctggacccgccggtaggcaacacgcgtctgaatgtcatacggctgatcagtagtctgctgcagacaaataccagttcaattaacggagacttgatggagttaaactccatcggtgtcatcctcaacatgttttttaaatatacatggaacaatttcctgcacactcaggttgaaatctgtatagcactaattcttgcttcaccatttgaaaatacagagaacgcaaccatcaccgaccaggatagtactggcgacaacctcctgctgaaacatctcttccagaagtgtcagcttattgagcggatcctggaggcctgggagatgaatgaaaagaagcaggccgaggggggtcgcaggcatggttatatggggcatctaactagaattgccaattgcattgttcattctaccgataagggtcccaatagcgctctcgtgcaacagttgataaaagatcttccggatgaagtgcgtgagagatgggagaccttttgtacgtccagcctgggcgagacgaacaagcgaaatactgtcgacctggttaccacctgtcatattcactcatctagcgacgatgaaattgactttaaagaaactggtttttcccaggactctagcctgcagcagatgcagcagatgacttccaattttattgatcagtttggctttaatgatgaaaagtttgcagatcaggacgatatcggaaacgtcagcttcgatcgtgtgagtgacatcaacttcaccctcaatactaatgagagtggcaacattgctctcttcgaagcgtgctgtaaggagaggatacagcagttcgacgatggaggtagcgacgaagaagacatctgggaagaaaagcacatcgcttttacccccgagtcacaaaggagatctagttctggtagcacagactcagaagagagcacggattccgaagaggaagacggtgctaagcaagatctgtttgaaccgtcaagcgccaacacggaggataaaatggaagtagacttatcggagccgcctaactggtcagccaatttcgatgttcccatggagaccactcacggggctcctctcgattctgtaggctccgatgtatggagcaccgaggaacccatgccgacaaaggagacaggttgggctagcttttccgaatttaccagcagtctgagcactaaagacagtctgcggagcaattctcctgttgagatggaaacaagcactgaacctatggacccactgacgccaagcgctgctgcattggcagttcaacccgaggccgcaggcagtgttgctatggaggccagcagtgacggagaggaggacgccgaatcgaccgacaaggtgactgagactgtgatgaacggggggatgaaggaaacacttagcctcaccgtggacgctaaaaccgagacggccgtcttcaagtcggaggagggtaagctttccaccagtcaggacgccgcttgcaaggatgccgaggagtgtcctgaaacagcggaggctaagtgcgcggcacctaggccgccaagcagcagcccagagcagcggactggccagccaagtgcccccggtgatacatccgtgaacggtccagtgtag

SEQ ID NO: 17604 - DNA, 174 bp, synthetic construct
  source 1..174: mol_type = other DNA; note = Synthetic coding sequence
atgacatctaagaagttggtgaattccgtcgccggctgtgcagatgacgccttagccggacttgtggcgtgtaacccaaacctacaacttctccaaggccatcgcgttgcgctcagatcggacctcgattccctcaaaggtagagtagcactgctgagcggaggggggagctag

SEQ ID NO: 17605 - DNA, 2709 bp, synthetic construct
  source 1..2709: mol_type = other DNA; note = Synthetic coding sequence
atgtttccagctctcgaaacacacctgaagcagacaattccggatccttatgaggactttatgtatcgccacctgcagtactacggctactttaaggctcagaggggctccctcccaaactctgccacacatcagcatgtgaggaagaataacccgcagtgccttttgaatgggtctctcggggagaaggatgacttaatacccgatacactgcagaaagagaaattactgtggcctatctcacttagtagcgccgtgcatcggcaaatcgaagctatcaatagggacttccactcgtgtctcggttggatgcagtggcgtggattgagttcactccagcctcccccgccccggtttaaagatagcccagctagcgcatttagagtggccggaattacagattcccatatgctgagcctgccacacctgaggagtcgacagttgctgtatgacgaactcgacgaagtgaacccccgactgcgggagccccaagaactattttctatcctatccacgaagcgaccattacaagcaccccgctggccaatcgaatgcgaagttatcaaagagaatattcaccacattgaatgggcccccccccaaccggagtatttctaccaaccaaaggggaacgagaaggtacctgagatcgttggcgagaagaaagggaccgtagtataccagctcgactctgtccctatagagggttcctacttcacttctagccgggtaggtggcaagcgcgggatcgttaaagaactggccgtcactcttcaaggccctgaggacaacacgttgttgttcgagtccagatttgagtcgggtaatcttcagaaagcagtccgtgttgacacatatgagtacgagctgactctgcggaccgatctgtatactaataagcacacccagtggttttactttagagttcagaataccaggaaggatgccacctatcggttcacaatcgtaaatctcctgaaacctaaatccttatacaccgtaggcatgaagccactcctgtatagccagcttgacgccaacacacgaaacatcggctggaggcgagagggcaacgagatcaagtattacaaaaataatactgacgatggacagcagcccttttattgcctcacctggacaattcaattcccctacgatcaggacacatgtttttttgcccatttctacccatatacttacaccgatctgcagtgctatttgctgtctgtcgcaaataacccaatccagagccagttctgcaaactgcagaccctctgcaggtcccttgccggcaatacagtgtacctgctgacaattacgaaccccagccagacccctcaggaggcagctgctaaaaaagctgtagtgctgagcgcaagggttcatccgggtgaatccaacggctcatgggttatgaagggatttctggacttcatactatctaattctccagacgcacaactcctccgagacattttcgtgttcaaggttctacccatgctaaatcctgacggcgttatcgtgggcaactaccgctgcagcctcgccgggcgcgacctgaaccgccattacaagaccatactcaaagagtcattcccatgcatttggtacactcgaaacatgattaagcgcctgctggaggaaagggaggttcttctgtactgcgactttcacggtcactcccgcaagaataatatcttcctgtatggatgcaacaacaacaaccgaaaatactggctgcatgagcgcgtgtttccccttatgctctgtaaaaacgcacccgacaagttttctttccattcttgtaactttaaggtgcagaaatgtaaagaaggtactggtcgcgtcgttatgtggcggatgggaattctgaatagttacactatggaaagtacatttggcggctcaactctcgggaataagagagacacccatttcactatcgaagatctaaagtcgctcggatatcatgtttgcgacactctgttggacttttgtgacccagatcagatgaagtttactcagtgcttagctgagctcaaagagctgctgaggcaagagatacacaaaaaatttcacgagctcggtcaagatgtggacctggagggttcctggagtgacatttctctctctgacattgagagtagcacaagtggctctgattcaagtctgagcgacggtctgcccgttcaccttgctaacatagccgacgaactcacacagaagaagaagatgttcaagaaaaagaaaaagaaaagccttcaaacaagaaaacagaggaacgaacagtaccagaaaaaaaacctgatgcagaaactgaagctgacagaggacacatcagaaaaggccggcttcgcctctactcttcagaagcaacccacatttttcaaaaactccgagaatagctcctttctgcccatgaaaaacgagaatccccgccttaacgaaaccaacctgaacagacgcgacaaggacacccctctggaccccagcatggccacactcatccttcctaaaaataaaggccgcatgcagaataagaaaccaggctttactgtgagctgctcacccaagcgaacaattaattctagccaggagccagctcctgggatgaagcccaactggccaagaagtaggtacccagcaacaaaacgggggtgcgctgcgatggccgcctatccttctttacacatctacacctacccttag

SEQ ID NO: 17606 - DNA, 537 bp, synthetic construct
  source 1..537: mol_type = other DNA; note = Synthetic coding sequence
atgaacaggaggcggaaatttctgctggccagcgtcctggcgctgcagaacagtagctttatttatcccagctgtcagaagtgtttttccagaatcatcctggttagcaaacgcagtaattgtcccaagtgtggaagcactggtgagtcaggtaatgccaattatcgctataagctgagtcttaaagtggccgagtccaataaattattcgtgattacggtatttggctcttgcctggatacattttttggtctgaccgcgacaggacttcatcggtatattcaggatccaaataagattcctgagaccctggacaacgatacaactcagaacttgctgaccaaggcagtggaaacctgctttgtaggccagagttttatcttcggagtcaccaatttcgagaaccagccaggacagggcagcgatgcctctaactttctccagcaatgctctgatcacaaacgcaaagccaaagccctagttgcatgtcagattgtgctacccgatcccgcaacccaggacgccaaaaccaagtag

SEQ ID NO: 17607 - DNA, 441 bp, synthetic construct
  source 1..441: mol_type = other DNA; note = Synthetic coding sequence
atggttgcaatggctgaggcagaggccggagtcgcagtcgaggtgcgtgggcttccccccgcggtgcctgacgaactactcacattgtatttcgagaaccgcagacgttccggggggggcccagttctgtcttggcagcgccttggatgtggtggcgtattaacatttagggagcccgccgacgcagagcgagttctggcgcaggctgaccacgaactgcatggagcacagctttccttgcgaccagcaccacctcgcgcccctgcccgtttgctactgcaggggctgccaccaggtactacaccccaacgtctggagcagcacgtgcaggctttgctacgggccagcggcctgccggtgcagccttgctgtgccctggcctctccgaggcccgatagagctctggtgcagcttcctaagccgctgagtgaggcaggatag

SEQ ID NO: 17608 - DNA, 348 bp, synthetic construct
  source 1..348: mol_type = other DNA; note = Synthetic coding sequence
atggctggaaggcccctgcggataggtgaccagctggtcctcgaggaagattatgacgagacctacataccgagcgagcaggaaattctcgaattcgctcgggagattggtattgatcctatcaaggagccagaactgatgtggctcgcccgagaaggtatcgtggctccacttcctggcgaatggaaaccctgccaggatattaccggtgatatctattactttaattttgctaacggccagagtatgtgggaccacccatgtgacgagcattaccggagtcttgtgatccaggagcgagccaagctttcgacaagcggagccattaagaaaaagaagaagaaatag

SEQ ID NO: 17609 - DNA, 1191 bp, synthetic construct
  source 1..1191: mol_type = other DNA; note = Synthetic coding sequence
atgcgaacttcatataccgttacactgccagaggatcctcccgcagccccctttcctgctttggccaaggagctaagaccccgcagccccctgtctcctagtctgttactcagtacctttgtgggactgctcctgaacaaggccaaaaattccaaaagcgctcagggtttagcgggactgcggaacctcggcaacacttgctttatgaattccattctacaatgcctcagtaatactcgcgagctgagagactattgcctgcaacgcctgtatatgcgtgacctacaccatggatctaatgcccatactgcactagtcgaggaattcgcaaaactgattcaaaccatctggaccagctcacccaatgacgtcgtttccccgtccgaattcaaaactcaaatccagcgatacgcccctaggttcgttgggtacaaccagcaggacgctcaagagtttctgaggttcctgctcgatggacttcataacgaagtgaaccgagtcacactcagaccaaaaagcaatccagagaacctagaccacctgccagacgatgagaaaggtcgccaaatgtggaggaagtacttagagagggaagattcacggatcggcgatctgtttgtaggccaactcaagagcagcctgacatgcacagactgcggttactgctctaccgtcttcgatcctttttgggacctatccctgcccatagccaagcggggttacccagaagtcacgttaatggattgtatgcgactgtttacgaaagaggacgtgttggacggggacgagaaacctacttgttgtcgatgccgcggcaggaagaggtgcatcaaaaagtttagcatccagaggttccccaagattttggtgctgcatctcaagagattctctgaaagccggatcagaacctcgaaactcacaacctttgtgaattttccactccgagacttggacttgcgcgaatttgcttcagagaacaccaatcatgccgtttacaacctctatgctgtgtctaatcactcagggacaacaatgggcgggcactataccgcctattgtcgatctcccgggactggggagtggcacaccttcaatgacagttccgtcactccaatgtcttcatctcaggtaagaacctccgacgcatatctgctgttctatgagctggcatctcccccctcccggatgtag

SEQ ID NO: 17610 - DNA, 633 bp, synthetic construct
  source 1..633: mol_type = other DNA; note = Synthetic coding sequence
atggctgcgtctgtcgagcagcgggaaggcaccatacaggttcaaggtcaagcccttttttttagggaagctttgcccggctccgggcaggcacggttttcagtgctcctgttacatgggattaggttttcgagcgagacttggcagaatttgggcacactgcaccgcctggcccaggccggttaccgggcggtggcgatcgacttacccggtctgggtcattctaaagaggcagccgctccggcccctattggggagctcgctccaggctctttcctcgccgccgtggtggatgcactcgaactggggccacccgtcgtgatctcaccaagcctgtccggtatgtattcgctgccattcctgaccgcacctggatcacagctgcccgggtttgttcctgttgccccaatctgtacagataagataaacgccgctaactacgcctcagtgaaaacgcctgccctcatagtgtacggtgaccaggatcccatgggccagaccagtttcgaacacttaaagcagctgcctaatcatcgcgtcctgatcatgaaaggcgccgggcacccctgctatttggataagccagaggaatggcacaccggcttactcgacttcttgcaggggctgcagtag

SEQ ID NO: 17611 - DNA, 1428 bp, synthetic construct
  source 1..1428: mol_type = other DNA; note = Synthetic coding sequence
atggagctctggcaggcagccctttccaccctgaaccccaaccccaccgactcgtgtccgttgtaccttaattatgcaactgtggccgccttgccatgtagagtgtctaggcataacagtccatcagccgcccatttcatcactcgcttggttcgtacatgcctccctccaggggcacacaggtgcatcgtgatggtgtgtgaacagccagaggtatttgccagcgcttgcgcgctggcacgggcattcccgttgtttacccaccgatctggagcctcacgccggctcgagaaaaaaacagtgaccgttgaattcttccttgttgggcaggacaatggccccgtggaagtgtccaccctccagtgtttggctaatgcaaccgatggggtacggctcgctgcgcgcatcgtggatacaccgtgtaatgagatgaatacagacacattcctagaagagatcaataaggtgggcaaggagctcggaatcatccccactattattcgcgatgaagaattaaaaacccgcggatttggtggtatttatggcgtggggaaggcagctctgcatccccccgcactggcagtgttaagccacactcctgatggcgccacacagacgattgcctgggttggaaagggcatcgtttatgacactggcggtctttcaataaaaggaaagactacaatgccaggtatgaagcgcgactgcgggggagccgcagccgtcctgggtgcctttagggcagcaatcaagcagggcttcaaagataaccttcatgccgttttctgcttggcagaaaattctgtgggccccaacgccacccgccccgatgacattcatcttctctacagtgggaaaacagtcgagataaacaacactgatgcagagggtaggctggtgctcgcggatggcgttagctatgcatgtaaggatttaggagcggacattatcctcgatatggcgaccctcaccggcgcacaggggatcgcgactggaaaatatcatgccgccgtcctgaccaactcagcagagtgggaagcagcttgtgtcaaagcaggcaggaagtgcggggacttagttcaccccttggtttattgccccgaactgcatttttcagagttcaccagcgctgtggccgatatgaagaatagcgttgccgaccgagataattcaccctccagctgcgctggcctttttattgcttcccacatcgggtttgattggcccggcgtctgggtacatctcgatatcgcagcccctgtgcacgccggcgagagagcaacaggattcggagtcgccctgcttttagccctgttcggccgagccagcgaggaccccttgctgaaccttgtatcccccctcggctgcgaggtcgacgttgaggagggggacctagggagagattccaagagacggaggctcgtgtag

SEQ ID NO: 17612 - DNA, 537 bp, synthetic construct
  source 1..537: mol_type = other DNA; note = Synthetic coding sequence
atggtagccatggcagaagcagaggcaggcgtggcggttgaggtcagagggttgccccccgccgtgcccgatgaattactgactctctattttgaaaaccgccggaggtcaggcggagggcctgtgctttcctggcaacgactcggatgtgggggggttttgacctttcgcgagcctgcagacgccgagcgggtcctggcccaggcggatcatgagttgcacggagctcagctcagtctgagacctgcacctccgcgcgcaccagccagactgttattgcagggcctgcctccaggcacaacaccacagaggctggagcaacacgtgcaggctctgttgagggctagtgggctcccagtccagccatgctgcgccctcgcttctcctcggcctgacagggcactcgtccagctgccgaaacccctttccgaagccgacgtgcgtgtactggaggagcaggcacagaatcttggcctcgaaggcacgcttgtgagtctggcgagggtacctcaggcgcgtgcagttcgggttgtgtag

SEQ ID NO: 17613 - DNA, 1893 bp, synthetic construct
  source 1..1893: mol_type = other DNA; note = Synthetic coding sequence
atggagaaggtgctgggctgcgagctcctgaaaggactgaacgtcctggacctgggactgaatatggagattctggaagaacagatgctgcacgagatactctgccgagaataccccgagttggagacccgctggcaggatctcaagatcagagccttggacacttgcaaggccgtggaggcagccgaggaaaggctgctgacgatgctcctattccagaatcctaaaagacagaaaccagcaaagtttctccggaatatcgttcgggcacaaggcaagctctgtcaattgagagcccactgcgaggaactggaggggcagaagctccaggagatggtgctgtgggcaccctatcggcctgttgtatggcacgggatggctatggtgaaagcgctgtcacagctgcaaaacctcctgcctctattttgcatgtcccccgagaactggttggcggtaactaagcaggccctggacagcatgaagcctagagaaataaatcacggcgaggacctagctagccacctgctgcagctacgggcccacctcaccagacagctgttaggcagcacggtgacagccctcggcctcactcaggttccgctcgtgggggcactgggcgccctggcccttctacaggcaactgggaaggcctcagagctcgagcgtttagccctgtggcctggtctagctgccagtccctcgacggtccacagtaagccagtgtctgacgtggcaagaccagcatggctggggcctaaggcttggcatgaatgcgaaatgctagaattactgcctccattcgtgggcttgtgcgcctcgctggctggccatagtagtgcgtggcaggcgtatcttagcctgagcagcacagtgctgggcccagcacccggccctggtccagaacctttgagtctgctccaaaagctgattctgtggcgtgtgctcaggcccgaatgcctggctggcgccttagctgacttcacaacctcgctcttaggaagacccttggatgagaacacatatgctccaaccatgccattcaaacattctcaagctacacagcccatgttgatcctgcttccgccaccaggccacccttcagccacactacatccattaaccgtgattcaaaaattagcggctaagtatcagcagggacagaaacagttacaggtgatcgccttgggatcagaagcatgggatcctgtttctgtggtggtgtctaccctgagccaagctatgtatgagggccactggctagtgctggacaactgtcatctaatgccccactggcctaaagaactccttcagctgcttctagagctcctcgggagggcaaaagtggtcgcagatctcgagtctgagcaattgctcgatcaacccgagagccggaatgtgtcgaccgtgcatcgagacttccggttgtggctgattgtccccgctgagtcttcagcctctctcccagctgtgctgacccagcatagcatgcccgtattctggaaccagtctctcgagctgggtcacgttctgatcgactccgtcgagctcgcccagcaggtgctgtacatgcagccacccacacaagctctgcccttgctccttctgcacgggctgctcttacaccgacagttgtatgggacccgcttacaggcacatcgaggacggtggtctcaggtgactcttacacaagtccttcagacacaggatcagctgtgggccagtctttccaatccccgcgccgctatgcaggaactagcaggcgaaacacttcctctgccattaggggtcatttcaccccaagaaagtctggaggaaggcggtggaggcattcaattcacagcactggtcctggccgtagttgaaactgagggaactgggaccgaacgactatag

SEQ ID NO: 17614 - DNA, 1488 bp, synthetic construct
  source 1..1488: mol_type = other DNA; note = Synthetic coding sequence
atggagttgcacgggggcaatcgcgggggctaccaacccaaggctctagagcaatccggttgctggctctggcaggctgcactgtcaaccctcaacccaaatcccacagactcttgtcccctgtacttgaactatgccaccgttgccgcgctgccctgtagggtttctcggcacaactcgcccagtgctgcccacttcatcacccggttggtgaggacctgcctgcccccaggcgcccataggtgcatcgtgatggtttgtgaacagcccgaggtgttcgcttccgcttgcgccctcgcccgcgccttcccactttttactcaccgctctggtgcatcaaggcggcttgagaaaaagaccgtgaccgtagagttcttccttgtgggccaggataacgggccagtggaggtttcaactctgcagtgtctggccaacgccacagacggggtccgcctcgccgctagaatagtggacaccccttgcaatgagatgaatactgataccttcctggaggaaatcaataaagtcgggaaggagctgggaattatccccaccatcatccgcgacgaagagttgaagaccagaggattcggggggatctatggcgtgggcaaggcggcgctgcacccccccgctttggccgtgttgagtcacacgcccgacggtgccacccagaccattgcctgggtgggcaaaggcattgtgtacgacaccgggggcttgtccattaaaggaaaaacaaccatgcccggcatgaagagggattgcggtggggccgccgccgtgcttggcgcgtttcgcgcagctattaagcaaggctttaaggacaacctgcacgcagtgttttgtctggcggagaacagtgtcggacctaacgccaccaggccagatgatatccatctgctttattccggaaagactgttgagattaacaacactgacgccgaagggcgattagttctggctgacggcgtgtcgtatgcctgtaaagatctaggcgctgatattattctggacatggctacactgactggggcccagggaatcgcaaccggaaaatatcatgctgctgtcctgactaactccgccgagtgggaagccgcgtgcgtgaaagccggacgcaaatgcggggacctagtgcacccactggtgtattgtcccgagctccattttagtgagttcacctctgctgtggccgatatgaaaaatagtgtggccgatcgggacaactccccaagcagctgtgctggtttgttcatcgcatcccatatcggtttcgactggcctggtgtgtgggtgcacttagatatcgctgctcccgtacacgcgggcgagagagcaaccgggtttggggtggccttgttgctggccttgtttggtagggcctccgaggacccgctcctgaacctcgtgtcaccgctcggctgcgaggtagatgtggaagaaggtgatctgggccgggatagcaagcgcagacgcctcgtgtag

SEQ ID NO: 17615 - DNA, 618 bp, synthetic construct
  source 1..618: mol_type = other DNA; note = Synthetic coding sequence
atggagacagatctgaacagccaggaccgaaaagacctggacaagtttatcaaattttttgcacttaagactgtccaggtcatcgtccaggcgagactcggggagaaaatttgtacccggagttccagcagcccgactgggtcagactggttcaacctcgcaatcaaagacattcccgaagtgacacatgaggccaagaaggctcttgctggtcagctgcctgcagtggggaggtctatgtgcgtggagatcagtctgaagacaagcgagggagatagcatggagctagaaatctggtgcctagagatgaatgaaaagtgcgataaagagattaaagttagttacaccgtttacaacagactgagcctcttactcaagagtctcctggccatcacccgggtaacgcccgcttataggctgtccaggaagcaaggacacgaatacgtcattctttataggatttactttggtgaagtgcagctatccggactgggggagggtttccagacagtgcgcgtggggacagtggggacaccggttggtacaattacactctcgtgtgcttaccggataaatctggcttttatgtccacccggcagtttgagcgtacaccttag

SEQ ID NO: 17616 - DNA, 117 bp, synthetic construct
  source 1..117: mol_type = other DNA; note = Synthetic coding sequence
atggccgcgtttaagctggactttctccccgaaatgatggtcgatcattgttcactgaattcctcgccagtaagcaaaaagatgaacggaaccctcgatcaccccgatcagccttag

SEQ ID NO: 17617 - DNA, 1554 bp, synthetic construct
  source 1..1554: mol_type = other DNA; note = Synthetic coding sequence
atggaaactgacctgaacagccaggaccggaaggacttggacaagttcatcaaattttttgcgctgaagaccgtacaggtaatcgtgcaggcgcgccttggcgagaagatatgcactaggtcctcctcttccccaacaggatctgattggttcaatttggctataaaggacatccccgaagtaacacatgaggccaagaaagctctcgccggccaactgcctgcagtgggacgttctatgtgcgtcgagatctccctaaaaacctctgaaggagacagtatggaactggaaatttggtgtttggaaatgaacgaaaagtgtgataaggagataaaggtgtcatacaccgtatataatagactatccctcctgctcaagagcctgttagctattaccagagtgaccccggcttataggctatcccggaagcaaggtcacgagtatgttattctctaccgcatctattttggcgaggtgcagctgagtggcctcggagagggattccagacagtgagggtggggaccgttggcaccccagtggggactatcacgttgtcgtgtgcttatagaattaacctggcctttatgtctacccgccaatttgaaaggaccccaccaatcatgggtattatcatcgatcatttcgtcgaccgcccatatccaagcagtagccccatgcatccttgtaattatcgtacagcaggcgaagacactggggttatctaccccagcgtggaggactctcaagaggtttgcacaacaagctttagtacatcaccgcctagtcaacttagcagctctcggctttcataccagcccgccgccttaggtgttggaagtgctgacctggcatacccagtcgtgttcgccgcaggactcaacgccacacatccacatcagttaatggtcccaggcaaagaaggaggggttcccctggccccaaaccagcccgtgcatgggacacaggcagatcaagagcggttggcgacctgtacaccaagtgataggacccactgcgctgcgactcctagcagcagcgaggacaccgaaacagtctcaaacagcagcgagggacgcgcttcccctcacgacgtcttggaaacaatttttgtacgcaaggtgggcgcctttgtgaacaaaccgatcaaccaggtgacgctcacctcactggacattccctttgcgatgtttgcaccaaaaaacttggaattagaagacactgatccgatggtgaaccccccagacagtcctgaaactgagtctccactgcaagggtccttgcactctgatggatcctctggcgggtcctccgggaacacccatgacgactttgtgatgattgacttcaaacccgccttctctaaagacgacatccttccaatggacctgggcactttttaccgggagtttcaaaatccaccccaattatcttccctatccattgatattggcgcccagagtatggccgaggatctggactcccttcccgaaaaattagcggtgcacgagaaaaacgtgagagaattcgacgcttttgtcgagacacttcagtag

SEQ ID NO: 17618 - DNA, 768 bp, synthetic construct
  source 1..768: mol_type = other DNA; note = Synthetic coding sequence
atggagcgtagtgggcagcgtgtgactacctgggactgcgaccaggggaagcactcagattcggctcagaaaaatgagagagagagtatcaggcagaagctagcacttggctcttttttcgatgacgggcccggcatctacacatcctgtagcaagtcgggcaagccgagcctgagctcacgccttcagtcagggatgaatcttcaaatttgctttgtgaatgactctggatccgacaaggacagcgatgcggatgacagcaagactgagacctcgctcgacacccctttaagccccatgagtaagcagagctcctcatatagcgatcgagacacaacagaagaggagagcgaaagcctagacgatatggattttttaaccaggcagaagaaattgcaggccgaggccaaaatggccctggccatggctaagcccatggccaagatgcaggtcgaggtggagaagcagaaccggaagaaatcccctgttgcagacctcctccctcatatgccccacatctcagagtgtctcatgaagaggtctctgaaaccaaccgacctgcgggacatgactatcgggcagctacaagtgatcgtgaatgacctccatagtcagattgaatcactgaacgaggagttagtgcaactcctcctgattcgcgacgaactgcacacagaacaggacgcaatgttggtggatattgaggacctgacgcgccacgccgagtcacaacagaagcacatggccgaaaagatgccggcgaagtag

SEQ ID NO: 17619 - DNA, 78 bp, synthetic construct
  source 1..78: mol_type = other DNA; note = Synthetic coding sequence
atgtcgcagtctggggctgtaagctgctgcccaggggcgacgaacgggtctttagggaggtccgatggagttgcgtag

SEQ ID NO: 17620 - DNA, 360 bp, synthetic construct
  source 1..360: mol_type = other DNA; note = Synthetic coding sequence
atggtgctagaaggtaaccccgaggtgggctctcctaggaccagcgatctgcagcatcgggggaacaaaggcagctgtgtcttaagtagtccaggcgaggacgcacagcctggagaggaaccaattaaatatggagagctcatcgtcttgggatgttgtgaggaaggcggggaggagacagaagctcagaggggagaggtcaccggccctcgggcacacagctgctataatggatgcctggcctctggagacaagggccgacggaggtcgaggctggccctatctcggcgctcacatgctaatggagttaagccagacgtgatgcaccatatcagcaccccattggtttccaaggcctag

SEQ ID NO: 17621 - DNA, 348 bp, synthetic construct
  source 1..348: mol_type = other DNA; note = Synthetic coding sequence
atggccggacgacctcttcggatcggagaccagctagttttagaggaagattacgacgagacttatataccatctgaacaggagattctggagtttgctagggagatcggaatcgaccccatcaaagagccggagctgatgtggctggcgagagagggcattgtggcccctctgccgggtgagtggaagccctgccaagacatcacaggcgatatatactacttcaacttcgccaatggtcagtccatgtgggatcacccatgcgatgagcactaccgttctcttgtaatccaggaaagggccaaactgtccacctctggagccattaagaaaaagaagaagaaatag

SEQ ID NO: 17622 - DNA, 471 bp, synthetic construct
  source 1..471: mol_type = other DNA; note = Synthetic coding sequence
atgtcatccgtgcaatcccaacaggagcagctctcacagagcgatccttctccaagtccgaactcctgctcaagctttgagctaatcgacatggatgccggctctctatatgaaccggtttccccccactggttttattgtaaaatcatcgatagcaaagagacctggattcctttcaacagcgaggatagccagcagctcgaggaggcttattcatccggtaaagggtgtaacggccgggtggtccctactgatggtggccgctacgatgttcacctaggggaaagaatgcggtatgcggtttattgggatgaacttgctagcgaagtaaggaggtgcacgtggttctataaaggggacaaagataacaaatatgtgccatacagtgagagtttttctcaggtactggaggaaacttatatgctggccgtcacattggacgagtggaaaaaaaagttagagagcccctag

SEQ ID NO: 17623 - DNA, 14262 bp, synthetic construct
  source 1..14262: mol_type = other DNA; note = Synthetic coding sequence
atggtgcctgaagagcggagagtgggcctttcctccgacgagacctcctccgattccttaaagtcatggcattcaatctgcgtattggacagcaaggagcagccactggcctgtcaacagaagcagcgacagtttgtgaagcctgtgacggagtctgagcagccaaccgttctggagctacttctagccgaacttcgaacattgtttagcgccgttctgcaagacagctcccctgcagcctggaggtatttacatgctgtgctgggtttactacctccttacagggagctcctggttgggcatctggatttacttccttttctggaacagttgtactgctgggccccctgggtgcaaactcacctgcacttagacctgctgggcgctatcgttcaggccttccctccagactccagtctgctcgacagcgcttcacacgcagattgctgtcctcagaaaagacgattacaccatagacccccatgcccagcctgccccttcgtgcaagcccagtggtctcgccagcaggttaaagaggaactcgctacctggctcaggcccctaacattgccggaattgcaacgatgtctgggcatcgtgggggcacaggtcgccctcgaggaagccgtctggcttgacggacttagcttgctcccgcttgcgttggcggctgacatcccagttagatatgaaagctctgacactgataacgccgaagtggaacccgtaggccggaaggagactaggagccagctggactatgaagtgcccagagagaaggcattccaaaagtcctccaccggattctcacccgaaaccagctttcttgattctcaggtgatgacagccctcaagatggaacggtacctgaagaaaatccatttcctgtacctgaacgtcgctccctcccgttattttaggccctacagcctcatggtggtgccacctgacaaggttaaccccgaacactatatcttcagcccgttcggaattttgcacgtacatccagtcgaaggaagcgagactatgactctcggaacgtggcatcaccactgcgtgctgtggcagcagctgcagtttatcccattttttaagtactgcctgctgcgcaaaagtttcacttgctggaaaaagaatgtgcgcttgcagggcctgcaccgactccaaaagttcctggagaaccacctgctgcttgcagtgccccatttcggtgccgggctgctgcatataagtcgacttctgcaggaactccatagtgtgtcctggctgccacaggagctggaccggtgctatgaactgctggatctccaaactgccctcgccgaagagaagcacaaggcccttagactacttcacagatgcctgaatttatgcacctcaattctgaggctggtgcacgaagacacttaccatatgcaacagtgcttacaagaacgggtacagaactgtgaccgcatacgcactggacaggggagcatctacttgcaaagagtgcagcacaaacaactcgaacaaaagctcaagcaggcggaggcatggtggctccagctagggaagttcgccaggctcgttgattacatgatctgtcagtcacttataagcgtcttagaggaacagatcacgtctttcgtggcaaatattttacaggctccccgccagaaacctttcctgtccagtcagctcgtgttcgacgatcacggacagctgtcccacgtgccatgtgtggagaatatgattcagacgttgaccgggggtctgcaaagcgtcaaaacttcagctctacaggtcgtacagtccgcggacttgaaaacctcatcagattccctttattcagaggaggaggacgaggaagaggactccaaggatgagtttctgatgcccaaattccaaggtcaaccttcagacgcagtgtccatcttctgcggccctaatgttggactagtgtggccatggaagagccatcccatcgccggcattcttgaggtgagggggtgccgcctgagagggcaatacttcccacataactacaagcaattggaagaggacctggacaataatccgaagatccagcaggctctgaacatacagcaggtcttactggaaggggttctgtgcaaggtgcaggagttctgcagggagcaccactggatcaccggcatctatgaattcctccagtcctgggggccacaaaagctggaggatatgaggggcggtcctataaaaaactatgtgaccttggtgagtaggctgaacgtgtggcaggcaagagttagctccatgcccattgagttgctaacgaagggggggcttttgctgcttagctgtcatgatgtgcaggcggagatggagtccaagctcaattccattcggaaggacattctggcgcacgtgcaaaacgagtgctggaacctgagccaacagcttatgactgaattgaccgactttatgcatatcttcagaaccattaattcagatattcatgcaattgcacaatgtactcaaaaactaaatgaggctaatgagcagtacgtggaattagaggaacggatggagtacgtcagagctctgcacgagctgattaggaaccatttctccctgttcagcgcggaaaacgaagccctggacatctcagtgaggaggcagtttggcgaatctcccatccctccctgccccccacctcctcagcctcacctgcttcattgcccactgctggccccccaattgctcgacatgtgggaggccttccagtttgagaaatcacaggcatccgagtttcttctcagcaagcgacacgcaatcatgcctaagctgcagcagctgatggcggcagctctcgcggaattggaggggctactcgccaaggcactgagcgggccttttatggatcctacacaggatcagcgctccactgagcatcaactggtcagtctggagcgccagtttcaaaatactgtctccgacctgagcgaactccatcacgcttacgctatattcaccgaagacgagactccggtccctttgccgatttgcggaacccgcccaattgtccaacagcagaggatttggcacctctacagggtgatttccgaaaatatcagcgaatggaagtgtatggccttcgctaaattctcacccgccatggcccaagaaaagacagaaggatggctgacagaggctgctaggatgtctacaaccctagagttgcatagcccagttctacaacattgcatgcgaatccttggtgagttcagaagctatctgcctctgctgacaaagctcggctcccttcacccccagtcacttaattgtcagtgtttgttgagagctctgggcttgggatccctacagactatcgagctgttgaccctgggccaattgcttacataccctctcttggagttcgccgatcgaattaatcaagtgtggcagaatgagaatgagagaattcacgctcaggagactatccgcaggttgcagagatactgggaggctcgccagctccggctgctcaactttatcctccacgtcccctacgaacctcctgccagtgagcgtagtaaaagacaggttctgaggtcaccccagtgggaggtggtcgacaaagattctggcaccttcatcctatctgattactcaaacttgcaagactctattcaggagtccctccaggtcctcagcaagattctcgccatagagaaaagcggcgatctgaataagattgccctcgagtgggtggccatcatgcacgggttgggtgccctactggaagtgtggctgacattccagcaaaagtggatttttctgaataaggtactgcatgagatgaagatccagtttccaaatgccgacctgaacagtcgcttcaaagtgatggatgaccagtacaggaccctcatgcggatctctgtggccgaccctatggtgctctctctcgtggtccctagcgcagaaaggtcaccgtattttcaaggccaacagctgcagcaactgctgcaagcaggttctgtcgaactggagggtataattatgagtctggaatccgtgctctatggcgtgtgtgctcacttcccgcgcctgtttttcctcagcgactcagagcttgtcgctttgctggccgctagactggagagttgcgaagctcagttatgggttcggcgttgttttcctcacgtacatgctgtttccttccggtcttgcccaaccggcgagaagaacacagatgactgggagtccagcccaaatactcagacacaagtagaagctctcgcagtcctgggcgccggaggcgaagaagtcaagctgcaggggccattgccattgcatccggatctgcccaaatggctggctagccttgagaagtgccttcgcctcgccctggttcacatgctgcagggctgtgtggctgcccgcttggcccgtgggcccagtctcggggaagcccttaagcaactgcctaagcaaaacaagctgtacctccagttatacgtccaacactggattgatctggtacaagccttcccgtggcaatgcgtgttggttgctgaggaagtagtttggagggctgagatggaggaggctctcctggagtggggaaccctggcaatggtatcaatgcacatgaggaaactcgaggtcttagtaaactttatgcgtgcccaacgcgcttcccagggaggtcaatccctgcccagcgtgaggcaaacttccctgttgtctgccctgctggttatggctgttacccacagggacattgcccaactcctggaacagcaccaggtgagtgacttgaccgatttccactgggtcagacagctgaaatatcacctggggtcccctcatatcattccaaaatctcccctgcaaagccttaagacgatagcatcatctgagccctctctgtccccagccgcctgctggatagacgtactcgggagatctttcctgtacaactacgagtatctgggcccacgcctcggtccattgccatctttactccctgaaaggcccgctctggttctgctcctggccttagaggaagtagcctgtggaacagttctcggccccaacggtgttggcaaaagggccatcgtgaacagccttgcacaagctctggggcggcagctggttatgctgccctgctctcctcagattgaagcccagtgtctgtcaaattatctcaatggcgccctgcagggtggagcctggctccttctggaaaaggtgcaccagctaccacccgggctactgagtgcactgggccagagactcggtgagttgcaccacctgtatgctcctttgtatcaagaagcttcgcggaatacgtcaacaatcgaccctacccagccccaactactcggctctagtttcttcgaaaagcaccacgtgtccgtgcgtctgggctacggttgtctcctggtattgagagccctcagttcagctgtccccgccaacctgcatctgctgctgagaccagtggcactggcactccctgacctgcggcaggttgcggaacttacgctgctcggggccggcatgcgggacgcctttcaaatggcgactaggctgagcaaatttttctccctggagagagagttggtgtcaggcccgctcccctgcaggctgccgttgttgaaacaaatactcgaggacaccatcagaacactgaatgtcaccaaggaagaacccaagtgtcagaagccacgatctctcgcggctatagaggaggccgccttattgagaagtccccttttctcgatattgaacggactacacctccataacttgagggggcttctttgcgcccttttcccatctgctagtcaggtgctggccgagccaatgacctataagctgatgaaacccttggttgtggaggagctgcaacaagtcggactggatccatcccctgatattcttggatccctggagcagttatctcaggcactcagccgcgctagcggcatactgttgctgggccctgcgggttctgggaaaaccacctgctggcacagcttgtttaagattcagaatcgccttgcagcaatggaagacacaagcactcagggctgccagcctgtggaaattacgcatctctaccccagcggcctgtcaccccaggaattcctcggttggttggaggggtcctgctggcaccacggcatattccccaaagtcctgcgcgcagccgggcagtgtaataacatgggccagaagcgacaaaccgaggaatcaattggtattcagcactggatcatttgcgatggggcctccaatggagcgtggctggactcaatcacttgccttctatctgagctcccacaacttagtttgccctctgggcagcagattgctcgaccccctggcacctttctactcatggaggtggctgatacaaccggcatttcacccactgttgtcggctgttgcgcccttgtgtggtgcggaggcgagcaaacttggcagtgcatcctttctgctctgatggcatctctgccctacgagtatcggcttcagcataggacggtagctgagttaaatcacatggcagaagtattggttcctgcgacacttcgattcctgacctgtcaaggggttagctcactgctccaggtccatggtcagcaagcagtctgcgccggtgtggccgaggtaactagcatggctaggattctccactcactgctggatcttcacctgagactcaaagaagaaaaagcccccggcccagaggacctgagctatagcgaccctgtggcccagtcattccggtcctccaagagtagcttcttgaatcgaagtcaggtagattccgacgacgtacctgacaagtgtagagaacatctcctggccgtgtcttcttttttattcgctcttatctggggctttggggcacaccttccaagtcgcttttggccaatttttgacaccttcataagggactccattagcaggctctctaattaccctgagccacccccatctgcgctcgtgtttgaccttcacgtttctccagaggacggaacactggtgcccttcactggccagtacctcagcagccatataaaaggcactttggggacatttcatccatcaattcagaccgaaaggcttttatatgtcgtcgacttgcttctttccggcggccagcccgtcctcctcgctggcgaagcggcaaccggtaaatccgctttcgtggaagtgctggtagagccgcatcatccctatatttatagcccaattcatcccgctttttcgtcctcacacttgcgactcttgctttcgaggggtatccagggacagactcaagcgtccccccagcctggtcaccaccaagatagtaaacctagcctgttgtttcttctcgaagaccttcatctagccaccagcgacccagagaaatcctgccaaccagtgctcgagactttaaggcaggccatggatggaacagtgtacgcccactccactctagagctgcagaccctccagcccacggtgaatttcctcgccaccgtgaccgttccaggctattgtgaaagacccctgtgcccacgactcttccgcttgttcactgtgctggcactcgagagcatgacacaggccaccctcctagaacgccatgttcctataatccaggcctggctggagcggtttcccagtgtcgagcgagaacgcgcccttgccaggggattagtccgtgcctctgtcgaggcctgggaggcagtttgtaattgttttatgccatctcccctccatccacactatcactttagcctacactctgtctcacatctgctgtcatcactgcaactgctcccaaaccgaacaggaagtcgggggttcgtcgattacccgaaccatcaagagcatttacgcagagttagtggcctgcgaggcacctgtctgaccgtgatgatggccacacgcaacgtcgtgaggctgtggctgcatgaggcccagagaaccttttgcgatcggctcgacagccccagggaaagatcatactgcgcgaaattactgctggtcgtcgcacagtctgtattttgttgcgggcccggccctcagcacttgggcaaggaccatcaggagtcggaggaagaggaagaggaggagcgggtgccagaagtggaaagcgaaggagagcttgctcagtgggaggacttcagtaacagtaactccgaaaccgaggaagaggaggagccctacggcctgcaggtggccagggtctctaatagtcgggatcccagtcttacaccttctataggacccgtgagtaggggaatgaaggaaagtatttcgcacaagatcaggcaggaaaaagggacaagagcaagtaactataggctccaagtgaggcggagctttaaaacatggtggcagaagaagcctcaaatggatctgatcagccccctcctgttacccgttctgcttcttcacccccaggaaaagccgtccgatttggtcttttcacaggaactgattctgggcccgaactcagagactccaaatctctacctggaacgccagtgggagaaattggaagagcagctggctacaagcgcagcccagttaaagctgtctccccatttagcccgttgccattcaatggcgcagcatgtagctcggttagtgcgtgtcctcgctcggccgagacagcacgggctacttctgagcggtgccctgggaacaggtaggcatactgctataaccttggctagctccatctgtcaagcccattttttccacctgccctccgggtccgaagaggccatcctgcagtgcctgcgtgatgccagctggcatgccggcatgctcagccaacctgtcgcacttctagtaccatccggcgttgatctgaccacacttcaccgcttattagccttagcgactagcggctcattccccggtcagtacactgaggcagacttggaccgcatcggagagcacttgcccagagagaacctgggggtgaagcagaatatcaaaaaggaaatggtcctgcaacgttttcatcagcaggtgtgtagccatctacatctctttttcttgataggtgataaacaggcccataaacaattgccatccactctgttcctgaggctcctccagctggccaccgcatcaatcgatcgttatgagccctgggatcaagctgctctcgcgaaggttgcccagcatcacctggaaggtgcccaaagtgtacctctggacgatggaagctggaagtaccctgatttacaggcatccatacccagcgttgccaaggctatggctttgattcacttatccgctacacactaccacgaacacttgtgtccggcattgcccctggttacccctaagacattcctcgacttcctggacactttcttgatgctgcagcaacagacaatcctgaagatcaaaaataaagcacagcgggtacagaatgccctcgagaatctacgaatgctgatcaaggagcacggcactcacgccaatctgatcttcgaccttgaacaacaactgaaggactctggcaaatctctgagcatgtttcaacagcaattagagcagagcaaattgctgtataaacagcagctggaagagtgtcgtcatcaggaaaatttgatcgaaaatctagcccgtcagcgggacgctctgcaggctcagcgcgaagcatttctggagcagatgtctaaggcttttctcgaacccctgtcccagttacaggtggctgacttcgaggaaatccgctcctatcgggccccccctgaatctgtggtgcgggtcacagacgctatgtgcgacctgttccaccatgagactgggtgggcttctgctaagcagttactatgcaccgaggatttttaccaagaattagtgttcttccctaaagagaagatcaccgattccgaattgatcaagctgcacttgatcctgaaggcacccgggatggatgacgctgctctcagagcagtgagcagaccagcggcctcactggcagcatggctgtgggctgtgcttcattacggactggcccactgccgtggattgcctactgacctcctcttacagcaggtcgaagccactctgacccgagaacaagcccgtttagggtattatcaatttcaggcccaggagactttggagcataatcttgccttagcaaagatggtggaggatgcccaggcaagccacaattgcgtggcaaagacgctctcccaggcccagtgtgggcagtaccataaatggcccatgaaggctgcactgctgacacccatgagagcttggaccacacaactacagaagctcaagggcaggtgcatgaccgtctttggcgatactctcctgtgttcggccgctatcatttaccttgggccattcccccctcttcgcagacaggaactgctcgatgaatggctggctctctgtaggggcttccaggaggctctcgggccagacgacgttgctcaagctttgaaaagaaagcaaaaaagcgtctcaattcctccgaaaaaccctttgctggccacacattccccgttcagcatcctctcgctcctcagtagcgagtcagagcaataccagtgggacggaaacctaaaaccacaagctaaaagcgcacatctggcgggtctcctgctgcgtagcccaacacattatagttcctgcagatggccactacttcttgatccatctaatgaggcattgatttggctggatcccctccccctcgaggagaataggtccttcgctccagctctgaccgagggccgggggaaggggcttatgagaaaccagaagagggaatctaagactgacatgaaggaggaggatgatgagagtgaggaatctaacgaagccgaagatcagacgaaggaacagaaagccgaggaacggaaaaatgagcaagaaaaggaacaagaggaaaacgaagaaaaagaggaagaaaaaactgagagtcaaggctccaaacctgcctacgagacccagttgccgagtttgccatacctttcagttctttcgggtgccgaccccgaactgggttctcagttgcaggaggccgcagcgtgtgggctgccagtgctgctcactaacgtcgagctgggattgggctgtgaggaattgcaatggctcttgcaaagagagcagctcagccctcctcaagtccagcctgggttttgtctctatctgtctacaacactgagtctgtgcgccatggaaaaggtcctaggctgtgagcttcttaaggggctgaacgtgcttgacttaggcctgaacatggaaattctggaggagcagatgctccacgagattctgtgtcgggaatacccagagctcgagaccaggtggcaagatctgaagattcgggctctggacacttgtaaggcagtggaagcagccgaggaaaggctgttgaccatgctcctctttcagaaccctaagaggcaaaaacccgcaaagtttctccgcaatattgtgcgggcccagggtaagctgtgccaactgcgcgcccattgtgaggagctcgaaggtcagaaattacaggaaatggtgctctgggcaccgtaccggccagtggtgtggcatggcatggccatggtgaaagccctgtcccagctgcagaacctccttcccctgttttgtatgtccccggagaactggttggctgtcacaaagcaggctctcgacagtatgaagccgcgggagattaatcacggggaggacctcgctagtcatctcctccagctcagagcacatctgacgaggcagttactgggttccacagtgaccgcgctcgggcttacacaggtgccccttgtcggagcgctgggagctcttgcactactgcaagcaacagggaaggcctctgaactggagaggctggcactgtggcccggtctcgctgcaagtccaagcacagttcattccaaacctgtctccgacgtcgctagacccgcctggctgggtcccaaagcgtggcatgagtgcgagatgctggagctgttgcccccatttgttggtctgtgtgcaagcttggccggtcattcttccgcttggcaggcgtacctgagtctgtcctccactgtgctgggccccgctccaggcccaggtcccgagcctctctctctgctgcaaaagctgatactttggagggtattgaggcccgaatgtttagctggcgcattagcagactttactacaagccttcttggacgccctctggatgagaacacatatgcccccactatgcccttcaagcattcccaggctacgcagcccatgctgatcctgttgcctcccccaggccatcctagtgcgacactacatcccttgacggttattcagaagctcgccgccaaatatcagcagggccaaaagcagctgcaggttatcgcattgggtagtgaggcctgggaccctgtgtcggtggttgtgagtaccctttctcaagctatgtatgagggccactggctagtcctcgacaattgtcacctcatgcctcactggcctaaggagctgttgcaactactcctcgaactactcggacgggccaaagtcgttgccgacctggaatccgaacagctgctagatcaaccggagagccgtaatgtcagcactgttcacagggacttccgactctggctcattgtgcccgctgaatcaagtgcttcgcttcccgcagtcctgactcagcattcaatgcctgtcttctggaaccagtccttggagttgggtcacgtgctaatcgatagcgtagagctagcgcagcaggtgctctacatgcaacctcccacccaggcattaccactcctgctactccacggactgctgcttcaccgccagttatatggcaccaggctacaggcacatcgcggcaggtggtcacaagtcacacttacccaggtcctgcagactcaggaccagttatgggcttcactatctaaccccagagccgctatgcaggagttagctgccagcgtgttttacggaggaccactgggtgacactgaggatagagaggcgctgatatccctcactcaggcctgtctgagtccatcttccgggagttgggtccagcctcataccccgcagagcctgctggctacactaatgcctctgccagaactgagggagctggacgctatggctgagtgcaaggcacagatgcatctgctacctagtccacccgaaccccgtttgtgcggtctgtccgaggggccccaagcatggctgctgcggagacaatcgagagccctgttgtctgccctgcagcggtcttctccagtctgggttccagagtccaggaggggtgcccaactggcagagcgccggctcagacagcgcttggttcaggtcaacaggaggctggagtccctccaggacttgctaacccatgttatacggcaggatgagagtgatgcaccatggtcggtgctgggtcccaacgcccgccgccccctagaaggagtgctggagactgaggcgctggaactgtcacagctggtgggaaccttgcagagggatctggattgcttacttcagcaacttaagggggcccccccttgtcccagccgccgctgtgctgccgtggctcacgctctgtggacaggaaggctcccgctgccatggaggccccatgctccggcaggtccacagcccccatggcattggctcagacagcttagtagacggggtcagctgctcgtacggtacctgggcgtcggtgcagacgcaagtagcgacgtcccagaaagggtgtttcatctttcagcgttccgccatccccgccgtttactcctcgcactaaggggggaagccgccttagatcagaacgttcctagttccaactttccgggaagtcgagggtccgtgtcgtcacagctgcagtataagaggcttgagatgaattcaaatcctttacattttcgggtggagaacggtcccaatcctaccgtgccagagcgcggattgcttctgatcgggcttcaggtacttcacgcagagtgggatccaatcgctggtgctctgcaggatagtccatcctcacagccttccccactgccgcccgtgtctattagtacccaggctcccggaacatccgatctacctgcccccgccgacttgaccgtgtatagctgtccggtctacatggggggccctctgggcacagctaaactacagtccagaaacatcgtcatgcatttaccgcttcccaccaagctgacccccaatacctgcgtccagagaagagttcacgtctgctcgcctcctctgtcttag

SEQ ID NO: 17624 - DNA, 390 bp, synthetic construct
  source 1..390: mol_type = other DNA; note = Synthetic coding sequence
atggtggccatggctgaggcagaggcgggagtagccgtggaggtcaggggtcttcctcccgccgtgcccgatgagctcttgaccttatatttcgagaacaggagacggagcgggggcggaccagtgttaagttggcagaggctcggatgcgggggggtcttaacgtttcgggagcctgcggatgccgagcgcgtccttgcccaagcagatcatgaacttcatggcgctcagcttagcttgcggccagccccaccccgggctcccgcccgactgttactccagggccttcccccaggcacaaccccgcagaggttagagcagcacgtgcaggctctcctgcgtgcatcaggactgccggtccagccctgttgcgccctggcttctccttag

SEQ ID NO: 17625 - DNA, 867 bp, synthetic construct
  source 1..867: mol_type = other DNA; note = Synthetic coding sequence
atggagagggagcctagtgcctccgaagcggcacctgcagctgcagccctgttcgcttggggcgccaacagctacggacagctcggcctgggacacaaagaggacgtgctactgccccagcaactgaacgatttctgcaagcctcggtcagtacggcggataaccggcgggggaggccacagcgcagttgtcacggacggcggcgatctgttcgtgtgcggactgaataaggacggacagctcggtctaggacacaccgaggatataccgtattttaccccttgcaaatctctgttcggatgccccattcaacaggtagcttgcgggtgggattttacgatcatgctcaccgagaacggacaagttttatcctgcggatctaacagcttcggtcagctcggagtcccccacggaccccggaggtgtgtggtcccgcaggccatcgaacttcataaagagaaagttgtgtgtatagcggcaggactccggcacgccgtggcggccacggcgagtggcatcgtgtttcaatggggtaccggcctcgcctcctgcggaaggcgtctgtgcccgggacagacattgcctctgtttttcacagctaaggaacctagtcgggtcacgggcttagaaaattccaaagccatgtgtgtcctggcggggagtgatcactcagccagtctgactgatgcgggggaggtctatgtctggggctcaaacaaacatggacagcttgcaaacgaggcagcctttctacccgtcccccagaaaattgaggctcattgttttcagaacgaaaaggtcacagctatttggtctgggtggactcaccttgtggctcagacagggcttctctggctccgtgcctag

SEQ ID NO: 17626 - DNA, 372 bp, synthetic construct
  source 1..372: mol_type = other DNA; note = Synthetic coding sequence
atgaatcggcgccgtaagttcctgctggcttccgtcctggccttacaaaatagtagctttatttaccctagctgtcaaaaatgcttcagtcgcatcattctcgtgtccaaaagatcaaattgccctaagtgcggttctaccggtgagagcgggaacgcaaactatagatataagctgagtctgaaagtggccgagtcaaacaaacttttcgttattactgtattcggctcctgtctcgataccttctttgggcttaccgctacgggtctacaccgatacattcaggatcccaataaaatacctgagaccctggacaatgatactactcagaaccttcttaccaaggcggtcgaaacatgcttcgtcggctag

SEQ ID NO: 17627 - DNA, 324 bp, synthetic construct
  source 1..324: mol_type = other DNA; note = Synthetic coding sequence
atgctgcgcctatacccaggacccatggttaccgaggctgaggggaagggaggcccagaaatggcaagtctaagctcctccgtagtgcctgtttctttcattagcactctgagggaatccgttctggaccctggagtgggcggtgaaggagcctcagacaagcagaggagtaagctgtcattgtctcattcgatgattccagcagcaaagatccatactgaactgtgcctgccggctttcttttctcccgccggcacacagagacggtttcagcagccacagcaccacttaaccctttctattatccacactgcagctcggtag

SEQ ID NO: 17628 - DNA, 1653 bp, synthetic construct
  source 1..1653: mol_type = other DNA; note = Synthetic coding sequence
atggaaacagatctgaacagtcaagatcgaaaggacttggacaaattcatcaagttttttgcactgaaaaccgtgcaggtcattgttcaggctcggctgggagaaaagatttgcactcgttctagtagttcccctactggaagtgattggttcaacctggctattaaggatatcccggaagtaacgcatgaagctaagaaagcattggctggccagctgcctgcggtaggcaggagcatgtgtgtcgaaatttccctcaaaacctctgaaggtgactcaatggagctcgaaatttggtgcctggaaatgaacgagaagtgtgacaaggaaatcaaagtctcttacacagtatacaataggctgagcctgttgttaaaatcattgctggccataacacgcgtgaccccagcttatagactctcgagaaaacagggccatgagtacgtcatattgtatcgcatctactttggcgaagtccaattgagtggcctgggggaaggtttccaaaccgtgcgtgtcggtacggtcggcactcctgttgggaccatcacactgtcctgtgcctaccgaattaacctggccttcatgtccacgcggcagttcgagagaacacctcccatcatgggcattatcatcgaccactttgtggaccgtccatatccatcttcatcaccaatgcatccgtgcaactacaggacggctggagaggatacaggggtcatttacccatctgtggaagattctcaggaggtgtgcacaacttcatttagcacatctccgcctagccaatgtgttttcacagtgaccaaggcccacttccagacacccacccccgtggtcactgatactctgcgcgtaccaatggcgggactggcctttagtcaccagctgtcaagtagtcgactcagctaccagcctgccgccctcggggtcggaagtgccgatcttgcatatcctgtggtgttcgctgcagggcttaatgcaacacatccccatcagcttatggttcccggtaaagaaggaggtgtgccgctggccccgaaccaacccgtgcatgggacccaagccgatcaagagcggctcgccacgtgtactccctcggaccgcactcactgcgccgcaaccccctcgtctagcgaagacacggagacagtgagtaactcttccgaggggagggcttctccacatgacgtgcttgaaactatttttgtccgcaaagtaggagcatttgtcaataaacccatcaaccaggtcactctcacgtcactggacatcccctttgcgatgtttgcccctaagaacctggagctggaggatacagatccaatggtcaacccgcccgattcaccagagactgaatcgccattgcaagggtctcttcattccgacggcagttctggtggaagttctggaaacacccacgacgattttgtcatgatcgacttcaagcccgctttcagtaaagatgacattctgcctatggatctgggaacattctatagagagtttcagaatccaccccaactgtcgtcccttagtatcgatatcggcgcccagtcaatggccgaggatctcgattccctccccgagaagctcgctgtacatgaaaagaatgttagggagtttgacgccttcgtcgagacactgcagtag

SEQ ID NO: 17629 - DNA, 4104 bp, synthetic construct
  source 1..4104: mol_type = other DNA; note = Synthetic coding sequence
atgggaaacagtgactcacagtacacacttcaaggatctaaaaatcactctaacacaataacgggcgccaagcagattccatgctctctgaaaattagaggcatccatgcgaaggaggaaaaatctttgcacggctggggtcacggcagcaacggcgcagggtacaagagccgttccctcgcacgcagctgcctgtcccacttcaaatcaaaccagccttatgcttcccgcctgggaggccctacttgcaaggtatctagaggcgtcgcttactccacacatcggacaaacgccccaggcaaggactttcagggaatttccgctgctttcagcaccgaaaacggttttcattcagttgggcacgaactcgccgacaatcacatcacctctagggactgcaatggacacctcctgaactgctacggtagaaacgagtccattgcttccaccccccctggggaggatcggaaatctccgcgcgtgttaatcaagaccttaggtaagctcgatgggtgtctcagggtagagtttcacaacggcgggaacccttctaaggtgcctgccgaggattgttcggagccagtccaactgctccggtactcccctacactggcctcggaaacttcccctgtcccagaagcccggaggggcagtagcgcggactccctgccaagccaccggcctagtccaaccgattcccgcctgcgctccagcaagggatcttcactgtccagtgagagcagttggtacgactcaccttgggggaacgcaggtgagttaagcgaagccgaagggagctttctggcccctggtatgcctgatccgagcttgcacgccagttttcctccaggggatgccaagaagccgtttaatcagagctctagcctatcctcccttagggagttgtacaaagacgctaacctgggctccctgtccccatccggaattaggctgtcagatgagtacatgggcacccatgcctcactctcgaaccgcgtgagctttgcatccgacatcgacgtgcctagcagggtcgcccacggcgatccaatacagtactccagctttactttgccttgccgaaagcccaaggcatttgtggaagacactgctaaaaaggattctctgaaggcaagaatgcggcgaatctcggactggactggtagcctttcccgcaagaaacggaagctccaggaaccacgatccaaggaaggatccgactactttgatagccgctctgatgggctgaacacagatgtgcagggctcctctcaggcgtcagccttcctgtggtctggggggagtacacagatccttagtcagagatccgagagtactcacgcgattgggtcagacccactccggcaaaacatctacgagaatttcatgagagagctggagatgtcgcggaccaatactgagaatattgaaacatccacagaaacagcagagtctagttctgagagtctgtctagcctcgaacagttagatctcctcttcgagaaagaacagggtgtcgtcaggaaagcaggatggctatttttcaagcccctagtaactgtacagaaggaacggaagctggaactggtcgcacgacgcaaatggaaacaatactgggttacactgaagggctgcaccctactgttttacgagacgtatggcaagaattcaatggaccagtcgtccgctccccgttgcgctctcttcgcagaggactcaatcgtgcagtctgttccggagcaccctaagaaagagaacgttttctgcttatcgaatagctttggcgatgtttatctctttcaagctacatctcagaccgatttagagaactgggtcacggccgtgcattctgcctgcgcaagcttgttcgccaaaaagcatggcaaagaggacacactacggctcttgaagaaccagacaaaaaatctcttgcagaagatcgacatggacagcaagatgaaaaaaatggcagaactgcaactgtctgttgtctctgacccaaagaaccggaaagctatcgagaatcagatccagcagtgggagcagaatctggaaaagttccacatggacctatttcgaatgcgttgttatctggcctccttacagggcggcgagcttcccaatcccaagagtctactggccgcagcgtcgagaccaagcaaattggcactggggcggttgggaatactatctgtctcatcgttccatgcgctggtatgctctcgcgacgattccgcattaagaaaacgcactctgtccctcactcagcgtggccgaaataagaagggaatttttagtagcctgaaaggcctagacacactggcccggaaggggaaggaaaagcggccgtctatcacacaggttgacgagctgctgcatatttacgggtccaccgtggatggagtccctcgcgacaatgcgtgggaaatccaaacatacgtgcacttccaggacaaccatggtgtgactgtggggatcaagcctgaacaccgtgtggaagacatcttgaccctggcatgtaagatgcgacagctggagccttctcactacgggctccagcttaggaaactggttgatgataacgtggaatattgcatcccagccccttacgaatatatgcaacagcaggtgtacgacgagatcgaggtatttccactaaatgtgtacgatgtccagttgaccaaaactggatccgtttgtgactttggtttcgccgtgaccgcacaggtggacgagcgccaacatttgtccaggatcttcatctccgacgtgctccctgacggtctagcatatggtgaaggattgaggaaggggaacgagattatgacattgaacggcgaggcagtatccgatctagatctcaagcaaatggaggccctctttagcgaaaaatcggtggggctcacgttaatagccaggccgcctgacacaaaggcaactctttgtacaagctggagcgactcagacctgttttcgcgagaccagaagtcgcttctaccaccccccaatcaatctcaattactcgaggaatttctggataactttaagaagaatacagccaacgacttctctaatgtcccagacataactacaggtctcaaacgctctcagaccgatggtacacttgatcaagtgtctcacagagaaaaaatggaacagacctttcgttccgctgaacagatcaccgctctgtgtcgttctttcaacgactctcaggctaatggaatggaaggccccagggaaaaccaggatccaccccccagaagccttgctaggcacctgagcgacgctgataggctgcgaaaggttattcaggaactggtcgacacggagaaatcttacgtgaaagatctctcttgccttttcgagctctacctagagccccttcagaacgaaacatttcttacccaagacgagatggaatcactttttgggtctctgccagaaatgcttgaattccaaaaagttttcctcgagactcttgaagatggcatatccgctagctcagatttcaataccctcgagaccccttctcagttcagaaaactcctgttctctctaggaggctcgttcctgtattacgcagatcattttaagctgtattcagggttttgcgccaaccatatcaaggtacagaaggtgttggagcgggccaaaaccgataaggctttcaaggctttcctagacgctaggaatcctacgaagcagcacagctctaccctggagtcttatttgattaagccggttcaaagggtattgaagtaccccctccttttaaaggaactggtctccctgacggatcaggagtccgaggagcattatcatctgaccgaggcgttaaaggctatggagaaagtcgcctcacacatcaacgaaatgcagaagatatatgaggattatggcacagtgtttgaccagctggtcgctgaacagagcgggaccgagaaagaagtcaccgaactctccatgggtgaactactgatgcactcaacagtttcatggctcaacccttttctctccctgggaaaagcacggaaggatctggagttgaccgtgttcgtattcaagcgcgccgtaatcttggtgtacaaagagaactgctag

SEQ ID NO: 17630 - DNA, 45 bp, synthetic construct
  source 1..45: mol_type = other DNA; note = Synthetic coding sequence
atgaatgggacacttgaccaccctgaccagcccgacctcgactag

SEQ ID NO: 17631 - DNA, 519 bp, synthetic construct
  source 1..519: mol_type = other DNA; note = Synthetic coding sequence
atggtagctatggctgaagcggaagccggtgttgctgtggaggtcaggggcctgccccctgccgttccggatgaactgctgaccctctacttcgagaatagaaggagatctggagggggccctgtgctatcttggcagcggcttggctgcggcggcgtcctaaccttccgagagccagccgacgcagagcgagtgctggctcaggcagaccatgaactccatggggctcagctttcgttacggcctgccccgcctcgtgcccccgctaggctgctccttcagggacttcctcctggtacgacccctcagaggctggagcaacatgtacaagcactactccgggcaagtgggttgcctgtccagccttgttgcgcacttgcctccccacgcccagaccgggcccttgtccagctgcccaagccgctaagtgaggctgatgtccgggtgctggaggagcaagcccagaatctgggcttagagggaacactggtttctctggcccgggtgccgcaggcttag

SEQ ID NO: 17632 - DNA, 27 bp, synthetic construct
  source 1..27: mol_type = other DNA; note = Synthetic coding sequence
atgttttggaagtttgaccttcactag

SEQ ID NO: 17633 - DNA, 411 bp, synthetic construct
  source 1..411: mol_type = other DNA; note = Synthetic coding sequence
atggttgccatggccgaggccgaagccggcgttgccgtcgaggtgcgcgggctccctccagccgtccctgacgaactgctgaccctttactttgagaatagacggcgctccggggggggaccagtgttatcctggcagagactggggtgtggcggggtgctgacctttagggagccagctgacgctgagagggtcctggctcaggcagatcacgagctgcatggcgctcaactcagcttgagacctgccccaccgagagcaccagcacgcttgctgcttcagggtctgccccccgggaccaccccccagcggctcgaacagcacgtgcaggcacttctgcgggcatccggactccctgttcagccatgctgtgccttagcaagtcctcgccctgatcgtgcactcgtgtag

SEQ ID NO: 17634 - DNA, 5844 bp, synthetic construct
  source 1..5844: mol_type = other DNA; note = Synthetic coding sequence
ggcaggcccatcgaccccagggaaggtccgggtaggccacccctggatggtagagatcattttggcagaccccctgtggacatacgcgagaatttagtaaggcctggtatcgaccacctgggtagaagagatcacttcggatttaatccagaaaagccatgggggcaccgcggggactttgatgagcgcgagcatcgcgtcctgccagtttatggcggccctaagggactgcacgaagagcggggcaggtttagatcgggcaattaccgctttgaccccagaagcgggccttggaatcggggattcgggcaggaggttcaccgcgactttgatgaccggagacgaccgtgggagcgccagcgggatagagatgaccgcgactttgacttttgtagagagatgaatggtaaccggctaggccgggacaggatccaaaatacctgggtgccccccccccacgcgagagtgttcgactatttcgagggcgcaacctctcagcgcaaaggcgataacgtgccacaggtcaatggggagaatacagagcggcacgctcagccacccccaataccggtgcagaacgacccagaactatacgaaaaactgacttcgtcgaacgagattaacaaggaaaagtccgatacggtcgctgatattgaatccgaaccggtggtggaatcaaccgagactgaaggtacaccactaacctccttgacggctgagaccagacgccaggtgaagatgggcaactcagattcgcagtacacactgcagggttccaagaaccacagcaatacaataacaggggccaagcagattccctgctcactcaagatacgcggtattcatgcaaaggaagaaaagtctctccatggctggggccacgggagcaacggagctggatataaatccagaagcctagcaagatcatgtctctcgcattttaaaagcaaccagccatacgcgtcacggctaggagggccaacctgtaaagtttctcggggagttgcctatagcacccaccgaactaatgccccaggcaaggacttccaggggatcagtgcagcgttcagtacagaaaacggatttcacagcgttggccatgaacttgcagataaccacatcaccagtagggattgtaatgggcacttgctcaattgttacggccgtaatgagtctatagcatctacccctccaggcgaggatcgcaagtctccacgggtgctcataaaaaccctgggtaaactggacggatgccttcgcgtcgaatttcacaacggcgggaacccctctaaggtccctgctgaggactgctccgagcctgtgcaactgttgcggtatagccccacgctggcctcagaaacgtccccagtgccggaggccaggcgggggtcatccgccgattctctcccatcacatcgtccatctcctacagatagcaggctgcggtctagcaaggggagctctctttccagcgagtcttcctggtatgactcaccctggggcaatgctggagagctttccgaggcagaagggagcttcctggccccgggcatgcctgatccgtccctccacgccagctttccccccggtgacgcaaaaaagcctttcaaccagagctctagcctgtcctccttgcgagaactgtacaaggatgctaacttaggcagcctttccccaagcggaattaggctatccgacgagtatatggggactcatgcttctttgtcgaatagggtctctttcgcttcggatatcgacgtccctagccgggtggcccacggggacccgattcagtattcatcattcactttgccatgccgcaagcctaaggccttcgtggaagatacagctaaaaaagattctcttaaggcccgcatgcgacgcatatctgattggacagggtccctctctcggaaaaaaaggaagctgcaggagccccgatcaaaggagggatcagattattttgactcaaggagtgatggactcaacacggatgttcaaggctcttcccaggcctcggccttcctctggagcgggggaagcactcaaatactctctcaacgcagcgaatctacacacgccatcgggtccgacccactgcgccagaatatatacgagaacttcatgcgtgaattagaaatgagccgcaccaataccgagaacattgagacatctactgagactgccgagtcctcctccgagtcactgagcagcttagaacagttagacctcttattcgagaaagaacagggcgtcgtgcggaaagccggctggctcttttttaaaccactcgtgacggtgcagaaagaaagaaagctagagttggttgcccgtcgaaagtggaagcaatactgggttacacttaagggctgtactctgctgttttatgaaacctatggcaagaatagtatggaccagagctcagccccaaggtgcgcactgtttgccgaagactccattgtccagtcggtgcctgagcatccgaagaaagagaatgtgttttgccttagtaacagctttggtgatgtgtacctgttccaagctacttctcaaactgacttagaaaactgggtgaccgcggtccattctgcctgcgccagtttattcgctaagaaacatggcaaagaggatacactaagacttctgaagaaccaaacaaagaacctcctgcagaaaattgatatggattctaagatgaaaaagatggcagaactgcagctgtctgtcgtgagtgaccctaagaataggaaagccatcgagaatcaaatccaacagtgggagcagaacctggagaagttccacatggacctctttagaatgcgctgttatttggctagcctccaggggggggaactgccaaatcccaagagcctattggcggctgcctcgcgcccctccaaattggcacttgggcggctaggcatactcagcgtcagttcctttcacgcgctagtatgctcgagggacgattctgccctgcgaaagcgaactttgtcgctcacgcagcgaggtcggaataaaaagggaatcttttcttccttgaaagggttagatacactcgcccggaagggtaaggaaaaaaggccgtccataactcaggtcgatgagctccttcacatttatggatctacagtggacggggtacctagagacaacgcttgggagatccaaacctacgtgcatttccaggacaatcatggcgttaccgtcggaatcaagccggagcacagggtcgaagacatccttacactggcctgcaaaatgcggcagctggaaccgtctcattacggactgcagctccgtaagcttgtcgacgataacgtggagtattgcattcccgccccctatgagtacatgcagcagcaggtctatgatgagatcgaagtgttccccctgaatgtgtacgacgtccagcttaccaaaacgggcagtgtgtgtgactttgggttcgcggtcacagcccaagtcgatgagaggcagcacctgtcgcgaatcttcatctcggacgtgctgcccgacggccttgcttatggcgaaggcctccgaaaaggcaacgagatcatgaccctgaatggcgaagcagtgtcagacctcgatttgaagcagatggaggcactgtttagcgagaagtctgtggggttgacacttatcgcgagacccccggacaccaaggcaactctgtgtactagttggtctgactcggatctgttttctcgggaccagaaatcccttctccctcctcccaaccagagccagctgctggaggagttcctggataattttaagaagaatacggctaacgacttctcgaacgttcctgatattaccacgggcttgaaacgcagtcagacagatgggaccctcgaccaggtcagccatagagaaaaaatggaacagaccttccgcagcgctgagcagattactgccctctgtcggtcgtttaatgactcacaggccaacggaatggaagggccccgtgagaatcaggaccctccgccacgctcattggcacgtcatttgtccgatgctgatagactgagaaaagtgatccaggaactggtcgataccgagaaatcctatgttaaggacctgtcatgcctgttcgagctgtacctcgagccactccagaacgaaacatttctgacacaggatgagatggagtcactgtttggcagtctccccgagatgctcgagttccagaaggtattcctcgagactctggaggacggaatctccgcctccagtgattttaatacactggagacgcccagtcagttccgtaagctcctattttccctggggggatccttcctgtactacgcagatcacttcaagctgtatagcggcttttgtgccaaccatatcaaagtgcagaaggtattggagcgggccaaaacagataaggcattcaaagcattcttggatgcaagaaatccgaccaagcaacacagctccactctggaatcctacctcattaaaccagttcagagagtgctgaagtatccactgctcttgaaggaactggtgagcctcaccgatcaggagtctgaggaacactatcatttgaccgaggccctgaaggctatggagaaggtggctagtcacatcaatgaaatgcagaagatctacgaagactacggaacggtgtttgaccaactcgtggccgagcagagcggtactgagaaggaggtgaccgagctatcaatgggcgaactgcttatgcacagcaccgtgagctggttaaaccccttcttatccttgggaaaggctcgaaaagatctggaactgactgtgttcgtgttcaaaagagctgtgattcttgtgtataaagagaattgcaagctgaaaaagaaacttccttctaattcacgccctgcacacaattctaccgacttggatccttttaaatttcgttggttaattcctatcagcgccctacaggtaaggctcggaaatcccgctggtacggaaaataattctatctgggagctgattcacacaaaaagcgaaattgagggccggccagagactattttccaattgtgctgcagcgatagcgagtcaaaaacgaatatcgtgaaggttattcggtcaatcctcagggagaactttagaagacatattaaatgtgagcttcctcttgagaaaacctgcaaggatcgcctcgtgccactaaagaaccgggtgcctgttagtgccaagctggccagctccagatccttgaaggtgctcaaaaattcgtcatccaacgagtggacgggcgagaccggaaagggcacccttttagacagcgacgagggatctctatcttcgggcacccagagctcaggttgtccgacggctgagggtaggcaggacagcaagagtacctcgcccggaaaatatcctcaccccgggctggctgacttcgcagataatctaattaaagagtcagacattctcagcgatgaggacgacgatcatcggcagacagtcaaacaggggagcccgacgaaggatatcgaaatacagttccagagactgaggatatctgaggatcccgatgtgcatccggaagccgagcaacagcccggacccgagagtggggaggggcagaagggcggagagcagccaaagcttgttaggggtcacttttgcccaattaagagaaaagccaatagcacgaaaagggacagaggaactctgcttaaggcgcagatccgacatcagtcactggacagccagtcagaaaacgccaccatcgacctcaactccgttctggaacgggaattttcggtccagtcactcacttctgtcgtttctgaagagtgtttttacgagaccgagtcccacgggaaatcctag

SEQ ID NO: 17635 - DNA, 294 bp, synthetic construct
  source 1..294: mol_type = other DNA; note = Synthetic coding sequence
atggaggctgccgacgcatccaggtccaatgggtcatccccggaggccagagacgctagatccccttcgggcccctcggggagcttagagaacgggaccaaagctgatggcaaagacgctaaaaccactaacgggcatggaggcgaggctgctgagggtaaatctcttgggagcgcccttaaacccggagaaggtaggtccgccttgtttgccggcaacgagtggagaaggccaatcatccagttcgttgaatctggtgatgacaaaaacagcaactacttctctatggattag

SEQ ID NO: 17636 - DNA, 117 bp, synthetic construct
  source 1..117: mol_type = other DNA; note = Synthetic coding sequence
atggaggcggcagatgcttctagatctaatgggagctcccctgaagccagagatgcgaggtccccgagcggtccatccggttcactggaaaacggcaccaaggcggatgggaagtag

SEQ ID NO: 17637 - DNA, 1455 bp, synthetic construct
  source 1..1455: mol_type = other DNA; note = Synthetic coding sequence
atggccattgggaagcggttggccactctgcctacaaaagagcagaagacacaacgcctgatatccgagttaagtctacttaatcataagctaccagccagagtctggttgccaaccgctggattcgaccatcatgtggtgcgggtaccacacacccaggccgtcgtgttgaactccaaggacaaggccccctacttgatttacgtggaggtcctagagtgcgaaaatttcgacactactagcgtgccagcacggattcctgagaacaggatcagaagcactaggagcgtggagaatttaccggagtgtggtattactcacgagcaacgtgcgggaagtttcagtaccgtcccgaactacgacaatgatgacgaagcttggtctgtcgacgacattggcgaattacaggttgagctccccgaggtgcacaccaactcttgtgataatatctcccagttcagcgtcgatagtatcacatctcaggagtccaaggaacccgtgttcatagcagcgggggacatccgccggcgactctcagagcaactggcccataccccgaccgcgtttaagcgcgaccctgaagatcctagcgccgtcgcactgaaggaaccatggcaagagaaggtacggcgcatccgggagggctcaccttatggccacttgcctaattggcgactactgtctgtcatagtgaagtgcggggatgatctcagacaagagctcctggctttccaagtcctcaagcagttacaaagcatttgggaacaggagagggttcctctgtggataaagccctataaaatcctcgtgatttctgccgatagtgggatgatcgaacctgtggtcaatgccgtgagcatccaccaagtgaagaagcaatctcagctgagtctgttggactatttcctacaggagcacggtagctacacaactgaggccttcttatccgcccagcgtaactttgtccaatcttgtgccggatactgcctggtgtgctacctgctgcaggtgaaagataggcataacggaaacatcttattagacgccgagggccatataattcacatcgacttcggttttatcctatctagtagccctcggaacctgggttttgaaacatccgccttcaagctgaccactgagtttgtggacgttatgggcggactggatggggatatgttcaactattacaagatgctgatgctccagggcttaattgcagcaaggaagcatatggataaggttgtgcagattgtggagatcatgcaacagggatctcagctgccctgctttcacgggagttctaccatcaggaacctcaaagaacgattccacatgtctatgacggaggaacagcttcagctgctcgtggagcaaatggttgacgggagtatgcgttcaatcacaaccaaactctatgacgggttccagtatttgacaaatggcataatgtag

SEQ ID NO: 17638 - DNA, 228 bp, synthetic construct
  source 1..228: mol_type = other DNA; note = Synthetic coding sequence
atggccattcccatcaccgtgttagattgtgatctgttactgtatggccggggacatagaacactagacagattcaaattggacgacgtgacagacgaatacctcatgagcatgtacgggttcccccgccagttcatttattacttggtggaactccttggggctaatttgtcaaggcctactcagcggtctagggcaatttccccagagacccaggtcctagcttag

SEQ ID NO: 17639 - DNA, 2754 bp, synthetic construct
  source 1..2754: mol_type = other DNA; note = Synthetic coding sequence
atggacggcgccgctggcccaggcgacgggccagctagagaagccctgcagagtctatctcagcgtttgcgtgtgcaggaacaggagatggagctagtgaaggcagccctggccgaggctctacgcctccttcgcctgcaggtgccacctagtagtctacaaggcagcggcacacctgccccgcctggagattctcttgccgcgccccccggcctgccccccacttgtacacccagcctggtgtccagaggtacacagacagagaccgaagtcgagttgaagtcatcacctggacccccgggactcagcaatgggcctcctgctccacagggcgcatccgaggagccttcaggcacccagtcagagggaggcgggtccagctcttctggagcaggatctcctggcccccctggtatcctgcggcctctgcaacctccgcaacgtgccgacacaccccggagaaactccagctcgagcagtagcccgtcagagagaccacgccaaaagctcagtagaaaagcaatcagctccgctaatctgctggtgagaagcggctcaaccgaaagccgtggtggtaaagatcctctttcttccccggggggacctggatccagaagatcaaattacaacctggaagggatctcagtcaaaatgtttctccgcggacgcccaattaccatgtacatcccttctggaattaggagcttggaagagctcccttcagggccgcccccggagaccttatccctcgactgggtctacggctaccgaggaagggattctaggagcaacttgttcgtcctgcggtcgggcgaggttgtctacttcatcgcctgtgtggtggttctttaccggcccggaggaggcccagggggtccggggggcgggggacagagacactatcggggccacactgactgcgttagatgcctagctgttcatccggatggcgtacgggtggcatccggccagactgccggcgtggataaagacggtaaacctctgcagcccgtagtgcatatttgggattcagaaactttattaaagctccaagagatcgggctcggagcgttcgaaagaggagttggcgctctggctttcagcgcggccgaccagggggctttcctctgtgtcgttgatgactctaacgagcacatgttgagcgtatgggactgctcccgtggcatgaagttagcagagattaagtccactaacgattcagtgctggcagtgggcttcaatcccagagacagctcctgcatcgttacgtctgggaaaagccatgttcacttttggaattggagcggtggcgtaggggtgccaggaaacggcaccctcacaagaaagcagggggtgttcggaaaatataagaaacccaagtttatcccctgctttgtttttctgcccgacggtgacattctcacaggggatagtgagggcaacatcttaacctggggacgatctccttcagattctaaaacaccgggacgcggcggcgcgaaggaaacctacggaattgttgcacaagcccatgctcatgagggctccatctttgcactttgcctgagacgcgacggcactgtgctttctggaggcgggcgagatagacgtctagtccaatggggccccggactcgtcgccctgcaggaagcagagatccctgagcatttcggcgcggttcgcgccatagctgagggtttaggcagcgagctgttggttggtaccacgaagaacgcactgctgaggggcgacttggcacaggggttctctcccgtcatacagggccatacagacgagctgtggggcctgtgtacgcaccctagccagaataggtttctgacctgtggacacgatcgccaactttgcctctgggacggcgaatcccacgcactggcctggtctattgacctgaaagaaacaggtctctgtgcggactttcacccgtcgggagcagtggtcgctgttgggttgaatactggacgctggcttgttctggacaccgagacgcgggagatcgtctctgacgtgattgatggaaatgagcagctgagcgtggtgcgatatagccccgacgggctttacctagcaatcggctcccacgataacgtgatctatatttatagcgtctcctccgatggagcgaaaagttcccgctttggtagatgcatggggcacagcagttttataacacatttggattggtccaaggacggtaacttcattatgagtaatagcggggactacgaaatcctgtactgggatgtggcaggcggatgcaagcagctcaagaacaggtatgaatccagggatcgtgagtgggcgacatatacatgcgtgctcggattccacgtttacgtacccgtacgctcttgccagggagcagaaccacacgtgagaggcccaagacagccccgggatcagaggcctatccatgcacgaagacttgctccacgcctcgctggtcggcagggccggcagcatctccccgtggccagtgccggccggtggggacggggagccggagccagacatgcactgagcaaccctcttcccgtgccccggctgctgcccaggcgcctgattgccgcctggcgagatcggctcgcaaggcgcaggggaccagcaccaccctgcccttccctggcccagtcgcctacaactagaggtcggctgtttcctgggctgacctcaaggcactcccgaagccgcatctttctagagggagcaaatggggcgcctgcccacaccgtatag

SEQ ID NO: 17640 - DNA, 321 bp, synthetic construct
  source 1..321: mol_type = other DNA; note = Synthetic coding sequence
atggtcgctatggctgaggccgaggccggcgtagctgtcgaggtcagaggcctgcctcctgcagtacccgacgaacttctaaccttatatttcgaaaatcggaggcggagcggcggaggtccagtgctctcctggcaacggctaggatgtggtggagtgctaaccttccgtgagcctgcggacgccgaaagggtactggcgcaggcagatcacgaacttcatggagcacagctctccctccgcccggcgcctcctcgcgcccccgcccgtctactactgcagggtcttccaccaggcactactcctcaacggcttgagtag

SEQ ID NO: 17641 - DNA, 228 bp, synthetic construct
  source 1..228: mol_type = other DNA; note = Synthetic coding sequence
atgttttggaagttcgatttgcattccagtagtcatatcgacactctgctggagcgcgaggatgtgacactgaaggagttgatggacgaggaggatgtgctacaagagtgcaaagcccaaaatcgcaagttaattgaattcctactaaaggctgagtgtctggaagatcttgtgagcttcatcatcgaggagcctccccaagacatggacgaaaaaattcggtattag

SEQ ID NO: 17642 - DNA, 1275 bp, synthetic construct
  source 1..1275: mol_type = other DNA; note = Synthetic coding sequence
atggaccagcctagcggccgtagcttcatgcaagtgttgtgcgagaaatacagccctgaaaactttccatataggcgaggaccaggaatgggagtgcatgtgccagccacccctcaaggatctcctatgaaagatcgcctaaatctgcctagtgtccttgtgctgaatagctgcggcattacctgcgctggggacgagaaggagatcgcagccttttgtgctcatgtgtcagagctagatctgtccgacaataagctggaggattggcacgaagttagtaaaatagtgtctaacgtgccgcagctggagttcctgaatctctccagcaatccacttaacctgagtgtgttggaacggacgtgcgccggaagtttctctggtgtgcggaagcttgttttgaacaactccaaggcctcatgggaaaccgtgcatatgatcttacaggagctccccgacctcgaagaactttttctctgcctgaacgactacgagaccgtgagctgcccctccatctgttgtcactctcttaagctgctgcatatcaccgacaacaatctgcaagattggaccgaaattcggaaattgggcgtgatgttccccagtctcgataccctcgtgctagctaacaaccacctaaacgccatcgaggaaccagatgactctcttgccagactctttccaaatctgcgatccattagtctgcataaaagcggtctacagtcatgggaagatattgacaaactcaattcattccctaaactggaagaggtaaggcttctcggtatccctctgctgcagccttacacaacagaggaacggcgcaagctggtgattgcaagactccccagcgtgagcaaactgaacggcagtgtcgtcactgacggggagcgtgaagatagcgaacgctttttcatcagatattatgtagatgtaccccaggaggaggtccccttccgctaccatgagctgataacaaagtacggaaagttggagcctctggctgaggtggacctgcggccacagtctagcgctaaagtggaggttcatttcaatgaccaggtggaagaaatgtctattaggttagaccaaaccgtagccgagctgaagaaacagcttaagactttggtgcagctgccaacttcgaacatgcttctgtattatttcgatcatgaggctccatttggtcccgaggagatgaaatattcttccagagccctgcactcatttggaattcgagacggcgacaagatctacgttgaaagtaagactaagtag

SEQ ID NO: 17643 - DNA, 288 bp, synthetic construct
  source 1..288: mol_type = other DNA; note = Synthetic coding sequence
atggaagctgccgatgctagtcggagtaacggatcctctccagaagccagggacgctagaagcccttcaggccccagcgggagtttagagaatggaaccaaagccgacggaaaagatgcgaaaacaacaaacggccatggaggcgaagccgccgaaggaaagagcttaggatccgccctcaagcctggagagggaaggagcgctctttttgccggaaacgagtggcggcggcccatcattcagtttgtagaatctggcgatgacaagaacagcaactattttagttag

SEQ ID NO: 17644 - DNA, 3144 bp, synthetic construct
  source 1..3144: mol_type = other DNA; note = Synthetic coding sequence
atggctcccaggcttcagctagaaaaggcagcctggaggtgggcagaaaccgtccggcctgaggaagtgagccaggagcacatcgaaacagcataccggatctggttggagccctgcataaggggggtgtgccgcaggaattgcaaaggcaacccaaactgcctggttgggataggagagcacatatggctgggtgagatcgacgaaaatagcttccacaacattgacgatcccaactgcgagaggcgcaagaaaaactcgttcgtcggcttaacaaacctgggagccacctgctatgtgaatacattcctgcaagtgtggtttctcaacctggaattgagacaagcattgtacctctgtcctagtacctgttccgattatatgcttggggacggaattcaggaggagaaagattacgaaccgcagacgatctgtgaacacctgcagtatctcttcgctctgctgcaaaattctaatcgcagatacatcgatccatcaggatttgttaaggccctgggcttggacacagggcagcaacaggatgcacaggagttcagcaagttgtttatgtccttgctagaagacacactctcgaaacagaagaaccctgatgtccgcaacattgttcagcagcagttttgtggcgaatatgcttatgtaaccgtatgcaatcaatgcgggcgcgaatctaaattacttagtaagttctatgagctcgagctgaacatacaagggcacaaacagctgaccgactgcatcagcgaattcctgaaagaagaaaaactcgaaggcgacaatcgctatttctgtgagaattgtcagtccaaacaaaacgcgactcgtaagatccgtctgctttctctaccttgcaccttaaacttgcagctgatgaggtttgtgttcgacagacagaccgggcacaaaaagaagcttaacacatatataggcttctctgagatcctggacatggagccttatgtcgaacacaagggcgggtcttatgtgtatgagctctctgccgttctcatacaccggggcgtgtccgcttattctggccattatatcgcccatgtaaaagatccacagtccggggaatggtacaagtttaatgatgaggatatcgaaaaaatggagggaaagaaactgcaactaggcattgaagaggacctcgagccatctaagagccagacccgcaagccaaagtgcggtaaagggacacactgttcccgcaatgcctatatgctcgtgtatcggcttcaaacccaggagaagcctaacacaaccgtgcaggttcccgccttcttacaggagttggtggatcgagataactctaaatttgaagagtggtgtatagagatggcagagatgcgcaaacagagtgtggacaagggaaaagccaaacacgaggaggtgaaggaactttatcaacgtctgcctgccggcgctgaaccttatgagttcgtgagcctggagtggctccagaaatggctggacgaatccacacctaccaaacctatcgataaccatgcatgcctgtgctcgcacgataagctccaccccgataagattagtataatgaagagaatctctgaatacgcagctgatattttctacagccgatacggtggaggcccccggctgacggtcaaggccctgtgcaaagagtgcgtcgttgagcggtgtcgcattctgcggctcaagaatcagctgaacgaggactataaaaccgtgaacaacctgcttaaggccgctgtgaagggatctgacgggttctgggtcggcaaatcgtcactcagaagctggcggcagctggctctggagcagctggatgagcaagacggcgacgctgaacagtcgaacggcaaaatgaacgggtcaacactgaataaagacgaaagtaaggaggaaaggaaggaggaggaagaattgaactttaacgaggatatcctttgcccacacgccgtgttcttcttttctaaatacattttcttgaattcaggagagctgtgtatctccgagaacgagaggcggctcgtgagcaaggaggcttggtctaagctgcagcaatattttcctaaagctcccgagttcccaagttacaaggagtgttgctctcagtgcaaaattcttgagagagaaggagaagaaaacgaggccctccataaaatgatcgctaacgagcagaaaaccagcctgcccaacctgttccaggataagaaccgaccctgtctttctaattggccggaggacactgatgttctgtacatcgtgagccaattctttgttgaagaatggagaaagttcgtaaggaagccgacacggtgcagcccggtcagctcagtgggaaactccgcgctcctctgcccccacggcggactgatgttcacttttgcttccatgaccaaagaggactccaagcttatagccctgatatggcctagtgaatggcagatgatccagaagcttttcgtcgtcgatcacgtaattaaaataacacggatcgaagtgggcgacgtgaaccctagcgagacccagtatatatcggagcccaaattatgcccggaatgcagagaggggctgctgtgccaacaacagcgagacctgcgcgagtatacgcaggcaacaatctatgttcacaaggtggtggataacaagaaggtaatgaaagacagcgccccagagctgaacgtttcaagttcagagaccgaggaggacaaagaggaggcgaagcccgacggagagaaagatcctgacttcaaccagtcaaacggcggcacgaagagacagaaaatcagccaccaaaattatatcgcctaccagaaacaggtaatccgcagatcaatgagacacagaaaagtaaggggtgagaaagcattgctggtatccgccaatcagacattaaaggaattgaagattcagatcatgcatgccttttccgtcgccccttttgaccagaatctgtctatcgatgggaaaatcctgagtgatgattgcgctactctagggacacttggagttattccagagtctgtgattctgttaaaagccgatgagcctattgccgattacgctgccatggacgacgttatgcaggtgtgcatgccagaggaggggtttaaggggacaggtctgcttgggcattag

SEQ ID NO: 17645 - DNA, 1443 bp, synthetic construct
  source 1..1443: mol_type = other DNA; note = Synthetic coding sequence
atggagacagacctcaactcacaagaccgcaaagatctggacaaattcattaaatttttcgcactcaaaactgttcaggtcattgtgcaggcccggctgggcgagaagatatgtacgagatcctctagttcccctactggcagtgactggttcaacctggccatcaaagacattccagaggtaactcacgaagccaaaaaggctctagcaggacagttacctgccgtcgggcgatccatgtgcgtcgaaattagcctgaaaacctctgaaggggacagtatggagttggagatctggtgtctcgaaatgaacgaaaagtgtgataaggagattaaggtcagttataccgtctataatcgcctctccttactccttaagtcactcctggccattacaagagtcacgcctgcgtatcgtctctcccgcaagcagggccatgagtacgtgatcctatatcgtatatacttcggggaggtacagctcagtggtctaggcgaggggttccagactgtgcgggtcgggactgtgggaacgccagtgggcactatcactctcagctgcgcctatcgcatcaacctggccttcatgtccacccggcagttcgagcgtacgccacctatcatgggtataataatagaccactttgttgacagaccgtatccctcgtctagcccgatgcacccttgtaactacagaaccgcgggggaggatacaggcgtgatttacccgtccgtggaagacagccaggaagtgtgtaccacgtccttctccacgtcccctccaagccaattgatggtgcctggaaaagaggggggcgtcccattagctcccaaccagccagtgcatggcacgcaagctgatcaggaaaggctggctacttgcactccgagcgacagaacccactgtgccgcaacaccctctagctctgaggacaccgaaaccgtcagtaacagtagcgaggggcgagcctcacctcacgacgttctcgagaccatcttcgttcgcaaggtgggcgcgtttgtgaacaagcccattaatcaggtgaccctaacgagcttggacatcccatttgcgatgtttgctcccaagaatctcgagctggaggatactgaccccatggttaacccacccgatagcccagagacagagtctcccctccaaggttcactgcactctgatggcagctctggcggcagcagcggcaatacccacgatgacttcgttatgatcgactttaaaccagcattcagtaaagatgacattctcccgatggatttaggcacattttaccgcgagttccagaatccgcctcagctctcttcccttagcatcgacatcggtgcacaatcaatggctgaagacttagactctctaccagagaagctggccgtacacgagaaaaatgtcagagagttcgacgcctttgtggaaactttacagtag

SEQ ID NO: 17646 - DNA, 2376 bp, synthetic construct
  source 1..2376: mol_type = other DNA; note = Synthetic coding sequence
atgttctggaagtttgatttacacagttcgtcccacatagataccctgcttgagagagaggacgtgactctgaaagagctgatggacgaggaggacgtgctgcaggaatgcaaggctcagaataggaaactgatagagttcctgctcaaggccgagtgtctggaggacctggtgagtttcatcatcgaggagccacctcaggatatggatgagaaaattagatacaagtatcctaatatttcatgcgagctcctgacctctgacgtgtcacagatgaatgatcggctgggggaagacgagagcctcctgatgaagctttattccttcttgctcaatgatagtccgcttaaccctctgctggcctcatttttctccaaggtgctcagtattctgatctcccgaaagcccgaacaaattgtagacttcttaaaaaaaaagcacgattttgttgatctcattatcaagcatattgggacaagcgctattatggatcttctgctgcgcctactgacgtgtattgagcctcctcagcctagacaggatgttttaaactggctaaacgaggagaagattatacagagattagtggagatagttcacccatctcaggaggaggaccgccacagtaacgcgtcgcagtccctatgtgagattgtcagactctctagagaccaaatgctccaaatccagaatagcacagagcccgatcccctgctagccactctcgaaaaacaggagataatagaacaattattaagcaatatattccacaaggagaaaaatgagagcgctattgtgtcagccatccagatcttactcacattactggaaaccagacgccctacatttgaaggccacattgagatctgtccccccgggatgagccacagtgcatgttctgttaacaaatcggtcctggaggcaattaggggccgattgggcagtttccacgagctgctactggagccgcctaagaatatgttcttcaaatatacttggaataacttcctccatacccaggtggagatttgcatcgccctgattttagcctcccccttcgaaaatactgagaatgcaacaattacagatcaggactccactggtgacaatcttctgttaaaacacctgttccagaaatgtcagctcattgaacgcatcttggaggcgtgggagatgaatgagaaaaagcaagctgaaggtgggcgccggcacgggtatatgggccatctgacccgaattgccaattgcatcgtacacagcaccgataaaggacctaacagcgccctggtgcagcaactgatcaaggatctgccagacgaggtgagggagcgttgggagaccttctgcacatcttctctgggggagactaataagagaaacactgtggacttggccttctccgattaccagatgcagcagatgaccagcaattttatagaccagttcggtttcaacgacgaaaagttcgcagaccaggacgatattgggaatgtctctttcgaccgggtttccgatatcaatttcactttgaatactaacgagtcagggaatatcgccctgtttgaggcctgctgcaaggaacgaatccagcaatttgacgacggaggtagtgacgaggaggatatttgggaagagaagcacatcgcattcactcctgaatcccagcgaaggagttccagcggctcgaccgactctgaagagagcacggactctgaggaagaggacggtgccaagcaggatctctttgaaccttcgtcggctaacaccgaagacaaaatggaggtggatctgtccgaaccgccaaattggagcgctaacttcgatgttccaatggagaccactcatggcgcccccctggacagcgtgggaagtgatgtttggagcacggaagaacccatgcccaccaaggaaacaggctgggcctcttttagtgaatttacttcctccttgtctactaaagacagcctgcggtcaaactcacctgttgagatggaaacctccactgagccaatggatcctctgactccatcagctgccgcgctggcagtgcaaccagaagccgccggcagcgtggcgatggaagcttcctctgacggcgaggaggatgcggagtcgacagacaaggtcaccgaaactgtcatgaacggggggatgaaagagactctcagtctcaccgttgacgccaagacggagacagccgtgttcaaaagcgaggagggcaaactcagcacatctcaggatgccgcttgcaaggacgccgaggagtgtcctgaaacagcagaagctaaatgtgccgctccacgtccacctagctcctccccggaacagtccggggtcgaaatcccagctttacccggccagtggtctcagcagtag

SEQ ID NO: 17647 - DNA, 1500 bp, synthetic construct
  source 1..1500: mol_type = other DNA; note = Synthetic coding sequence
atgtttggagacgcttccacaagtcttgtggtgcccgagaaggtgaaaacacccatgaagtcctcaaaaacggatctccaagggagtgccagcccgagcaaagttgaaggcgtccatacaccacggcaaaaacgctccacccctctgaaagagcggcagcttagtaagcctctcagcgaaaggacaaattcaagtgattctgaacgttcaccagatcttggtcattcaacccagataccccgcaaggtagtgtatgatcaactgaatcagattctggtctccgacgcagccttacccgaaaatgtcattctagttaatactacggattggcaaggacagtacgtggcagagttgctacaagatcaacgtaagcccgtggtttgcacttgtagcaccgtggaggtacaggcggtcctcagcgccctcttgacacgcattcagcggtactgcaactgtaatagcagtatgccccgaccagtgaaagtagcagctgtgggcggtcagagctacctctcttctatactccgattctttgttaaatcactggccaacaaaacgagcgactggctgggctatatgaggttcctgattattcccctggggagccatcccgtcgctaagtacctggggtccgtggatagtaaatacagcagctcattcttagattccgggtggcgcgatcttttctcgcgttctgagcctccagtgtccgaacaactagatgtcgctgggagggtcatgcaatacgttaatggagccgctactacacaccaactgcctgtggccgaagccatgcttacctgcagacataaattcccggatgaagacagttaccagaaattcattccttttataggcgtggtgaaagtgggcctggtggaggatagtccgtcaaccgctggcgatggcgatgactctcccgtggtcagcctgacggtacctagtacaagcccgccctcaagctccggtctgtcccgagacgccaccgctactccccccagttcgccaagtatgtcctctgccctcgcaatcgtcgggagccccaacagtccctatggcgacgtgattggtctgcaagtggattactggctgggacatccaggagagcggagacgtgaaggcgacaagcgggatgcctcctctaagaacaccttaaagagcgtgtttcggagtgttcaagtgtctaggctgccgcattccggcgaggcgcagttgagtgggactatggctatgaccgtcgttacgaaagaaaagaacaaaaaggtgcccactatatttctgagtaagaagcctcgagaaaaggaggtcgattctaaatcccaagttattgaagggatttctagacttatctgctcagcaaagcaacagcagaccatgttgcgcgtctccattgacggcgtggaatggagtgacataaaatttttccagctggccgcacaatggcctactcacgtgaaacatttccctgtcgggctgttctctggctcaaaggcaacgtag

SEQ ID NO: 17648 - DNA, 435 bp, synthetic construct
  source 1..435: mol_type = other DNA; note = Synthetic coding sequence
atggtcgctatggccgaagccgaggccggagtggccgtcgaggtgagaggcctccctccagccgtcccagacgagttgctgaccctgtatttcgaaaataggaggcggtccggcggtggccccgtgctctcttggcagagactcggatgtggcggagtgctgaccttcagagaacccgccgatgctgagagggttttggcccaggctgatcacgagctgcacggggcccagctaagcctgcgtcctgcacccccccgcgctcccgctagactgctcctccagggcctaccccctggcactacgcctcaaaggttagaacagcatgtacaggcgctgctacgggcctccggtctaccggtgcaaccttgctgtgcattagcatctcctcggcctgaccgggccctggtgcaactccctaagcccctctctgagtag

SEQ ID NO: 17649 - DNA, 513 bp, synthetic construct
  source 1..513: mol_type = other DNA; note = Synthetic coding sequence
atggcctccgaagccgaaaaaacctttcatcgttttgctgcgttcggggagtcgtctagcagcggcactgaaatgaataacaagaacttctccaaactgtgtaaagactgtggaatcatggacggcaagactgtgacatctacagacgtggacattgttttttcgaaggtgaaggctaaaaacgcccggactattacatttcagcagtttaaggaggcagtgaaggaacttggtcagaaacgatttaaaggaaaatcacccgacgaggtcctggaaaatatttacgggctgatggaaggaaaagatcccgccactaccggcgctacaaaagctaccaccgtgggagctgtggataggctgacagatactagcaaatacacggggacccataaggaaagatttgacgagagcggcaagggtaagggaattgcgggtcgggaagagatgacagataacaccggatacgtatcgggctataagggaagcggcacctatgacaagaagacaaaatag

SEQ ID NO: 17650 - DNA, 270 bp, synthetic construct
  source 1..270: mol_type = other DNA; note = Synthetic coding sequence
atggtcgccatggccgaggctgaggctggggtggctgtcgaggtcagaggactccctcccgccgtacctgacgagttattgaccttatacttcgaaaataggcgccggagcgggggggggccagtacttagctggcaacgactcggatgcggaggtgtactgacttttcgcgaaccagccgatgcagagcgagtcctagcacaggcagatcacgaattacacggggcccagctttctctgaggccagcaccccctagagccccagcgtag

SEQ ID NO: 17651 - DNA, 1206 bp, synthetic construct
  source 1..1206: mol_type = other DNA; note = Synthetic coding sequence
atgtgcgtggaaatcagcctcaagactagcgagggtgactctatggaactggagatttggtgtctcgagatgaacgagaaatgtgataaggaaatcaaggtcagctatacggtgtataaccgtctgagtctcctgctgaagagccttcttgccatcaccagagtcactcccgcttaccgtttgtcccggaagcagggacacgagtacgtgatcttgtacaggatctattttggggaggttcagctgtccggtctgggagagggctttcagactgtcagggtggggaccgttggaacaccagttgggacgataactttgagttgcgcctatcgaatcaacctcgcttttatgtctacaaggcagtttgaacggacaccccctattatgggcataataattgaccattttgtagatcgcccttatcccagctcaagcccgatgcacccttgtaactatcggacagccggtgaggacacgggagtcatttatccctctgtagaggacagccaagaggtctgtactactagcttcagtacaagcccaccatcacaactgatggttcccggtaaagagggaggcgtgccccttgctcctaatcagcccgtccatggtactcaggccgaccaggagcgactggccacctgtaccccgtccgacagaacccactgtgcggcgacacccagcagctcagaggacacagaaactgtgtccaactcaagcgaagggcgcgccagtcctcacgatgtcttagaaacaatctttgtccggaaagtcggagccttcgttaacaagcccatcaaccaggtaaccctgacttccctggatataccctttgccatgtttgctccaaaaaacctggagctggaggatactgatccaatggtgaacccgccagacagtcccgaaacagagagtccgctgcaaggaagccttcattcggatggctcttcgggcggatcgagtggaaacacacacgacgacttcgtgatgatagatttcaagcccgccttctcaaaggatgatatactgccaatggatcttggcactttttaccgggaatttcaaaacccaccacagctctcctccttgtcaatcgatatcggcgcccagtccatggctgaagacctcgactctctccccgagaagctggccgttcacgagaaaaatgtgagagaattcgacgcctttgtggaaaccctgcaatag

SEQ ID NO: 17652 - DNA, 2148 bp, synthetic construct
  source 1..2148: mol_type = other DNA; note = Synthetic coding sequence
atgagtcaatcaggcgccgttagctgttgccctggggcaaccaatggctctctgggtcggagcgatggcgtggcaaagatgtcccccaaagacctgtttgagcagagaaaaaaatattctaactctaatgtcataatgcacgaaacgagccagtaccacgtgcagcacctcgccaccttcattatggacaagtccgaggctattacctcagtcgacgacgctattagaaagttggttcagttgtcaagcaaggaaaaaatctggacgcaagaaatgctcctccaagtgaacgatcagtctctgcgtctgttagatattgaatctcaggaagaacttgaggatttccctctgccaacggtgcagcgcagccaaaccgttctgaatcagctaagatatccaagtgtcctgctgctggtgtgccaggattccgagcaaagcaagccagatgtgcacttcttccactgcgatgaggtcgaggcggaacttgtgcacgaggacattgaatcagctctggccgactgtagacttggaaaaaaaatgcggccgcagactctgaaaggacatcaggagaagatccgacagaggcagagcatcttgccaccgcctcagggtccagctccaatcccattccagcatcgcgggggagactctccagaggctaaaaacagggttggtccccaggtgccactgtcagagcccgggtttaggcgccgcgagagccaggaagaacccagagccgtccttgcacaaaaaatcgaaaaagagacccaaattctcaactgcgcactggatgacatagagtggttcgttgcacggctccaaaaggctgcggaggcgttcaagcagctcaaccagcggaagaaaggcaagaaaaaaggcaaaaaagctccagccgagggggtattaaccctgagagctcggcccccatcggaaggagagttcatcgattgcttccagaagataaaattagccatcaatctcttggcaaagttgcagaaacacatccagaacccctccgccgcagaactggtacattttctatttggccccctggatctgatcgtcaatacctgtagtgggccggacatcgctagatcagtctcctgccctctgctcagtagagatgccgtggactttcttcggggccacttggtcccaaaagagatgtccctgtgggagtctttgggcgaaagttggatgcgccccagatccgaatggcctagggagccccaggtgccgctgtacgtgcctaagtttcattctggctgggagcccccggtcgatgttctgcaagaggccccatgggaggttgagggactggcttcagctcccattgaagaagtgagccctgtaagtaggcagtctataaggaactcccagaaacacagcccaacttcagagcctaccccacccggagatgccctgccccccgtatcctctccacacacccatcggggttatcagcctaccccagctatggcgaaatacgttaaaatcttatatgactttaccgcaagaaacgctaatgagctctcagtgctgaaggacgaggtcctggaagtgctggaggatggcaggcagtggtggaagctaagatctcgctccggccaggctggatatgtgccctgcaatattctgggagaagcccgaccagaagatgcaggggccccttttgaacaggccggtcagaagtactggggaccagccagccccacgcacaagctcccaccctcttttcccgggaataaggatgaactgatgcagcacatggatgaagttaatgatgagctcattcgcaaaatcagtaatattagggcacagcctcagcgtcattttcgcgtggagcgaagccagcctgtcagtcagcctcttacttacgaatcaggccctgatgaggtccgcgcgtggctggaggccaaggctttttccccccgcatagtggaaaatttagggatcctcactggtccgcagctctttagtctgaacaaagaagaactcaaaaaggtttgtggggaggaaggcgtgagagtgtactcccagctaactatgcagaaggcgtttttggaaaaacagcaaagtggtagtgagctcgaggaacttatgaataaatttcactcaatgaatcaaaggagaggagaggattcgtag

SEQ ID NO: 17653 - DNA, 336 bp, synthetic construct
  source 1..336: mol_type = other DNA; note = Synthetic coding sequence
atgaccggctccaacagccacattaccattttaaccctaaaggtattgccacatttcgagtccctcggtaagcaggagaagatccccaataagatgtcagcctttcgaaatcactgccctcatctggactccgtgggtgaaatcacaaaagaagatttaatccaaaagtctctggggacgtgccaggactgtaaggtgcagggccccaatctctgggcctgtctggagaacagatgcagctacgtgggctgcggcgagtcacaggtggatcattccaccattcattctcaggagacaaaacactacctcacggtgaatctgaccaccctgagatag

SEQ ID NO: 17654 - DNA, 228 bp, synthetic construct
  source 1..228: mol_type = other DNA; note = Synthetic coding sequence
atggctgggcaagaggaccctgtgcagagagaaattcatcaggactgggcaaacagagagtatatagaaattatcaccagttccatcaagaagattgctgactttttgaatagctttgacatgtcctgcagatcacgtttggctactctgaacgaaaaactaacagccctcgagagaagaatagagtatatcgaagcgcgggtgacaaaaggagaaacgctcacttag

SEQ ID NO: 17655 - DNA, 348 bp, synthetic construct
  source 1..348: mol_type = other DNA; note = Synthetic coding sequence
atgcggtacgttgcttcatacctactggccgccctgggcggcaactccagtccctctgcaaaagatatcaagaagattctcgacagcgtgggcatcgaggcggacgatgaccgcctcaacaaggtgatatccgagttgaacggaaaaaacatcgaagatgtcatagcgcaaggcatagggaagctcgccagcgtacctgcggggggcgctgtggccgtgagcgcagctcctggttccgctgcacctgccgcgggatccgcccccgccgcagccgaagagaaaaaagatgagaaaaaggaagaatccgaggaatccgatgacgacatgggctttggtctgtttgactag

SEQ ID NO: 17656 - DNA, 1077 bp, synthetic construct
  source 1..1077: mol_type = other DNA; note = Synthetic coding sequence
atgcctggatgcgaactcccagtgggaacatgcccggatatgtgcccagcagcggagcgagcccaacgggagagggagcacaggttacataggctcgaagtggtccccggctgcaggcaggaccctcccagggccgaccctcagcgcgcagtgaaggagtatagcaggccagccgccgggaagcccagaccaccgccatctcagctgcgaccccccagtgtgttgctggctactgtgagatatctcgccggggaagtggccgagtccgctgacatcgctcgggccgaggtggccagctttgttgctgaccgcctgagggccgtgttgctggaccttgccctccagggggcgggcgacgccgaggcagctgtagtgctggaggctgcccttgccaccctgctgacagtcgttgcaagactcggcccagatgccgcacgcggccctgctgaccccgttctcctgcaagcccaggtgcaggaaggctttggctctctgaggcgatgctatgcccggggggctggcccacatcctaggcagccagcctttcagggtctttttcttctgtataacctgggcagtgtggaggcccttcatgaggtgctgcaacttccggctgcactgcgcgcctgccccccactccggaaggcgttggcggttgacgcggcctttcgggaaggtaatgcggcccggctttttcggctccttcagactcttccctacctcccaagttgtgccgtgcagtgtcatgtgggccatgcccggcgcgaagcgctggctagatttgcccgcgctttctcaacgcccaaaggtcagacgctgccactgggatttatggtgaacctgttggcattggacggcctcagggaggctcgggacctttgtcaggcccacggcctgccgttggatggtgaggagcgggtggtgttcctgagaggaagatatgtggaggagggtctgcctcccgctagtacgtgcaaagtgctggtggagtccaagcttcggggtcgcaccttagaggaagtagtaatggccgaggaagaggacgaaggaactgacagaccaggcagccccgcgtag

SEQ ID NO: 17657 - DNA, 4047 bp, synthetic construct
  source 1..4047: mol_type = other DNA; note = Synthetic coding sequence
atggctgacaccgacctttttatggaatgcgaagaagaagaactggaaccatggcagaagatctcagacgttatcgaggacagcgttgtagaggactataatagcgtcgataaaacgacaactgcaggcaatcccctggtgcagcagggtgggcaacccctaatcctgacccaaaatccggctcccggactcgggacaatggtcactcagccggtccttagaccagtacaggtgatgcagaacgccaatcatgttacctcttcgccggttgccagccagccaattttcataacaacccagggtttccctgtgagaaatgtgcggcctgttcaaaatgctatgaatcaggtcggcatcgtgctcaatgtacagcagggccaaacagtgcgccctatcactcttgtcccagccccaggcacgcagtttgtcaagccaacagtgggtgtgcctcaggtgttctcccagatgaccccagtgcgtcccggctcgaccatgcctgtaagacctaccacgaacaccttcaccacggtgatacccgccaccttgactatccgatccaccgtgcctcagtctcagtctcagcaaaccaagtcgaccccctcgacctctacaacaccaacagcaactcagccaacaagcctgggacagctcgccgtgcagtccccaggccaaagcaaccagactactaatcccaaactggtgtccattgcttctttcgtgactgtaaagcgccccggcgtgactggtgagaactccaatgaggtggccaagctggtgaatacactcaacacaattccttccctgggccagtcaccgggcccagtggtcgtatccaataatagtagcgctcacggtagtcagcggacgagcggtcctgagagcagcatgaaagtgacctcatcgatccccgtttttgatctccaagacggggggcgcaagatatgcccgcgctgtaacgcccagttccgggtaaccgaggctctcagagggcatatgtgttattgctgtcccgaaatggttgagtaccagaagaagggaaagagcctagatagtgaacctagtgtcccttctgctgctaaacctccgagtcctgaaaaaacagcgcctgtcgcgtcaacgcccagcagtacaccaatcccagctttaagcccaccgaccaaagttccagaaccaaatgagaatgtgggagacgccgtacagaccaaacttatcatgctggtcgatgatttctattacggcagagacgggggaaaagttgcacagctcacgaattttcctaaagtcgccacatcctttcggtgcccccactgtaccaaacgcctcaagaacaatattcggttcatgaatcatatgaaacaccacgtggagttagatcaacaaaatggggaagtggacggtcacaccatatgccagcactgctacaggcaattttcaactcccttccagttacagtgtcatctcgagaacgttcactccccatacgaatcaaccactaagtgtaagatttgcgagtgggccttcgagtctgaaccactttttctgcagcatatgaaggacacccacaagccgggggaaatgccatacgtatgccaggtgtgtcagtacaggtcctctctctatagtgaagtcgatgtgcactttagaatgattcatgaagacacacgtcatctgctatgcccttattgcctcaaggtatttaaaaatgggaatgcatttcaacagcactatatgaggcaccagaaaagaaatgtctaccactgcaacaaatgtagattgcaattcctgtttgctaaagataaaatagaacacaaactgcaacaccacaagaccttccgcaagccgaaacaactagaaggcctgaagccaggcaccaaagtgacaattcgcgcatcacgcggccagccccgaaccgttcccgtgagcagcaatgacacccctccgtctgctctgcaggaggccgctcccctgacttccagcatggacccgctcccggtgttcctttatcctcctgtgcaaaggtctatccagaagcgtgccgtgagaaagatgtcagtgatggggagacagacatgcctggaatgcagttttgaaatccctgatttccctaatcatttcccaacctacgttcactgcagcctatgcagatattccacctgttgcagcagagcttacgcaaaccacatgatcaacaaccacgtgccaagaaagtcccctaagtatttggccctgttcaaaaatagcgtgtcgggcataaaactagcttgcacctcctgtacttttgtgacgtccgtgggggacgcaatggcgaagcatttggtttttaatccctctcaccggagtagctccatcttgccccggggattgacatggatcgcccacagccgccacgggcagaccagggatcgcgtgcacgaccggaacgttaagaacatgtacccgccaccttcttttcccaccaacaaggctgccactgtgaagtcagcaggtgctacgccagctgagcccgaggagcttctcacgccgctggctcctgcattacccagccccgcctcaacagccacccccccaccaacacccacccatccccaggctctcgccctgccacccctcgccacagagggtgccgaatgccttaatgtcgatgatcaggacgagggatctccagtaacccaagaaccagaacttgcatctggggggggtggctccggaggggtagggaagaaggagcagctgagcgtgaagaagcttagggtggtcctgttcgctctttgttgcaataccgagcaggccgcagagcatttcagaaatccccagagacgtatcagacgctggttaaggagattccaggcatcccagggggaaaatctggaaggtaaatatctctccttcgaggcagaagagaagttggcagaatgggtgctgacgcagagggagcagcaattgcccgtgaacgaggaaacactgtttcagaaagccactaagattggaaggtcactcgagggaggctttaagatcagctacgaatgggccgtgcgatttatgctgagacaccatctcacccctcacgccagaagggcagtagcccacacgcttcctaaagatgtagcagagaacgctggtctctttattgacttcgtgcaaaggcagatccataatcaagatctgcccctgtctatgattgtcgctattgacgagatcagtctgttcctggatactgaagtgttgagttccgatgaccgaaaggagaatgcactgcagaccgtcgggactggcgagccctggtgcgacgtggtgctggccattctcgcggacgggactgtgcttcccacactggtgttttaccggggtcaaatggaccagccagctaacatgcctgactcgattctgcttgaagcgaaagagagcgggtattctgacgatgagattatggaactttggtcaacgcgggtttggcagaagcacactgcatgccagcggagtaaaggcatgcttgtcatggattgtcaccggacacacctcagtgaggaggtgctggcaatgctatcagcaagctccacactgcctgcggtggttcctgccggctgttctagcaaaatacaacctcttgacgtgtgtatcaaacggactgtgaaaaatttcttacacaaaaaatggaaggagcaggccagggaaatggccgataccgcgtgtgactctgatgtcctgctgcagttagttctagtctggcttggagaagtcctaggagtgatcggggactgcccagaactcgtccagagaagcttcctcgtcgccagtgtgctgcccggccccgacggaaacatcaactcccctacaagaaacgccgacatgcaggaagagctcatagccagtctggaagagcagctgaaactttctggggagcattccgagtccagcacacctcggccgaggtcctctccagaagagacaatcgagcccgaaagtctccaccaactctttgagggggagagtgagacagaatccttctacggtttcgaagaggccgatttggatctcatggaaatttag

SEQ ID NO: 17658 - DNA, 561 bp, synthetic construct
  source 1..561: mol_type = other DNA; note = Synthetic coding sequence
atgttttggaaattcgatctacattcctctagccacattgacaccctgctcgagcgggaagacgtcacattgaaggagcttatggatgaggaagacgtactgcaggaatgcaaggcacagaatcgaaagctgattgaattcctgttgaaggcagaatgcttagaagatctagtctcttttatcatagaggagccccctcaggacatggatgagaaaatacggtataaataccctaatatttcttgcgagcttctcacgtcggacgtctcgcaaatgaacgacagactgggcgaagatgagtccctgctgatgaagctctattcattcttgctgaatgactctccgctgaatcccctgctggccagcttcttttccaaagtgctctctatcctgatttcccggaaaccagagcagattgtggacttcttgaagaagaaacacgactttgtggacctgatcattaagcacatcgggacaagtgcaatcatggacctcctgctgagactactgacgtgcatcgaaccaccgcagcctcgccaggatgttctgaattggctctag

SEQ ID NO: 17659 - DNA, 288 bp, synthetic construct
  source 1..288: mol_type = other DNA; note = Synthetic coding sequence
atgagtcagtccggggcggtttcttgctgtccaggggcgactaatggcagcctcggaagaagcgatggggtggctaagatgagccccaaagacctgtttgagcagagaaagaagtatagtaactcaaacgtgatcatgcacgagaccagtcaatatcacgtgcaacatctggccacctttatcatggataagagcgaggcaattacatcagtggacgacgctattcggaagctcgttcaactctcgtcgaaggaaaagatctggacacaagaaatgttgctccaatag

SEQ ID NO: 17660 - DNA, 1740 bp, synthetic construct
  source 1..1740: mol_type = other DNA; note = Synthetic coding sequence
atggacgatagcaagcaggagagcactacatctaaagaagaggagacaaacattatctcgtcgatagttccttccacacaggacatttatcagcgtcagaacagttcagacgtgcataaaagtctgctgcccgcagtggatgagacaacctgtggtcatacacacttccaacagatgatcgacaaatatattaatgaggcaaatcttatacccgagaaaacagatctgcaggaacttgagcacatttttcccaatttacaccatcagctgtttaagcctttggagccccatcccgatttcgatctcagcagcagttctagcggtattagtcctgataaccgggatttttaccaacggtccgattcttcgtctgaatcgcactgtgccactggcttgtccaagtccacagtgtattttacagcactgcgccggactagtatgcactcttcgctgaacaccagccccaatcagcaacccgataccaaccttgcacacgtgggcgcacactcgtttgctaccgagaacattatcgggggctcggaacaatgctttgaacagcttcagccagagtatagtagccaggaggagagtcagcacgcggatctgccctcaattttttcgatcgaggcgagggacagctcacagggcatgaagaatcagaactatccgagtgaagagcacaccgagattctacagaacaaaaagaagatcgttcattttcagttaagtatcggaaatctctctagtgtgtattctagttccgacgaggccaatgtgtttgatcagctaaatgtgcagcatagcactccttgcggctccaacagcagtgagtgtagtactaagcatcagctggagtcccgcaaggagagtatgggctttgaggagctgtcaaaacgcggagtggtgaccatgctgcagtcacagggcctgatcgaagacaacaaaaacgagacatgcagggttctcgatattaaccctcaggtggaagaaaccgattctagactttgcgtccgcaccgtggaaatggggacctcaatacaagcgccatattctctgaccactcaaaatgagaaatattttgagaacagcgctgagactgatatccccaaaataacaaagaaactgagtcaactgggagagtctgagttattcgctagcagcggctcgttttcactgcagtcatcaattcccgtttgggagacggaaacaggacatggcatcatggaggagccagaactaacactcattagcacaacagataccagtatagcagagatggatttcgctaacctcactctagaggagaaatcggagaacgaggctaagtgcttttttcaggtgagcgagttcctgccgctggtgtctgccaccgaagctagcgattaccctgccgtcagtgagctcagtatcgaaaagccacgcaccgcctcgacagctgagacaccgcggcgccttaccccagtcccaggctcccttcaggaagccttcatcaaacgaaaaaagagctttatggaacgctctcatcagcgacagaaggagatcaggaacaagattcacgtgtccgagaattcccaaatcaagacagttaaagagaagccctctatctctagctccgtgtccagactgaaaggggtgaataaagtgcgcgcgtcatttccagaagataggaagactacccaggccctgaggcaccagcgcggtttgagactatacaatcagctggcggaagtgaagcaatag

SEQ ID NO: 17661 - DNA, 435 bp, synthetic construct
  source 1..435: mol_type = other DNA; note = Synthetic coding sequence
atggttgcaatggccgaggccgaggcaggtgtcgctgttgaggtaagggggctgccaccagctgtgcccgatgagctgttgaccttatattttgagaaccgtaggagaagcggcgggggccccgtgttgtcttggcaacgtctcggttgtgggggggtacttacattccgggaaccagccgacgctgagagagtgttggcccaagccgaccacgagctccatggcgcccagctaagcctcaggcccgcaccaccgcgtgcacctgcccggctcctccttcaggggcttccgccaggcactacaccccagcgattagagcaacatgtccaggcactcctcagagcttcaggcttacccgtacagccatgctgtgcgctggcgtcaccacgacccgaccgcgcactggtccagctccctaaaccactgtcagaatag

SEQ ID NO: 17662 - DNA, 246 bp, synthetic construct
  source 1..246: mol_type = other DNA; note = Synthetic coding sequence
atggtagccatggccgaggccgaggccggcgtggcagtggaggtgcgaggactgccaccagctgtcccagacgagctcctgacgctctattttgaaaacaggcggagaagcggcggagggcccgtgctaagctggcagcggctgggttgcgggggggtccttacttttcgggagccagctgacgctgagcgagtacttgcccaggctgatcatgaacttcacggagcccaactgagcctgaggtag

SEQ ID NO: 17663 - DNA, 1539 bp, synthetic construct
  source 1..1539: mol_type = other DNA; note = Synthetic coding sequence
atggccgctttcaagttggatttcctaccagagatgatggtcgatcactgctctttaaattcatccccagtgagcaagaagatgaatgggaccctagaccacccagaccagcccgacctcgacgccattaagatgtttgtgggacaagtacctaggacatggagtgagaaggatctgcgagagctgtttgagcagtatggcgcggtgtacgaaatcaatgtactacgggatcgttcccagaatccaccgcagtccaaaggctgctgtttcgtcaccttttacacccgaaaggccgctcttgaagctcaaaacgccttgcacaacatgaaggttctgcccggcatgcatcacccaatccagatgaagcccgcggacagcgagaaaaacaatgtcgaagatcgaaaattgtttataggcatgatcagtaagaagtgtactgagaatgacatccgagtcatgttctcttcatttggccaaattgaagaatgtagaattctgcggggacctgatgggctcagtcggggctgcgcttttgtgacattcactactcgggccatggcccagacggccatcaaagcaatgcaccaagcacagaccatggaagggtgctcatcacccatggtcgtgaaatttgccgatacacagaaggataaggaacaaaagagaatggcccagcagctccagcagcagatgcaacagattagcgctgcctcggtgtgggggaatcttgccgggctgaatacactcggaccgcagtatctggcactgtacctccaactgcttcaacaaacagcctccagtggcaatctcaatactcttagttcgctgcaccccatgggcggtctgaacgctatgcaattacaaaaccttgccgccctggcagcagcagcttccgcagcccagaacactccttctggcactaatgcactgaccacgtcctcatcaccgctctcagtgctgacaagctctgggagtagcccttcttcttcaagttcaaatagcgttaatccgatcgcctcccttggcgctctgcaaaccctcgctggcgccacagccggcttaaatgtgggatcactagcagggatggcagctctgaacggtggcctcggatcctctggtctgtctaatgggaccgggtcgacaatggaggcactcacacaggcttattccggcatccagcaatatgctgctgctgccctgcccacactttataaccagaacctgctgacccaacagagtattggagccgccggatctcagaaggagggcccagaaggagcaaacttgtttatctaccacctgcctcaggagttcggcgatcaggatctgctgcagatgtttatgcctttcggcaacgtcgtcagtgcaaaggtcttcattgataagcagaccaatctgtctaagtgctttgggttcgtctcttatgacaaccccgtgtctgctcaagccgctatacaaagcatgaacggctttcagataggaatgaagagactgaaggtgcaactcaagaggtccaaaaacgatagtaaaccttactag

SEQ ID NO: 17664 - DNA, 1131 bp, synthetic construct
  source 1..1131: mol_type = other DNA; note = Synthetic coding sequence
atgaaggacgtgcccggcttcctccagcagtcccagaactccgggcctgggcagcccgctgtctggcatcgtctcgaggaactgtatacgaagaagctgtggcatcagcttaccttgcaggtgctggacttcgtccaggatccctgcttcgcacaaggagacggcttgattaaattgtatgaaaactttattagcgaattcgagcaccgcgttaatcctctttctcttgtggagataatcctgcacgtggtgagacagatgacagacccaaacgttgccctgacatttctggagaaaacacgcgagaaggtgaagtcgtctgatgaagctgtgatcctctgcaagacggctatcggtgccttgaagttaaacatcggcgacctccaagtaacaaaggagaccatagaggacgtggaagaaatgctcaacaacctgccaggtgtgacttcagtgcatagccggttttatgatctctcatccaaatattatcagactatagggaatcacgcttcatattataaagatgctctgcggttcttgggctgtgttgacatcaaggatctgcctgtaagcgaacaacaggaaagggcattcacgctcggcctggctggcttgcttggtgaaggagtatttaactttggcgagctgcttatgcatccagtgctggaatcactgcgtaataccgaccgccagtggctcattgacacgctgtatgcatttaacagcgggaacgtggaacggttccaaacattgaaaacagcctggggacagcagcccgatcttgccgcaaatgaggcccaactgctccggaagatccagctcttatgtctgatggagatgacattcacccgcccggcaaaccaccgccagctcaccttcgaagaaatcgccaagagtgcaaagatcaccgtgaatgaagtagaactgcttgttatgaaggctctgtcagtggggctggttaaagggagtatcgatgaagtggacaagcgggtccacatgacctgggtgcagcctcgtgtgctcgatctccaacagataaaggggatgaaggaccggctggaattttggtgtacagatgttaaaagtatggagatgcttgtcgagcatcaggcccatgacatcctgacttag

SEQ ID NO: 17665 - DNA, 489 bp, synthetic construct
  source 1..489: mol_type = other DNA; note = Synthetic coding sequence
atgacttcaaagaaacttgtgaactccgtggccggatgcgccgacgatgcgttggcagggttggtggcatgcaacccaaatttgcaactgctgcagggacatagagtggctcttcgctcagacctggattcactcaagggcagagtcgccctgttgtcaggtggcgggtctggccatgaacctgctcacgccggcttcatcgggaagggaatgctgaccggagtgatcgcgggcgcagtctttaccagtcccgctgttgggtccattctggccgcaatacgagcagtcgcacaggctgggacagtagggactctgctgatagtgaagaactacactggcgaccgcctcaattttggcctggcccgtgaacaggctcgggcagagggtataccggtggagatggtggtgatcggcgatgattcagcttttactgtgctgaagaaagccggccgcaggggtctctgcggcactgtcctgattcacaagtag

SEQ ID NO: 17666 - DNA, 7854 bp, synthetic construct
  source 1..7854: mol_type = other DNA; note = Synthetic coding sequence
atgttgaccgactccggaggaggcggcacttcattcgaggaggatctggactccgtggctccacgtagcgctccagccggtgccagcgagccaccccctcctggtggtgtggggctggggatccgaacagtgcggctgtttggcgaggcagggcctgcttccggtgtggggtctagtggaggaggtggaagcggttccgggaccggcggaggagatgcagctcttgactttaagttagcagctgctgttttgagaacaggtggcgggggcggagcttccggctctgatgaggacgaggtatccgaagtcgaatcattcatccttgaccaagaggacttggataatccagttctgaagacgacaagtgaaatcttcctctctagcaccgccgagggtgccgacctacgaaccgttgatcccgaaacacaggcacggttggaggctctgttggaggcagccggcattggtaaattaagcacagcagatgggaaagccttcgccgaccccgaggtgctgcggcggctgacgtcgtcagtaagctgtgccttggacgaagccgctgctgcccttacacggatgaaggcagagaactcccataacgccgggcaggtagatacacgcagcctggctgaagcctgctccgatggcgacgtcaatgccgtccgcaagctgttggatgaaggccggagcgtgaatgaacacactgaggagggtgagtctctgctgtgtctagcctgttctgcgggctactatgaactcgcccaggtgctgcttgctatgcacgccaatgtagaagaccgtgggaataaaggtgatatcaccccgctgatggccgccagttcaggcggttacctggacattgtgaagctcttgctgctccacgatgcggacgtgaactcccagtctgccaccggcaacacagctctgacctatgcctgtgccgggggcttcgtggatatcgtgaaagtactcctgaacgaaggagccaatatcgaagatcataacgagaacggtcacacaccgctgatggaggctgcctcagcgggccacgtcgaggtcgcacgggtgctcctggaccatggggcggggattaacacccactccaatgaatttaaggagtcagccttgaccctcgcctgttataaaggtcatctcgacatggtacgttttctgctggaggcgggtgccgatcaggagcataaaaccgacgagatgcatacggcccttatggaagcatgcatggacggacatgtggaagtagcacgcttactgctcgactctggcgcacaagtgaatatgccggcagacagtttcgagtctccccttacacttgccgcgtgcggaggccatgtggagttggccgcgttgctgatcgagagaggagcgaatcttgaggaagtaaatgacgagggctatacaccattgatggaagccgccagggagggccacgaggaaatggtggccctgctcctggcgcagggcgccaatataaatgctcagacagaagagacccaggagacagctctcaccctggcttgttgcggggggtttagtgaggtggcagacttcctgatcaaagctggagctgacatcgagttggggtgctccacaccattaatggaagcaagccaagagggccatctggaactggtgaaatatcttctggcatccggcgcaaatgtgcacgctacaacagctacgggggacacagccttgacgtatgcgtgcgagaatggccatactgatgtggctgatgttctcctgcaggcgggagctgatttagaacatgaatcagaagggggaagaactccgttgatgaaagccgcgcgggccggtcacctgtgcacagtgcagttcctgataagtaaaggtgctaatgtgaacagagccaccgctaacaacgaccacacagtggtgtcacttgcctgcgcagggggacacttggctgtcgtagagttgcttctggctcacggtgcagaccctacacaccgcctgaaagatggatccactatgttgatcgaggccgcaaaggggggtcatacaaacgtggtgtcgtacctcctagattaccccaataatgttctgtcggtcccaacaactgacgtttctcagctcccccccccatcccaggaccaatcccaggttcctagggtgccaactcatacactggccatggtcgttcctcctcaagagcccgaccggacaagtcaggaaaacagccctgctcttctcggggtccaaaaaggcacctccaagcagaaatccagtagcctacaagtggctgaccaggacctgctgcccagttttcacccataccaaccgctggagtgcattgttgaagagacagaaggcaagctaaatgaactgggacagaggatctctgctatagagaaggctcaattaaagagcctggagcttatccaaggcgaacccctaaataaggataagatcgaggagctgaagaagaatcgcgaagagcaggtacagaaaaaaaaaaagatcctaaaggagctgcagaaagtggagcggcaattgcagatgaagacccaacagcagttcacgaaagagtatctagagactaaaggtcagaaggacacggtttctctgcatcagcaatgttcccaccgcggagtgtttcctgagggggagggagatgggagcctgccagaagaccatttttcagagctgccacaggtcgataccattttatttaaggacaacgatgtggatgacgagcagcagagcccccctagcgctgagcagatcgatttcgtgcccgtgcagcccctatcctccccacagtgcaacttcagctcagatctggggtcaaatggaactaatagcctggagttacagaaagtcagtggaaaccagcagatagttggacagcctcagatcgctataacgggtcacgatcagggcctgctagttcaggagccagacggcctgatggtggctaccccagctcagaccctaaccgacactctggatgacttgatcgccgctgtgagcacgcgggttccaaccggcagcaattcatcatcacagaccacggagtgcttaactccggagagttgcagccaaactaccagtaacgtggcgtctcagtctatgccccccgtctacccttccgtcgatattgacgcccacacggagagtaatcacgatacagccctgactttagcctgcgccggagggcatgaggagttggtgtccgttctcatagccagagacgctaagatcgagcacagggacaagaaaggctttacccctctcattcttgccgctactgctgggcatgtgggtgtcgtagagatactccttgataaggggggggatattgaagctcagtccgagaggaccaaagacacacctctgtctctggcctgttcaggaggaagacaggaagtggtagacttgctgctggcccgaggagctaacaaagagcataggaacgtatctgattatactccattatctctggctgcgtcaggtgggtatgtgaacataattaagattctgttgaacgccggcgctgagatcaattccagaacgggatctaagcttgggattagcccactgatgctggccgcaatgaacggtcatgtgccagccgtcaagctgctcttggatatgggaagcgatattaacgcgcaaatcgagaccaaccgaaacacggcgcttacactggcttgttttcagggacgggcagaagtcgtgagcctcctcctggaccggaaagcgaacgtcgaacaccgcgctaagacgggtctgacccctctgatggaagcagcttcaggaggatacgccgaggtgggccgggtcttactcgacaaaggcgccgatgtgaatgccccaccggtccctagttctcgcgacacggcccttaccatagcggcggataagggtcactacaaattttgtgaacttctgatccatagaggggcacatattgatgtgcgaaacaagaagggcaataccccactctggctggccagcaacggaggccatttcgatgtcgtacagttactggtgcaagctggcgcagatgtcgacgccgctgataaccggaagattacacctctgatgagtgcctttcgaaaaggacacgttaaggttgtgcaatacctggtgaaggaagtcaaccagttcccctctgatattgagtgcatgaggtacatcgccaccatcaccgacaaggagcttttgaagaagtgccatcaatgtgtcgagaccattgtcaaagcaaaagaccagcaggcagccgaggccaataaaaacgcttctattctgctcaaagaactggacctggagaaatcacgtgaagagagccgaaagcaggcactggctgctaagagggagaagaggaaagaaaagcgcaaaaagaaaaaagaagaacagaaaagaaaacaggaagaggatgaggaaaacaaacccaaagagaattctgagctgccggaggacgaggacgaggaagagaacgatgaggatgtagagcaagaagtgccaatagagcctccatctgctacaacaaccaccaccattggtatcagtgcaacttctgcaacctttacaaacgtgttcggaaaaaagagagcaaacgttgtgaccactccttcaaccaaccgaaagaataaaaagaataaaaccaaggaaaccccacctactgcccatttaatccttcctgagcagcatatgagtcttgctcagcagaaggctgacaagaacaaaataaatggagaaccaagaggcgggggtgcaggcggaaattccgacagcgacaatctagattctaccgattgtaattccgagagttcctcaggtggtaaatctcaggaattaaattttgtcatggatgtaaacagctcgaaatatccaagcctgctgcttcattcccaggaggagaagactagcacagcaacctcaaaaacacaaactagacttgagggcgaagtcacgcccaattcgctctctaccagttataaaactgtcagcctgcctctgagttctcctaatattaagcttaacctgacgtctcctaagaggggccagaaacgtgaggaaggatggaaagaagtcgtgagaaggtctaaaaagctctctgtcccagcctccgtggtctcccggatcatggggaggggcggctgtaacatcacagccatccaagatgtgacgggtgcccacattgatgttgacaagcagaaggataaaaatggagaaaggatgatcacgattcgcggaggtacggagtccacaaggtatgcagtacagttaataaatgccttaatacaggacccagctaaagaactggaggacttgatccccaaaaatcatatccggacccccgcctcaacaaagtctatccacgcaaatttttcctccggggtgggcaccacggctgcttcaagcaaaaatgccttccctctcggggcaccaacattggtgacttcccaggcaacaacactgagtacctttcagccagccaacaaacttaacaagaacgttcctacaaacgtccgatcttctttcccggtgtctctcccactggcctacccgcacccccactttgcgcttctcgcagcacagacgatgcagcaaatcagacatcctcggttgccgatggctcagttcggcggaaccttttccccgagcccaaacacctggggcccctttcccgtgaggccggtgaacccagggaataccaatagctctcccaagcacaataatacgagtagactgccgaatcaaaatggtaccgttcttccaagcgaaagcgccggcctagccactgcttcctgtccaattactgtgtctagcgtggtggctgcctctcagcaactatgtgttacgaatacccggaccccttcctctgttaggaagcagctttttgcatgcgttcccaaaacatctccaccagctacggtcatctcttcagtgacttcgacttgctccagtcttccctcagtctcatccgcgcctatcacgtccggacaggctcccactacctttctgccagcctccacgtcccaggctcagttgtcatcccagaaaatggagtctttctcagccgtgccaccaaccaaagagaaggtttccacacaggatcagccaatggccaatttgtgtacgccatcttctacagcaaattcatgctcttcaagcgcgtccaatacacccggcgccccagaaacgcatcccagtagtagtcccacaccgacctcatctaatactcaggaggaggcccaacccagttccgtcagcgacctgtctcctatgtcaatgccctttgcttcaaatagtgagccggcgcctctcacgcttaccagtccacggatggtggccgctgacaatcaggatacctctaatcttcctcaactggctgtaccagccccacgggtgagtcacaggatgcagcctagagggtcattctattcaatggtgccaaatgccactattcaccaggatccccagagcatatttgtcaccaatccagtgacactcaccccacctcagggtcctcctgccgcagtgcaattaagttccgcagtgaatataatgaacggttcgcaaatgcatatcaaccctgcaaataaatctctcccccccacattcggccctgcgacactttttaaccacttctcctctctattcgattccagtcaggtcccagcgaatcaggggtggggggatgggcccctgtcttcccgggtcgctacagatgcgagtttcaccgttcaatcagcctttctcggaaattctgtcctgggccacctcgagaatatgcatcccgacaatagcaaggccccgggcttcaggcctccctctcagcgcgtctcaacatctcccgttggcctcccctcgatcgacccttctggctcctctccttcgagttccagtgctccactagcctctttctcaggtatcccgggcaccagggtgttccttcagggccccgctccagtcggcacaccttcttttaaccgtcaacatttttccccccatccttggactagcgcttcgaactcttccactagcgctcccccaactttaggacaacctaaaggagtgagcgccagccaggacagaaaaattccgccaccgatcggcacggagagactggctagaatccgccaggggggatctgttgcacaggccccagcgggaacctcctttgttgcgccggttggccatagtggaatttggtcttttggcgtgaacgctgtgtccgaaggcctgtctgggtggagccagtccgtcatgggtaaccaccccatgcaccagcagttgtcagatccatctaccttttctcaacatcagccaatggagcgagacgattcaggtatggtggctccttcgaatattttccatcagccaatggccagcggcttcgtggacttctctaagggcttacctatcagtatgtatggcggcacgatcatcccctctcacccccaactagccgacgttcctggggggccactatttaatgggttgcacaaccctgaccctgcgtggaatcccatgattaaggtgatccagaactccaccgagtgcacagatgcccaacaggcaagtctgctcccctcagtcccggccctgaaaggcgaaatcccctcccctcaacttaccaggccaaagaagcggatcgggagaccaatggtcgcaagccccaaccagcggcatcaagatcacctacgccccaaagtgcctgctggggttcaggaactgacgcactgcccagatactccactcctacccccatcagactcccgcgggcataactcaagtaatagcccctctctgcaagccggtggagccgaaggcgctggagaccggggtagggatacccggtag

SEQ ID NO: 17667 - DNA, 753 bp, synthetic construct
  source 1..753: mol_type = other DNA; note = Synthetic coding sequence
atgggagatatccccgccgtgggtctgtctagctggaaagcctcccctggcaaagtcaccgaagctgtgaaggaggcgattgacgccggttacaggcatttcgattgtgcgtacttttatcataatgagcgagaggtgggcgcggggatccgatgcaaaataaaagagggcgccgtccggcgcgaagacctattcatcgctacaaaattgtggtgtacctgccacaagaaatctctcgtcgagactgcgtgtagaaagtccctgaaagctctcaagctcaactacctagatctttacctcatacattggcctatgggatttaagcctccccatcccgagtggatcatgagttgctccgagctctctttttgcctgagccacccgcgagtccaggacttgccactggacgagagcaatatggtaattccttccgacaccgatttcctcgacacctgggaggctatggaggacttagtgatcaccgggttagttaaaaacatcggagttagtaacttcaatcacgagcagctcgaaaggcttctgaacaagcctggcttgcggtttaagcctttgaccaaccagattctaataaggttccaaatccaaaggaatgtgatcgttattcccggaagcatcaccccaagccacataaaagagaatatacaagtctttgactttgaactaacgcagcacgatatggacaacatcctttcactcaacagaaacctcagactcgctatgttcccgatgtag

SEQ ID NO: 17668 - DNA, 525 bp, synthetic construct
  source 1..525: mol_type = other DNA; note = Synthetic coding sequence
atgcttaccgaaaacggacaggtattgagctgcgggagtaattcttttggacagctgggcgtgccacacggaccacgcaggtgcgtggtgccccaggctatcgagctgcacaaagagaaggtcgtttgcattgctgcagggcttcgccatgccgtcgctgcaacagcctcgggtatcgttttccaatggggcacaggattggcaagttgcggtaggagactttgtccagggcagacacttccgttgttttttactgctaaagaaccaagtcgtgttaccggtctagagaactcaaaagccatgtgtgtactagcaggctctgaccactctgcatccctgaccgacgcaggggaagtttacgtgtggggcagcaataagcacggccagcttgcaaacgaggcagcctttttaccggttccccagaaaattgaagctcattgcttccaaaatgaaaaagtcactgctatttggtccggctggacccacctcgtcgcacagaccgggctgttgtggttgcgagcatag

SEQ ID NO: 17669 - DNA, 228 bp, synthetic construct
  source 1..228: mol_type = other DNA; note = Synthetic coding sequence
atgaaccgcaggcgtaaattcctgttggctagcgtgctggccctccagaactcatcatttatttaccccagctgccaaaagtgctttagtaggattattctcgtgagcaagcgttcaaactgccccaagtgcggaagtacaggagaatcgggaaatgctaattacaggtataagctcagcctaaaggtcgccgaatctaacaagttattcgtgatcacagtgttctag

SEQ ID NO: 17670 - DNA, 252 bp, synthetic construct
  source 1..252: mol_type = other DNA; note = Synthetic coding sequence
atggtggcaatggccgaagcagaggctggagtggccgttgaggtgcgcggacttcctccagccgttcccgatgagctgttgaccctctactttgagaataggcggcgcagcggcggagggcccgtgctgagctggcagagactgggctgtggcggggttttaactttccgtgagcctgccgatgccgagcgcgtgctcgcccaggccgatcatgaactgcacggggcgcaactttctttgagacccgcctag

SEQ ID NO: 17671 - DNA, 528 bp, synthetic construct
  source 1..528: mol_type = other DNA; note = Synthetic coding sequence
atgctgagcgaggaagagaaagaagaattgaaagcggagctggtccaactggaggacgagataacaactctgagacaggtgctttccgccaaggaacggcatctggtcgagataaaacagaaactgggcatgaatctgatgaatgagttgaagcaaaatttcagcaagagctggcacgacatgcagactacaactgcctataaaaagacccatgaaactctgtcgcacgcaggtcaaaaagctactgctgcattttcaaatgtgggtactgccatcagcaagaagttcggtgacatgtcctattccatacgacactccataagcatgcctgctatgaggaactcccccacgttcaaatctttcgaagagcgggtcgagaccacagtaacatccctcaagacgaaggtaggtgggacaaatcctaacggaggatcattcgaagaagtgcttagttctaccgctcacgctagcgcccagagtctagcaggaggtagtcggcgcacaaaggaggaagaactgcaatgttag

SEQ ID NO: 17672 - DNA, 231 bp, synthetic construct
  source 1..231: mol_type = other DNA; note = Synthetic coding sequence
atgaaccgaagaagaaagttcctgctggcatcggtccttgcccttcagaacagctccttcatttatcccagttgtcagaaatgcttcagccgcataatcctggtttcaaaaagaagtaactgcccgaagtgtggttctacgggcgagtcgggaaatgcaaattatcggtacaagctgtctctgaaagtggcggagtccaataagttattcgtgataacagttttcgggtag

SEQ ID NO: 17673 - DNA, 456 bp, synthetic construct
  source 1..456: mol_type = other DNA; note = Synthetic coding sequence
atgtcgataccatttagcaatacccactaccgcatccctcagggatttggcaacttgctcgaaggcctcacaagggaaatcctgagggagcagcccgacaacattcctgcctttgccgctgcttactttgaatcacttctcgagaaaagggagaaaaccaatttcgacccggccgaatggggttcaaaagtggaggaccgattctataacaaccatgcattcgaagagcaggagccaccagaaaagagcgatcctaagcaggaagaatcacagataagtgggaaagaggaagagacaagcgtcaccattcttgatagcagcgaggaggacaaggaaaaagaggaagtagccgcggtgaaaatccaggctgcatttagaggccatattgcccgcgaggaggcaaaaaagatgaaaacaaatagccttcagaatgaagaaaaagaagagaacaagtag

SEQ ID NO: 17674 - DNA, 270 bp, synthetic construct
  source 1..270: mol_type = other DNA; note = Synthetic coding sequence
atggaggcggccgacgcttctaggagtaacggctcttcccccgaggcccgcgatgctcgctccccttctgggccatccggatctctggaaaatggtactaaagctgacggcaaagacgctaagacaacaaacggacatggcggggaggccgccgaaggtaaatctctggggagcgccctcaaaccgggcgagggcagaagcgccctgtttgccggaaatgagtggcgccggccgattattcagtttgttgagagtggtgatgacaagtag

SEQ ID NO: 17675 - DNA, 1542 bp, synthetic construct
  source 1..1542: mol_type = other DNA; note = Synthetic coding sequence
atggaagtcgggatcacgatacagcacgcctatgaaaagcagcacccctggatagatctgacatctattggcttctcatacgtcatagattttaataccatgggccagattaaccgtcaaacccagcgtcagcgcagagttaggcggaggctcgatttgatttatcccatggttactggcactttgcctaaggcccaatcatggccagtgtcaccaggccctgccacctccccgcctatgagcccatgtagttgcccccagtgtgtactggtgatgtctgtgaaagcggcagtggtaaacggaagcaccgggccgctgcagttacccgtgactcgaaaaaatatgcctccccccggggtagttaagctgcctcctctgcccggtagcggagccaaacctctggattcaacaggaactatacgcgggccactgaagaccgcaccctcacaggtgatcagacgccaggcctcttcaatgccaacgggtaccaccatgggaagccccgcctcccccccagggccaaatagtaagacaggacgcgttgccctggcgacgctgaacaggactaacctgcagcgtttggcgatcgcccagtctagagtcttgatcgcttcaggcgttcctacggtgccagtgaagaatctgaacgggtcctcgcccgtaaacccagctctggcaggtataactggcatactgatgagcgccgcaggcctacccgtgtgtttaacgcggccacccaagttagtcctgcaccctccaccggtgtccaagtccgagattaaatccatacccggtgtgtctaacacttctcggaagacgaccaagaaacaggccaaaaagggtaaaacgccagaggaagtgctcaaaaaatatttgcagaaggtcagacaccctccagatgaagactgcacaatttgtatggagagattaacagccccctcaggatataaagggcctcagccaactgtaaagcccgatctggtgggcaagctctcccgctgtggccatgtgtaccatatttattgcctggtagctatgtacaataacggaaataaagatggctcgctacaatgcccgacatgcaagacaatctatggcgtcaagacaggcacacagccaccaggtaagatggagtaccacttaataccccattccctgccaggccaccccgattgtaagacaattcgaattatctattccattcctccggggatccagggaccagagcatccaaatccaggtaagtcattcagcgctcgggggtttcctcggcactgctaccttcccgacagtgaaaaagggcgcaaggtgttgaagctgttacttgtcgcctgggataggcgtctcatcttcgccataggtacttcctcaactaccggcgagtcggatacggtgatctggaacgaggtgcaccataagaccgaattcggatctaacctgacgggacacggatatccagatgctaattacttagataatgtgctggctgaattagccgcccaggggatcagcgaggacagcaccgcccaagagaaagactag

SEQ ID NO: 17676 - DNA, 414 bp, synthetic construct
  source 1..414: mol_type = other DNA; note = Synthetic coding sequence
atgagctcagttcagagccaacaggagcagctctctcagagcgacccctcgcctagcccgaacagttgctcttcttttgagctaattgatatggacgccggctccctgtatgaaccagtgtccccacattggttctactgcaagatcatcgatagcaaagagacgtggattccctttaatagtgaggacagccagcagctcgaagaagcatattcatcagggaaagggtgcaatggaagagtggtacctaccgacggcggccggtacgatgtgcatctcggggagagaatgcgctatgcagtgtactgggacgaattggcgagcgaggtaagacgttgcacatggttctacaagggtgataaggataataaatatgtgccctattcagaaagtttttcacaggtgttggaatag

SEQ ID NO: 17677 - DNA, 120 bp, synthetic construct
  source 1..120: mol_type = other DNA; note = Synthetic coding sequence
atgttctggaagttcgatctgcattcctccagccatatcgataccctcttggaacgtgaagatgtcacacttaaagaactgatggatgaggaagatgtattacaggagtgcaaagcctag

SEQ ID NO: 17678 - DNA, 2157 bp, synthetic construct
  source 1..2157: mol_type = other DNA; note = Synthetic coding sequence
atgctgatgacgctagagatgacagaattgacagacccgcatcacaccatgggtgattacaaagtcgcacacccccaggatccacatcatcctagcgagaaacctgtcatccactgtcacaaatgcggcgaaccttgcaagggcgaggtgctgcgcgtgcagactaaacacttccatatcaaatgttttacatgcaaggtttgcgggtgcgacttggcccagggaggattctttatcaagaacggtgaatacctttgcacgctggactatcagcgtatgtatgggacgcgttgccacggctgcggggagtttgtggagggggaggtcgtgaccgccctggggaagacctaccacccaaactgtttcgcgtgcacaatttgcaagcgaccttttcctcctggggacagagtgacatttaatggcagggactgcctgtgccagctgtgtgcacagcctatgagcagctcaccaaaggaaaccaccttttccagcaattgtgctggatgcgggagagacatcaaaaacggccaggctttattggccctggacaagcagtggcatttgggatgttttaagtgtaaatcgtgtggtaaggtcttgaccggtgaatacattagcaaggacggggcaccttattgtgagaaggactaccaaggcttattcggcgttaaatgcgaggcttgtcatcaattcatcacggggaaggtgttggaagctggggacaagcattatcatccaagctgtgctagatgttcacggtgtaaccagatgttcacggaaggggaggagatgtacttgcagggtagtaccgtatggcatcctgactgcaagcagagtacaaaaaccgaagaaaagctgcgtccaacccggacctcatccgaaagcatctactctaggcctggtagctccatccccgggtcacccggccataccatatacgcaaaggtggataatgagattctggactataaagatttagcagctatccctaaggttaaggctatttatgatattgagcgacctgatctgatcacttacgaacctttttatacctccgggtacgatgataaacaagagcgccagtctctcggcgagtcgccaagaactctgagtcctacccctagcgctgaggggtaccaggatgtcagggatcgtatgatccaccggtccactagccagggctccattaactcacccgtttactcacggcactcatatacacctacaacaagcaggtccccccagcatttccacaggccagggaacgagccttcctccggccgcaatagccccctgccctaccgacccgatagcagacccctcacccctacttatgcccaagcaccaaagcatttccacgtccctgaccaggggattaatatctaccgcaagccaccaatttataagcaacatgccgctttggcagcccagtcaaagtcttcggaagacattattaagtttagcaagtttcctgcagcccaggctccagatccttctgagacaccaaaaatcgagacggatcactggccaggacctccttcttttgccgttgtgggacccgacatgaagcggaggtcatccgggagggaggaggacgatgaagaactcctgaggagacgccagctgcaggaggagcagctgatgaagcttaacagcggcctgggccagctgatccttaaggaggaaatggagaaggaaagccgggaaagatcctcgctcttggcctcacgctacgacagtcccatcaactctgccagccatatccctagttctaagacggcctccctcccgggctatggccgcaacggtctgcataggccagtgtctacagactttgcccagtacaactcgtatggcgatgtaagtgggggggttagagactttcagactctccctgatgggcacatgccagccatgcgaatggacagaggcgtgtccatgcccaacatgttggagccaaaaatctttccctatgaaatgctgatggtcacaaatagaggccgaaacaagatacttcgcgaagttgatagaaccagactggaacgccacttggcccccgaagtgttccgcgaaattttcgggatgtccatccaggagtttgaccgactgccgctgtggcgccgaaacgatatgaagaagaaggccaagctcttctag

SEQ ID NO: 17679 - DNA, 2148 bp, synthetic construct
  source 1..2148: mol_type = other DNA; note = Synthetic coding sequence
atgagtcagtcgggtgcggtgtcgtgctgcccaggggctacaaacggctctctaggacggagcgatggtgtcgcaaaaatgtcacccaaggatctgttcgagcagaggaaaaaatatagtaactcaaatgtgattatgcacgagacatctcaatatcatgtgcagcacctcgcaaccttcattatggataaaagcgaagctatcacttctgttgacgatgctatcaggaaactggtacagctcagctcaaaggagaagatttggacacaagagatgctcctccaggtcaacgaccagagcctgaggctgctagatatagagagtcaggaggagctagaggattttcctctcccaaccgtacagcggagccaaacggtcttgaaccagctcaggtatcccagcgtcctgctacttgtgtgtcaggattccgagcagtctaaacctgacgtgcacttctttcattgtgacgaggtggaagctgagctggtgcacgaggacatcgaaagtgctctagctgattgtaggctcggcaagaagatgcgaccacaaaccctcaaaggacaccaggagaagatccggcaaaggcaatctattcttccaccgccccagggtccagcacctattcctttccagcatagaggaggagattcccctgaggctaaaaatcgagtagggccccaggtgccgctcagcgaacctggctttcgcaggagggagagccaagaggaacccagagctgtgttggcgcagaaaattgagaaggaaactcagatactgaactgcgcactggacgacatagagtggttcgtggcaagactgcagaaggccgccgaggcattcaagcagcttaaccagcgcaagaagggaaagaagaagggaaaaaaagccccagcagagggagtgctgactctcagggcccggcctccatctgaaggcgagttcattgactgctttcaaaagatcaaactggcgatcaacctcctcgctaaactccagaaacatatacagaatccttctgccgccgagctggtgcactttctcttcggaccactggatctgatcgtgaacacttgctctggtcctgacatagctcgatctgtgtcttgtcctctgctgagccgcgacgcggtggatttcttacgcgggcatttggtccccaaggagatgtctctctgggagtctctgggcgagagttggatgcgcccccgttccgagtggcctcgcgagccccaggtgcccctctacgttccaaagtttcactcagggtgggaacctccagtcgatgtgctccaggaagcgccctgggaagtcgaaggtttagccagcgcaccaattgaggaggtatctcccgtgagtcgccaatccattcggaacagtcagaaacactcacctacttccgagccaaccccgccgggcgatgccctgccacccgtgtcaagcccacacacccatcggggctaccagccaactccagccatggctaaatacgtaaagattttgtacgacttcaccgcccgcaacgcgaacgagttgtctgttcttaaggatgaggtactggaagtactggaagacggccggcagtggtggaagctcaggagtcggtctggccaggctgggtacgtaccgtgcaatattttgggcgaggcccgcccagaagatgctggggctccttttgagcaggctggccagaaatactggggtcctgccagccccacacacaagcttccgccaagtttccctggcaataaagatgagcttatgcaacacatggacgaggtgaacgacgagctcatccgaaagatatcgaacattagagctcagcctcagcgccacttccgggtggaaagatcccagcccgtaagtcagcccctcacctatgaatcgggccccgatgaggtacgagcttggctggaggctaaagcattctctccccgcattgtcgagaatctgggcatactgaccggtccgcagctctttagtctgaataaggaggaattgaagaaagtctgcggggaggagggagtacgcgtctatagccagttaacaatgcagaaagccttcctcgaaaaacaacagagcgggtccgagctggaggaacttatgaataagttccatagtatgaaccaacgtcggggcgaggactcctag

SEQ ID NO: 17680 - DNA, 360 bp, synthetic construct
  source 1..360: mol_type = other DNA; note = Synthetic coding sequence
atggagaccgacctgaacagtcaggaccggaaggacctagataagtttattaaatttttcgccctgaagacagtccaagtgattgtgcaggcgcggctcggagaaaaaatttgtaccaggtctagttcatcacctaccggttcagactggtttaatcttgcaattaaagacattcctgaggtaactcatgaagctaaaaaggcgctggctggacaattgccggcagtaggtaggagcatgtgtgtggaaatctcactgaaaacctctgagggggattccatggagctggaaatctggtgcttagaaatgaatgagaaatgcgacaaggagattaaagtgagctatacggtatacaattag

SEQ ID NO: 17681 - DNA, 420 bp, synthetic construct
  source 1..420: mol_type = other DNA; note = Synthetic coding sequence
atggcggacacagatctgtttatggaatgtgaggaagaggaattagagccttggcagaagatcagcgatgttattgaggattccgtcgtggaagactacaacagcgtcgataagactactacagtgtcagtatcacaacagcccgtgtcagcacctgtgccgattgccgctcacgcctccgtcgctggacacctttctacgagcacaaccgttagttctagcggggcccagaattcagactctactaagaagaccctcgtgacacttatcgcaaacaataatgccgggaaccccctcgtccaacagggcggacaacctcttatcctgacccaaaaccccgcacctggcctcgggactatggtcacccagcccgttttgaggcccgtgcaggtaatgcagaacgccaaccatgtgacatag

SEQ ID NO: 17682 - DNA, 492 bp, synthetic construct
  source 1..492: mol_type = other DNA; note = Synthetic coding sequence
atgcatgataagggcattaccaccgccgccgtgtgcgtgtatccggcgagggtatgtgatgccgttaaagctctgaaagccgcagggtgtaatattccagttgctagtgtggcagccgggttccctgcgggtcagacccatttaaagaccaggctggaagagatacggctcgctgtcgaggatggagcaacggaaatagacgtcgtgatcaaccggtccttggtgctgactggccaatgggaagcactgtatgacgagatacgccaattccggaaagcctgcggtgaggcccatctgaagaccatactggctactggcgaactggggacactgacaaatgtgtacaaagcttctatgattgccatgatggcaggttctgacttcattaagacatccactgggaaagaaaccgtgaacgctacctttccagtcgctattgtgatgctgagagcgataagagatttcttttggaagaccggtaataaggtttag

SEQ ID NO: 17683 - DNA, 456 bp, synthetic construct
  source 1..456: mol_type = other DNA; note = Synthetic coding sequence
atggctgacacagacctgttcatggaatgtgaggaagaagagctggagccgtggcagaagattagcgacgtgattgaagatagtgtggtggaggattacaattctgtcgataagaccacaaccgtgagcgttagtcagcaacctgtgtcagcccctgtgccaattgccgctcatgccagtgtggccgggcacctatccacatcaactaccgtctccagcagcggtgcgcagaactcagacagcacaaagaaaacccttgtgaccctgattgccaacaacaatgccgggaatcccctggtccagcagggtggacaacctctaatcctcacccaaaatcctgcgcccggcttaggtaccatggttacccaacctgtgttaaggcccgtgcaggtgatgcagaacgcgaatcacgtgacttcatcaccagtggcatctcagcccatattcatcacgtag

SEQ ID NO: 17684 - DNA, 252 bp, synthetic construct
  source 1..252: mol_type = other DNA; note = Synthetic coding sequence
atgagccagtccggggccgttagctgctgcccaggtgccaccaacgggagtcttgggagatccgacggtgtcgctaagatgtctcctaaagatttgtttgagcaacgaaaaaagtattccaattccaatgtgatcatgcacgagacaagccagtaccatgtgcagcacctggccacttttattatggacaaaagcgaggcaattacttctgtggacgacgcaattagaaagctggtccagctgagttcctag

SEQ ID NO: 17685 - DNA, 366 bp, synthetic construct
  source 1..366: mol_type = other DNA; note = Synthetic coding sequence
atggccgggagacctttgcgcatcggcgaccagctcgtgctggaagaggactatgatgaaacatacattcctagtgaacaggagatcctggaattcgcgcgggaaatagggatcgatccaattaaagaacccgagcttatgtggcttgctagagaggggatagttgcccccttacctggcgaatggaagccatgccaggacattaccggcgatatctactactttaatttcgccaatgggcagtccatgtgggatcacccttgcgatgagcattatagaagtctcgtaattcaagagcgcgctaagctgtctacttccggagcaataaaaaagaagaaaaagaagaaggagaagaaggataagtag

SEQ ID NO: 17686 - DNA, 2997 bp, synthetic construct
  source 1..2997: mol_type = other DNA; note = Synthetic coding sequence
atgaacaggcgcagaaaatttctgctcgccagtgtgctggccttgcagaactcgagttttatttacccttcatgtcaaaagtgctttagcaggatcatcctggtgtcaaagcggtccaattgccccaaatgcggcagcacaggcgagtccggcaatgccaattatcgatacaaacttagtctgaaggtggccgagagtaacaaactttttgtgattactgtgttcggatcttgcctcgacacctttttcggccttaccgctacaggtctgcacaggtacatccaggaccccaacaaaatcccagaaaccctcgataacgatacaacccagaacctcctgactaaagctgtggagacctgctttgtgggacagtccttcattttcggcgtgacaaattttgaaaaccagccgggacagggatccgacgcctctaacttcctccagcagtgctccgaccacaagagaaaggccaaagcactggtggcttgccagatcgtccttccagatcctgggatcgctgggtttacggtgattgactattttcaccaacttctccaaactttcaacttccggaaactgcaatgcgattcccaggcccctaacaaccatctgctcgccttagatcactccaattctgatttgagtagcatctatacgagtgattcaactagtgatttcttcaagtcttgctcaaaagacacgttcagtaagttctggcagccatcactggagtttacatgcatcgtatcacagctcactgacaatgatgacttctcggccagcgagcagagcaaggccttcgggaccctccagcagaatcgtaaatccatttccatcgcagaagcaaccggatcatcttcgtgccacgatcccattcaggactcatggtcactggtctcctacatggataagaaatcgactgccgagaaactggggaaagagctgggcctgcaggccaaggagctttcagccgtgcattcctcccaccacgaaattggcgtgaatgacagtaatcttttctctcttgaaatgagggaacccctcgaatctagcaatacaaaaagtttccactctgctgttgagatcaagaatagatcacagcatgaactgccatgcttccagcaccacggtatcgacacaccaacctctctgcagaaacgatccgcatgttgtcccccctcactgttgaggctggaggaaaccgccagctccagccaagatggagacccgcagatctgggacgatctgcctttctccgaaagcctgaacaaatttctcgccgttcttgagtccgaaatcgctgtcactcaggccgatgtcagctctcggaagcaccatgtggacaacgacatcgacaaatttcacgcagatcatagtagactgagtgttactccccagagaaccactggcgccctgcacactccacctatagcgctccgctccagtcaggtgatcgtgaaggccaactgttcaaaagatgactttctttttaattgtaaaggcaatctcagcccaagtgtcgaaaaggagagtcaacccgataacaaggtggaagccgtttccgtcaatcataatggacgggatatgtccgagtatttcctgcctaacccttacctaagtgctctgtcttcttcatccaaagacctggagacaatcgtgacactgaagaagaccatccgaatttctccccaccgtgagtctgatcattctagtttgaacaataaatacctgaatggctgcggtgaaatctcagtgtctgagatgaatgagaaactgaccacattatgctacagaaaatacaatgatgtgagcgatctgtgtaaactggagaataagcagtattgccggtggtccaagaaccaggacgattcatttacgatttgcagaaagctgacttaccccctggaaactttgtgcaatagccccaacagatcaacaaacacgttaaaggagatgccttggggacacattaacaacaatgttacccagtcctacagcattggttatgaagggagctacgatgctagtgctgacctgtttgatgatatcgccaaagagatggatattgctactgaaatcactaagaaatcccaggacattctgctcaaatggggaactagcctggccgagagtcacccttccgagagcgacttttccttaaggtccctgtctgaggacttcattcagccaagccagaaactgtctcttcagagcctctctgatagtaggcatagccggacatgtagcccgactccccattttcagtcagattctgagtataactttgaaaactctcaggatttcgtaccatgttctcagagtactcccatttcaggcttccaccagacaaggatccatggcattaaccgagctttcaagaaacccgtcttttactcagatttggatggaaactatgaaaagatacgcatctttcccgaaaatgataagcagcaggcttcaccaagctgcccaaagaatatcaagactccgtctcaaaagattcgctcccccattgtgagtggcgtctcccagccagacgtgttcaatcattacccattcgcagagtgtcatgagacagatagcgacgagtgggtgcctccaacaacccaaaaaattttccccagcgatatgctgggcttccagggcataggactggggaagtgcttggctgcataccactttcctgaccagcaggagctgccaaggaagaagctcaaacacatcaggcagggcacaaacaagggccttatcaagaaaaaacttaagaatatgctggctgctgtcgtgacaaagaaaaaaacccataagtataattgcaagagcagcggctggatatctaagtgtccagacatccaggtgttagcagcacctcagttacaccctatcttagggcccgactcatgctctgaagtgaaatgttgtttgcctttttccgagaagggccccccatcagtttgcgagacccgctcagcctggagcccagaactattttcgtag

SEQ ID NO: 17687 - DNA, 504 bp, synthetic construct
  source 1..504: mol_type = other DNA; note = Synthetic coding sequence
atgggcactaccgcgcccggtccaattcacctgctcgagttatgcgatcagaagctgatggagtttctctgcaacatggataacaaggacctcgtatggctggaggagatccaggaggaggctgaaaggatgttcacacgtgagttcagtaaggagccagaattgatgccaaagaccccaagccagaagaacaggcgaaagaagagaaggatttcctacgtccaggacgaaaacagagatccaatcagacgcagattgagcaggaggaagagtaggagctcacagttaagcagcaggaggctgcggtctaaggacagtgtcgaaaagcttgctactgtggtgggagaaaatggaagcgttctcagacgggtaactagggccgctgccgcggccgccgctgctaccatggccctcgccgcgccaagttcccctacccctgagtcacccaccatgctgaccaaaaaacctgaagacaatcatacccagtgtcaactcgtgccctag

SEQ ID NO: 17688 - DNA, 615 bp, synthetic construct
  source 1..615: mol_type = other DNA; note = Synthetic coding sequence
atggaagcccaggcccaggggctactggagactgaaccgctgcaaggcactgacgaagacgccgttgcttctgccgatttcagctcaatgctttccgaggaagagaaggaggaacttaaagctgagctcgtgcagctcgaagatgaaataaccactctacggcaagtgctcagcgctaaagagaggcacctggtcgagatcaagcagaagctgggcatgaacctcatgaatgagctgaagcagaatttctcaaaaagctggcacgacatgcaaacaacaacagcctacaagaaaacccatgaaacgctctcccacgctggacagaaagccacggccgctttctccaatgtgggcaccgcgatcagcaaaaagtttggcgacatgagctatagcattcggcattccatctctatgcccgcaatgaggaattcacctaccttcaagtcatttgaagagcgagtcgagacgaccgtgaccagcttgaagaccaaggtcggaggcactaatccaaacggtggatccttcgaggaggtgctgtctagtaccgcccacgccagtgcacaatccctagccggcggttctcgtagaacaaaggaagaagagttgcagtgttag

SEQ ID NO: 17689 - DNA, 1023 bp, synthetic construct
  source 1..1023: mol_type = other DNA; note = Synthetic coding sequence
atggccgcggctagagatcctcccgaagtgagccttagggaggcaacacagcggaagcttcggcgattttctgagctccgcggaaagttagttgctcgaggggagttttgggatatagtcgccataactgctgctgacgagaagcaggagctcgcttacaatcagcagctttcagagaagctcaagaggaaagagcttcccctgggtgtccagtatcacgttttcgtcgacccggcgggggcaaaaataggaaacggtggatcaaccttgtgtgctctgcagtgtctcgaaaagttatatggggataagtggaacagctttactatcctactcatacactcgggcggctacagtcaacgtctcccgaacgcctcagccctcgggaaaatctttactgctctccctctagacattcctgagtgcagtggcaaaacatcttgcataattcagtctatcctagactcgcgatgcagtgtcgcccctgggtccgtcgtggaatattctaggcttggccccgatgtatcagtgggtgagaactgcatcatcagcggctcctacatcctgacaaaagccgccctgcccgctcactcatttgtttgctcactgagcttgaaaatgaataggtgtctgaagtacgctactatggcattcggagtgcaggataatctgaagaagtcggtcaagactctgagtgacattaagctgctgcagttttttggggtttgctttctgtcctgtctcgacgtctggaacctgaaggtaacggaggagttgttctctgggaataaaacatgtctcagcctgtggactgctaggatcttccctgtctgctcctctctctcagattcggtgataacatcgctcaaaatgttgaacgcagtgaagaataaatccgccttcagccttaacagctacaaacttctgagcatagaggaaatgctcatttacaaagatgtagaggacatgataacatacagggaacagatctttcttgagatctccctgaaatccagcctgatgtag

SEQ ID NO: 17690 - DNA, 873 bp, synthetic construct
  source 1..873: mol_type = other DNA; note = Synthetic coding sequence
atggcagagcttacggctcttgagtcattgattgaaatggggttcccacgcggacgggcggagaaggcattggctctgaccggcaatcaaggcattgaagccgccatggactggttgatggagcacgaggatgatccagatgttgacgagcccttggaaacacccctggggcatattctgggtcgggagcctacctcttccgagcaaggtggcctcgagggcagtgggagcgccgccggagagggaaagcccgcattatccgaggaggaacggcaagaacaaaccaagagaatgcttgagctggtagctcaaaaacaaagggagagggaagagagagaggaaagagaggcactcgaacgtgaaaggcagagaagaagacagggacaagagcttagcgccgcgaggcagaggctacaggaggatgagatgaggcgggccgccgaagagcggcgcagagaaaaagccgaggagctggcggcccgacagcgcgtgcgggagaagatcgagagggacaaggcggaaagggcaaaaaaatatggtggctctgtcggctctcaacctcctcctgtggcccccgaacccgggccagtaccgtcctctcctagtcaggagcctccaaccaaacgcgagtacgaccagtgtcgcattcaggttcggttacccgatgggacatccctcacacagaccttccgggcccgcgaacagttggctgccgtccggctgtacgtggagctccatcggggagaagaactcggtggaggccaggatccagtacagctcctgtctggttttcctcggcgagctttttcagaggcagacatggaacgtcctctacaggaactgggcctggttccttccgcggtcctgatctag

SEQ ID NO: 17691 - DNA, 309 bp, synthetic construct
  source 1..309: mol_type = other DNA; note = Synthetic coding sequence
atgctgtctgaagaagaaaaagaggagctaaaagcagaactggttcagctggaggacgagatcactacgctgagacaggtgttgagcgcaaaagaacgccaccttgtagaaatcaagcagaagctggggatgaacttgatgaatgaactgaaacagaatttctcgaagagctggcacgacatgcagactacaaccgcatacaagaagacccatgaaactctgtcacacgccggacagaaagcaacagccgccttttctaatgtcggcactgctatttccaagaaattcggcgacatgaggaggaaatag

SEQ ID NO: 17692 - DNA, 279 bp, synthetic construct
  source 1..279: mol_type = other DNA; note = Synthetic coding sequence
atgttgagtgaggaggagaaggaagaactcaaagccgagctcgtgcagcttgaggatgaaatcactactctccgtcaggtcctcagcgccaaagagaggcatcttgtggagataaagcagaaactcggaatgaacctgatgaacgagttgaagcagaatttctcgaaaagctggcacgatatgcaaacaactaccgcttacaagaaaacacatgagactctttcacacgctgggcaaaaggccacagcagccttctccaacgtgggcacagcgatttag

SEQ ID NO: 17693 - DNA, 3735 bp, synthetic construct
  source 1..3735: mol_type = other DNA; note = Synthetic coding sequence
atgctgatcaaagagtaccacatcctactgccaatgtctcttgatgaataccaggtggctcagctgtacatgatccaaaaaaagagccgagaggaatcgagcggtgaagggagcggcgtagagatcctcgcaaaccgtccctatacagacggccccggtgggagcggacaatacacccacaaggtatatcacgtgggaagccatattcccggttggtttagagcacttctgcccaaggctgctttgcaggtggaggaagagtcttggaatgcctacccttacactaggacacgatatacgtgcccctttgtcgagaaattcagcattgagatagagacttactacctccctgacggcgggcaacagcctaatgtgtttaatctatccggggctgaacgcagacaacggattctggacactatcgacattgttcgagatgccgtggcacccggggagtataaggctgaagaagacccaaggctgtatcactctgtcaagacgggccgtggacccctctcggacgattgggctaggactgccgcgcagaccggtcctctcatgtgcgcttacaagctctgcaaagtggagttcaggtattggggaatgcaggcaaagattgagcaatttatccatgatgtgggactgaggagagtaatgttgagggcgcataggcaggcatggtgttggcaggacgagtggacagagctgtcaatggccgacatccgggctttagaagaggaaaccgccaggatgctcgcgcagcgtatggcaaagtgcaataccggctctgaggggtcagaggcccagcccccagggaagccttccacagaggcacgctccgccgcgagtaatacggggacccccgacggaccggaagctccacccggcccagacgcgtccccagatgccagttttggaaaacagtggtcgtcaagtagcaggtctagctatagctcccagcacggaggggctgtgagcccacaatccttatccgagtggcggatgcagaacattgctagggatagcgagaactcgtccgaggaagagttcttcgacgcccatgaaggctttagcgatagtgaggaggtgtttcccaaggagatgacaaaatggaactcaaacgatttcatcgatgcctttgctagccctgtagaagccgagggtacaccagagcctggcgctgaggccgccaaaggtatagaggacggcgcccaggccccacgcgatagtgagggactggatggagccggggaacttggggccgaagcctgtgccgtacatgccctgttccttatcctccactccggaaatatcctagactcgggccccggagatgctaactcaaagcaggcagatgtgcagaccctgagcagcgcttttgaagctgttacacgtatccatttcccagaagcgcttggccacgtggcactcaggctcgtgccttgccctcctatttgtgctgcggcctacgctctggtctcaaacctatccccttatagccatgatggagactcgttatctaggagccaggaccatatcccattagcggccctgcctctcctggctacctctagctccagataccaaggggccgtagcgacagtcatcgctcgcacaaaccaggcctacagcgcctttctgagatcccctgagggcgctggcttttgcggccaagtcgcactcattggggatggggtgggggggattctggggtttgatgcactctgtcactccgccaacgctgggacgggaagcagaggcagcagtaggcgtgggtccatgaataacgagttactgtccccagaatttggacctgtgcgcgatcctctggcagatggggtggagggcctgggtcgggggtctccagagccaagcgctctccctcctcaacggatcccttcagacatggcaagccccgagccggagggctcacagaactccttacaagccgcaccagccactacgagtagctgggagcctcgtcgcgcgtcaacagctttctgccctccagccgcttcatcagaggccccagacggtccttcctctaccgctagactcgacttcaaggtatccggattcttcctcttcggcagtccactcggcctggtgctggctctgcggaaaactgtcatgcccgcactcgaggccgctcagatgagacctgcctgcgagcaaatctacaacttgtttcacgctgccgatccctgcgccagccggctggagcccttgctggctcccaagtttcaggcgatcgcgcctctgacggttcccaggtatcagaaatttccacttggtgacggctcttccttgcttctggctgatacactccagactcattcgagcctgttcttggaggaattggaaatgttggtcccctccacccccactagcacttcaggagcgttctggaagggttccgaactggccactgacccccctgcccagccggcggctccgtccaccacttccgaagtggttaagattttggagcgctggtggggcacaaagcgaattgactattcactgtattgcccagaggccctgaccgctttcccaactgtgactcttccacacctgttccatgcatcgtactgggaatcggcagacgtagtggctttcatacttcgccaggtcatagagaaggaaagaccacaactagcagagtgcgaagaacccagcatttactcacccgcattcccgagggaaaagtggcagaggaaacggacccaggtaaagatccggaatgtaacctctaaccaccgggctagcgatactgtcgtgtgcgaggggaggccccaggtccttagcggcaggtttatgtacggtcctctggatgtggtaacactgactggagaaaaggtcgacgtttatatcatgacacagcctctctctggcaaatggatccactttggtaccgaagtcactaacagctccgggcgactgacttttccggtgccccccgaacgggctctcggaatcggagtgtaccctgtgcgtatggtcgtgcggggcgatcatacatatgctgagtgctgcctgacagtggtggcacgcggcacagaagcagtcgttttcagcatcgacgggagttttactgcatctgtttccataatgggcagcgatccaaaggttcgagcaggggccgttgacgtcgtgagacactggcaggacagtggctacctgattgtgtatgtgacgggcagacctgatatgcagaagcaccgcgtagtggcttggctaagccaacataatttccctcatggcgtggttagcttctgcgacgggcttacgcacgatcccctgaggcaaaaagccatgttcctccagtccctggttcaggaggttgaactgaatattgtggcaggctatggctcaccaaaggatgtggctgtatacgcagcactgggtctgtctccgtctcagacctacattgtcgggcgggccgtgaggaaactgcaggcccagtgtcagttcctgtcagacgggtacgtggctcatctgggccagctggaagccgggtctcatagccacgccagttctggcccaccgagggcggcactaggcaagtcgagttacggagtggccgcacccgtggactttctcaggaaacagagccaactgctcagatctcggggtccttcccaggctgaaagagaaggacccggaactccacctacaacgctggctcgcggcaaggcaagatcaatctccctgaagctggatagtgaggaatag

SEQ ID NO: 17694 - DNA, 2676 bp, synthetic construct
  source 1..2676: mol_type = other DNA; note = Synthetic coding sequence
atggatcagccagaagcaccttgctcatccactggccctaggctggctgttgcccgggagctgctcctggcagcgttagaagaactttcccaagagcagctgaagcggttccgacacaagctcagggacgtgggaccagatgggcgctccattccgtggggaaggctggagcgcgcagatgcagttgacctggctgagcagctcgcccagttttatgggcctgagcccgccctcgaagtggcacgtaagacacttaagcgagccgatgcgcgagatgtggcagctcagctgcaggaaaggagactgcagagactcggtctaggaagcggaacgctgttatctgtgagcgaatataaaaagaaataccgggaacatgtgctgcagttacatgcaagggtgaaggagagaaatgctcgctcagtaaagatcaccaagcggttcactaagcttctcatcgcccccgagtccgcagctccagaggaagctatgggcccagccgaagaacccgagcccggacgggccagaaggagcgacacgcacacattcaatagactgtttagaagggacgaggagggacggaggccgctgacagtggtcctgcagggtccagccgggattgggaaaactatggccgccaaaaagatcctgtacgattgggctgcggggaaattatatcaggggcaggtcgattttgctttcttcatgccctgcggggaactcctggagcgaccaggaacaaggagtctggccgatctgatcttggatcaatgccctgaccgaggggcaccagtgcctcaaatgctagctcaaccccagcggttgctgttcatcctcgacggggccgacgaacttccggccctaggtgggcccgaggccgcaccatgtaccgatcccttcgaagctgccagcggggccagggtacttggggggctactgagtaaggctctcctgccaaccgccttactgctggtaaccacgcgggccgcagctcccggccgcctgcaaggcaggctgtgttcgccacagtgcgccgaggttaggggattcagcgataaagacaagaaaaagtatttctacaagtacttcagagacgagcgccgcgctgaacgggcctatcggttcgtcaaggagaatgagaccttgttcgccctgtgtttcgtaccatttgtgtgttggatcgtgtgtaccgtgctgagacagcaacttgagttgggacgtgatctgtcccggacctccaagactacgactagtgtgtatcttctcttcattacgtcggtgctctcatccgctcccgtggcagatggaccgaggcttcagggcgatctgcgcaacctgtgtagactggcgagagagggcgttctagggcgacgggctcagtttgccgagaaggagctggagcagctcgaacttagaggttccaaggtgcaaactctttttttgtccaagaaggaattgccgggcgtgttggaaacagaggtcacctatcagttcatagatcagtcctttcaagagttcctggccgccctttcttatctgcttgaggatgggggggtgccacgcactgcggcaggcggcgtgggcacgctcctgagaggcgacgctcaacctcacagccacctggtgcttaccactcgctttctgttcggtctcctgagcgctgagcgaatgcgggacatagaacgtcactttggctgcatggtgtccgaaagggtcaagcaagaggccctgaggtgggtgcaggggcagggtcagggctgtccgggagtcgcacccgaggtgaccgaaggagcaaagggactggaagataccgaggagccagaggaagaggaggagggcgaagaaccaaactatccgctggagctgctctactgcctctacgagacccaggaagacgcattcgttcgccaggccttgtgtcgattccccgaactcgccttacaacgcgtgagattctgtcgcatggacgtcgccgtgctgagctattgtgtcaggtgttgtccggccggccaagctctcaggctgatttcctgccggctcgtggctgcccaggagaaaaaaaagaagtccctcggcaagcggctgcaggcgagtctgggaggtggatctagtcagggaacgaccaaacagctccctgcctcactcttgcatcctctgtttcaagcaatgaccgatcctctttgtcacctctcctctcttacattatcccactgcaagctgccggacgccgtgtgcagggacctcagtgaggctctgagggccgcgcccgcactgaccgaactcggattactgcacaaccggctcagtgaagctggtctcagaatgctaagtgagggcctggcttggccacagtgtcgtgtccagaccgtccgggtgcagttgcccgatccccagcggggcctgcagtacctggtcggcatgctgaggcagagtccagctctgaccacgttggatttgtccggctgtcagttaccagccccgatggtgacttatctgtgcgctgtgctacagcaccagggttgtggcttacagactctgtccctggcaagcgtggagctctcggagcagagcttacaggagctccaagcagtgaagagggctaagcccgacctcgtcatcacccaccccgctctcgacggacatcctcagccgcctaaggagttgatttccaccttctag

SEQ ID NO: 17695 - DNA, 240 bp, synthetic construct
  source 1..240: mol_type = other DNA; note = Synthetic coding sequence
atgtctcagtccggcgctgttagctgctgtcccggcgccactaatggaagcttggggcggtcagatggggtcgcgaagatgtctcctaaggatctctttgagcaaaggaagaaatactcaaacagcaacgtgataatgcacgagacttctcagtatcatgtgcaacacctagccacattcataatggataaaagtgaggctatcacctcagtggacgacgccattcgaaagttagtgtag

SEQ ID NO: 17696 - DNA, 543 bp, synthetic construct
  source 1..543: mol_type = other DNA; note = Synthetic coding sequence
atgggagacaagaagtcacccacccggccaaagcgacagcctaaacccagttctgatgaaggatactgggactgttctgtgtgtacctttcgtaattccgctgaggccttcaagtgcatgatgtgcgacgttcgaaagggaacctctacccggaagcctagacccgtgagccaactcgttgcgcaacaggtaacgcagcagttcgtccccccgacccagtccaaaaaagaaaagaaggacaaagttgaaaaggagaaatccgagaaagagactacgagcaagaagaattcacacaagaaaactcggcctcgactcaagaatgtggaccgatcttcagcccaacacctggaggtgaccgtcggcgatctgactgtgataattacggatttcaaagagaaaaccaaatcgcctcctgcaagctccgcagcatccgccgaccagcattcccaatcagggtctagctcagataatactgagaggggcatgagtagaagcagctccccaaggggcgaagcttcctctctcaacggcgagtcccactag

SEQ ID NO: 17697 - DNA, 2196 bp, synthetic construct
  source 1..2196: mol_type = other DNA; note = Synthetic coding sequence
atgggttctggcgaagagcctggccagtccggggcttctctccgtacgggccctatggtgcagggaagggggatcatgacaactggcagcgggcaggaacccgggcaatctggcacctcacttcggactggccctatggggtctttgggacaggcggagcaggtaagttctatgcctatgggctctctagagcacgagggcctggtgagtctgaggccagtcggactgcaagagcaggaaggcccaatgagcttaggcccagtcggttcggccgggccagtggaaactagtaaaggacttctgggccaggagggtctcgtagagattgctatggactctcccgagcaggaggggctggtgggccctatggagattacgatggggagtttagagaaagcagggcccgtgagtcccggctgcgtgaagttagcaggtcaggagggcctggtggagatggtacttctcatggaacccggcgcaatgagatttctgcagctgtatcatgaagacttgctggcggggctgggggacgtcgctctgctgcccctcgaaggtcccgatatgactgggtttagactgtgcggggcccaggccagttgccaggccgccgaggagttcctacgcagcttgctaggatccatatcctgccacgtgctatgcttagaacatcctgggtctgccaggtttcttttgggtccagagggtcagcacttgctccagggcctggaagcacagttccagtgtgttttcggaaccgagcggctggccactgccacccttgacactggactggaggaagtcgacccaacggaggctctgcctgtgttgcccggaaacgcgcacacgctgtggacaccagattctacaggaggagaccaggaggacgtgtcgctggaagaagtgcgggagttgctggccactttggaagggctcgatttggacggcgaggactggcttcccagagagcttgaagaagaagggcctcaggaacagccggaggaggaggtcacaccggggcacgaggaggaagaacccgtagcgccctccactgttgcccctaggtggcttgaagaggaggccgccctccagttagccttgcacaggagccttgagcctcagggacaggttgcagagcaggaggaggccgccgctttgaggcaggccctcaccttatccctactcgaacagccgcccctcgaggccgaagagcctcctgacggcgggactgatggcaaagcccaactggttgtacacagtgcttttgagcaagatgttgaggaactggatcgtgctctccgggctgctctggaagtacatgtccaagaggaaacagttgggccctggcgccgcacactacctgccgaactaagagccagactggagaggtgccacggagtgtccgtcgccttaaggggggactgcactatacttcgcggtttcggggcacatcctgccagagccgcgcgacatctcgtagctctgctcgccggaccttgggaccagtctctggcattccctttggccgcaagcggccctacactggccggtcagaccctcaagggcccttggaacaacctggagcgtctggcagagaatacaggggaattccaagaggtagtgagggcattttatgataccctggacgcggctcgctcttctatcagggttgtaagagttgagagagtcagtcaccctctgcttcagcagcagtatgaactctacagagagcgcctcctgcagcgttgcgagcggaggccggtggaacaagtgctctaccacggaactaccgctccagctgtgccagacatttgtgcacacggctttaaccgctctttctgtggacgtaacgcgaccgtgtatggcaagggagtgtactttgctaggagagcctctctcagtgtgcaggacaggtactctccgccaaacgcggatggacataaggctgtgttcgtagccagagttttgaccggcgactacggccaaggccgccggggtctgcgggcaccgccactcaggggtcctggacacgtccttttacgatacgactctgccgtggactgcatctgccagcccagcattttcgtaattttccacgatactcaggcccttcccactcacctgatcacctgtgaacacgtgcccagagcatcacctgacgatcctagcgggctcccgggccgatcacccgatacttag

SEQ ID NO: 17698 - DNA, 1083 bp, synthetic construct
  source 1..1083: mol_type = other DNA; note = Synthetic coding sequence
atgcaagtatatgaaggactggatatcatcaccaataaggtgtcagctcaggaacagagaatttgcaggcaccacatgataagctttgtcgatccacttgtgacaaattacactgtggttgactttcgcaacagggcaaccgccctgatctatcttcccgagacgaaattcctgttgttgtgggaagagccaataatcactctgaatctgtgcagcggcaaatttctgtctatcccaagatcacttcaggtgttcgaggagacaggaattagtcattcagaattcctgcatcgacagcacactgaagaagggggaggccccttgggaggccctctaaagttcagtaacccatgcattctctggctacatgccgatcaggctgtgctcgatgagagactggataaacgtgtagacgatatgctcgctgcagggctgttggaagaactacgcgatttccaccgcagatataatcaaaagaacgtttctgaaaacagccaggattaccagcatgggatcttccagtcaatcggattcaaggaatttcatgagtatctgattaccgaaggaaaatgtactctggagacatctaaccagcttcttaagaagggcattgaagccctaaaacaggtcacaaagagatatgcgcggaagcagaatagatgggtgaaaaacaggttcctcagtaggcccggcccgatcgtgccacccgtatatgggctggaagtaagcgacgtcagcaagtgggaggagtcggtcctagagccagctttggagatagtccagtcatttatccaagggcacaaacctacagccactccgatcaaaatgccgtataacgaggctgagaacaagcgctcctaccacctgtgtgatctctgtgaccgtattattattggggaccgagagtgggccgctcacatcaagtccaagtcccaccttaaccagttgaagaaacggcgtcggctggactccgacgcggtgaataccattgagtcccagagtgtgtcccccgatcataataaagagcccaaggagaagggcagccccgggcagaatgatcaagagctgaaatgtagcgtgtag

SEQ ID NO: 17699 - DNA, 828 bp, synthetic construct
  source 1..828: mol_type = other DNA; note = Synthetic coding sequence
atgtctgccgaggtgaaagtgaccggtcagaatcaggagcaattcctactccttgcgaaatctgcaaaaggggcagcattagcaactctgatccatcaagtgctcgaggcacccggtgtctatgtgttcggagagctactggatatgcccaatgtgcgggaactggccgagtccgattttgcctcgactttccgcctgctgaccgtgtttgcgtatgggacgtatgctgactacttagctgaggcccggaacctgcctccacttacggaggcacagaagaataaactgagacaccttagcgtggtcaccctcgctgccaaggtgaagtgcattccgtatgccgtcttgctggaggccctcgctctgagaaacgtgagacagttagaggatcttgtgattgaggccgtttacgccgatgtgttgcgcgggagcctcgaccagaggaaccagagactcgaggtcgactattccatcggcagggacatccagagacaggacctgagtgccatagcacggacgctccaagaatggtgtgtcggatgtgaagtcgtactttcagggatagaggagcaagtaagcagggccaaccagcataaggagcagcaattgggcctcaagcagcaaatcgaatcggaggtcgccaatctgaaaaagaccatcaaagttaccactgccgcagctgcagccgcaacctctcaggatcctgagcagcatctgaccgagctgcgcgagccggcccccggaaccaatcagaggcagccgtcgaagaaggcaagtaagggcaaaggactgagaggaagcgccaagatttggtccaagtcaaactag

SEQ ID NO: 17700 - DNA, 1692 bp, synthetic construct
  source 1..1692: mol_type = other DNA; note = Synthetic coding sequence
atggagacggctaaacagaaagcgttggaggtcgctaaccgactgtaccaaaaagaccttcgagcgcctgatgtggttatcggggccgataccatcgtgaccgtaggggggctgatcctggaaaagcctgtggacaaacaagacgcttatagaatgctctctagactgtcaggaagggaacattcggtctttacaggggtggccatcgttcattgctcctccaaggaccatcagcttgacacacgagtcagcgaattttacgaggaaactaaggtgaagttttccgagttatcagaggaactgttatgggaatacgttcactccggggaacccatggacaaagccggtggttacgggattcaggctctgggcgggatgctggtagaaagcgtgcacggagacttcttgaatgtggtgggctttcctctgaaccatttctgtaagcaactagtcaaactgtactacccccctagacccgaagacctgcggcgctctgttaagcacgacagcattccggctgctgacacattcgaggacctttccgacgtcgagggaggaggtagcgaaccaacgcaacgagacgctgggtcacgcgacgaaaaggcagaagccggggaagcaggccaggcaacagccgaggcggaatgccacagaacgcgcgagactctccctccttttcccaccaggcttttggaacttatcgagggcttcatgttgtctaagggcctcctgactgcttgtaagctgaaagtgttcgacctcctaaaggatgaggcaccccaaaaggctgcagatattgcttctaaggtggatgcttccgcgtgcggaatggagagactcctcgatatatgcgccgccatgggtttactggagaaaacagaacagggatactctaacacagaaaccgcaaacgtgtacctagctagtgatggggaatattccctgcacggcttcatcatgcataataacgatctaacctggaacctgttcacttacttggagtttgcaattcgagaaggcacaaatcagcaccaccgtgctttagggaaaaaagccgaggatctattccaggatgcctattaccagagtcccgagactcgacttcgcttcatgcgagccatgcatgggatgaccaaactgacagcctgtcaggtggcgacagcctttaatctgtctcgattcagtagcgcttgcgatgtggggggctgcaccggtgccctggcaagagaacttgcccgtgagtatcccagaatgcaagtaacggtgtttgacttgcccgatatcattgagctcgccgctcatttccagccccctggtccacaggctgtacagatccatttcgccgccggtgacttttttagagaccctctgccttctgcagagctttatgtcttatgcaggatccttcacgattggccagatgacaaggttcataaactcctgtctcgcgtcgctgagtcttgtaaaccaggggccgggttactcctggtcgaaaccctccttgacgaggaaaagcgcgtggcacaacgggcactaatgcaatctttgaacatgctggtccaaacggaaggaaaagagcgatctctgggggagtaccaatgtttgcttgagttacacggctttcaccaggtacaggtggtgcatctgggcggagtactggacgctattctggcaaccaaagtggcgccctag

SEQ ID NO: 17701 - DNA, 828 bp, synthetic construct
  source 1..828: mol_type = other DNA; note = Synthetic coding sequence
atgtcagcagaggtcaaagttaccggacagaatcaggaacagtttttgctccttgccaagagcgcgaaaggtgccgccctggctacactcattcaccaggtccttgaggctcccggagtgtatgtgtttggggaacttctggatatgcccaacgtgcgcgaacttgccgagtcagacttcgcgtccacctttagactgcttacagtgtttgcctacggaacttacgccgactatttagccgaggctagaaatcttccccccctaacagaggcacagaagaacaagctgcgtcacctgagcgtggtgacgctggccgcaaaggtgaagtgcataccatacgcagtcctgctcgaggctctggctctccgcaatgtcagacaactagaggatctcgttatcgaggctgtgtatgctgatgtgctcagagggtcattggatcagcggaatcagagattggaagtggattactcaataggccgagacattcagcggcaagacctgagtgcaatagccaggactctccaggagtggtgcgtggggtgcgaggtggtgctgagtggcatcgaggaacaggtaagtagggcaaaccagcataaagagcagcagttggggctcaagcaacaaatagaaagcgaagtcgcgaaccttaaaaagacaattaaggttactactgcagcagccgcggccgccactagtcaggacccagagcagcatctcaccgaactccgggagccagctcccgggaccaatcagagacagccgtcaaagaaagcttctaagggaaagggcctcaggggctctgcaaaaatttggagtaagtccaactag

SEQ ID NO: 17702 - DNA, 999 bp, synthetic construct
  source 1..999: mol_type = other DNA; note = Synthetic coding sequence
atggaatatctggggggggggtcagctctggacctgctgaaaccagggccacttgaagagacctatatagccactatcctcagagagattttgaagggtttggactacttacattctgaacgcaaaatacatcgagatatcaaagccgccaatgtgctgctgagcgaacagggtgacgtcaagctcgccgattttggcgtggctgggcagctgaccgacacccagatcaagcgcaacaccttcgtgggaacacctttttggatggccccagaagtgatcaagcaatctgcctacgacttcaaagcagacatttggtcactaggtatcactgccattgagctggcgaagggagagccgccaaattcggacctccatcctatgcgcgtgttgttcctaataccaaagaactccccgcccaccttggaaggacagcattccaagccatttaaagaattcgtggaagcctgtctgaataaggatcctaggttcagacctacggccaaggagctgcttaagcataaattcatcacgagatacacaaaaaaaacatctttcctgactgagctgatcgaccggtacaaaaggtggaagtccgaaggccacggcgaagagagcagttcagaggacagcgacattgacggggaggctgaagacggtgagcaggggcccatctggacattccctccaacaatccgtccaagtccccacagtaaattacataagggcactgccctgcactctagccaaaagccagccgaacctgtcaaacgccagccaaggagccagtgtttaagcaccctggtgcgcccagtctttggcgagcttaaagagaaacataaacaatctggcggttcagtcggcgcgcttgaagagctcgaaaacgccttttccctggctgaggaatcctgcccaggcatttctgataagcttatggtgcacctggtcgaaagggtgcaaaggtttagtcataaccgcaatcacctcacaagtaccagatag

SEQ ID NO: 17703 - DNA, 279 bp, synthetic construct
  source 1..279: mol_type = other DNA; note = Synthetic coding sequence
atgaatttcactcctacacacacccccgtctgccgtaagcggacggtagtctcgaagcgaggcgttgcggtcagtggacctacaaaacgaaggggtatggcagacagcctggagagtacgcccttgcctagtccagaagataggcttgcaaagctgcacccttcaaaggagctcctggagtattaccagaaaaagatggctgaatgtgaggctgaaaatgaggacctgttgaagaaattggagctgtataaagaggcctgtgaaggacagcataagtag

SEQ ID NO: 17704 - DNA, 429 bp, synthetic construct
  source 1..429: mol_type = other DNA; note = Synthetic coding sequence
atggcccagaaggaaaattcatatccctggccttatggtcggcagaccgcgccctcgggcttgtctaccctgccccagagggttcttcgcaaagaacctgttacaccgtccgccttagtgctgatgagtagatccaatgtgcagcccacagcagcgcctggccagaaggtaatggaaaacagtagcgggacaccagatattctgacacgaaggcattttacgatcgatgacttcgagattggacgacctctggggaagggcaagttcggcaacgtctaccttgcaagggaaaaaaaaagtcacttcattgtggccctgaaggttctctttaaaagtcaaatcgagaaggaaggcgttgaacatcagttgcgcagagagatcgagattcaggcgcacctgcaatcgtggaggagctggcagatgctgtag

SEQ ID NO: 17705 - DNA, 501 bp, synthetic construct
  source 1..501: mol_type = other DNA; note = Synthetic coding sequence
atggatcaggaggattccgaaagtaaaaccgtctctgagcacggtgagagggactggatgaccgcgaagaaattttggaagcccggagattccctcgcccctcctgaagtagattttgaccgcctgctggcttcacttcaggacctgagcgagctggtcgtcgagggagatacccaagtcacccccgtgcccggcggagctcgactccgaaccctagagccaatccccctgaaactctacaggaatggaataatgatgtttgacgggcccttccaacccttttacgacccctcgacacaaaggtgcctgcgggatattctcgacgggtttttcccatccgagcttcagcgtttatacccaaatggtgtgccattcaaggtgattagttgtagtagtaaccatacctttggggactttgagggatccggcgatacgcagcccccccagaccccccctattctaaggggaagcagatgcactccctggggcacccccgtctag

SEQ ID NO: 17706 - DNA, 1473 bp, synthetic construct
  source 1..1473: mol_type = other DNA; note = Synthetic coding sequence
atgcagtccctggacgacgccactaagcagttagatttcaccaggaaaactctcgccgaaaaaaagcaggagttggacaagttgcggaatgagtgggcttcccacacagctgcgctgacaaacaagcacagccaagagctcacgaacgagaaagaaaaggcgctccaagctcaggttcaataccagcaacaacatgagcaacaaaaaaaggacctggagattctgcatcaacagaacatacaccagcttcagaaccggctgtctgaactggaagccgccaataaagatctcacagagagaaagtataagggagattctactattagagaactcaaggcgaaactcagcggagtcgaggaagaactgcaacgaacaaaacaggaggtgctgtcgctgagaagagagaatagcactctcgacgtggagtgccacgaaaaggagaagcatgtcaatcagctacaaaccaaggtggcagtactggagcaggagatcaaggacaaagatcagctggtacttaggacgaaggaagcatttgatacaatccaggagcagaaggtagttctggaggagaatggggaaaagaaccaggttcagctcggaaaactcgaagcgaccattaaatcgctgagcgccgagttattgaaggctaacgaaataatcaaaaagctgcagggagacttaaagaccctcatgggaaaactgaagctcaaaaacaccgtcacaatccagcaggaaaaactgctcgcagagaaggaggagaagctccagaaggaacaaaaagaacttcaggacgtcggccagagtctgaggatcaaagaacaagaagtgtgtaaactgcaggagcaactggaggcaacagtcaagaagcttgaggaatccaagcagttgttgaaaaacaatgagaagctcattacatggctgaataaggagctgaacgaaaatcagctggtcagaaagcaggacgtgctaggccctagtacgacccctccagcccattcaagcagtaatactattcgctccggcattagccctaatctgaatgtcgtggacgggaggctgacctacccaacatgcgggatcgggtacccggtttcctcagcttttgccttccaaaacactttccctcattccatctccgccaagaacacgagccaccctggatccggcactaaggttcagttcaatttacagtttactaagccgaatgcatcgctcggtgatgtgcagtctggagccactatttctatgccatgtagcacggataaagaaaatggagagaacgtcgggcttgagagcaaatatctgaaaaagagagaagactcaatcccattgcgtggcctgtcacaaaaccttttcagcaacagcgaccaccagagggacggcacgctgggagcactgcacacaagctccaagcccacagcgctcccaagcgcttctagcgcctacttccctgggcagcttccaaactcctag

SEQ ID NO: 17707 - DNA, 3015 bp, synthetic construct
  source 1..3015: mol_type = other DNA; note = Synthetic coding sequence
atgctgcgtaccgcagggcgcgacggtctgtgtcgcctgagcacttacctggaggagttagaagcagtggaactcaaaaagtttaagctctatctgggcaccgccaccgaactgggagagggaaaaatcccttggggatccatggagaaggctggccccttagaaatggctcagctgctgatcacccactttggcccggaggaagcgtggcgactggccttatccaccttcgagcggattaatcggaaagatctctgggaacgtggacagcgggaggatctggttagagacaccccccctggcggcccgagctcgctgggcaaccagtcaacatgcctgctagaggtgtctttggtcacgcctagaaaggaccctcaagaaacctatcgcgactacgtgcgccgaaagtttcggcttatggaagatagaaatgctaggctcggagagtgcgtcaacttgtcacaccgatacacacgactcctgctggtcaaggagcattctaatcccatgcaggtgcagcagcagttgctcgacactggtcggggccacgccagaaccgtcggacaccaggcttctcccattaagatcgaaactcttttcgagcccgatgaagagcgacccgagcccccccgcaccgttgtcatgcaaggcgccgcaggaattggcaagtccatgctggctcataaagttatgctggactgggccgatggcaagctgtttcagggcaggtttgactatctgttctatattaactgcagagaaatgaaccagtccgctaccgaatgttccatgcaggatctgatattctcctgttggcccgagccaagtgcccctctgcaagagttgatcagggtgcccgagagacttctgtttatcattgacggcttcgatgagttaaaaccttcatttcatgacccgcagggcccgtggtgtctctgctgggaggagaaacgtcctacggaacttctcttaaattccctaatcagaaagaaactacttcccgagcttagtctccttattaccacccgtcctaccgccctggagaaactgcaccgcttactggagcacccgagacacgtagaaatcctggggttcagtgaggccgaaaggaaggagtacttttacaagtactttcataacgcagaacaggccggtcaggttttcaactatgtccgagacaatgagcccctcttcacgatgtgctttgttccactcgtgtgctgggtggtatgtacttgcctgcagcagcagcttgaaggtggggggctgctaaggcaaaccagccggaccactacagccgtctacatgctgtacctgttgagtctgatgcagccgaagcctggagcccctcgcctccagcctcctccgaaccagaggggactctgcagccttgccgcagacggactgtggaaccagaagatactcttcgaggaacaagacctacgaaagcacggtcttgacggagaggatgtgagcgcattccttaacatgaacattttccagaaagatataaattgcgaacggtattactctttcatacatttatccttccaggagttttttgccgctatgtactatattctggatgagggggaaggcggagctgggcccgaccaggacgtgacccgtttactgactgagtacgcctttagtgagagatctttcctggcgctcacatctcgctttctgtttggtttactgaacgaggaaacaaggtcccatttagagaagagtttatgctggaaagtttctccccacatcaaaatggatcttttgcagtggattcagtccaaggcgcaatccgatgggtccaccctccaacaggggtcactggagttcttcagttgtttatacgagattcaggaagaagagtttatccagcaggcccttagccacttccaagtgatcgtcgtgagcaacatcgccagcaagatggaacatatggtgtcatctttttgtctgaagaggtgtcgctccgcccaggtcttgcacctatatggcgccacctatagcgcagacggagaggatcgtgctcgctgttcagcgggggcccacaccctcttggtacagcttcccgagcggactgtcttactggatgcctatagtgaacatttggccgctgccctttgtactaaccccaacttgattgaactgtcactgtacaggaatgctttaggctctaggggcgtgaagctgctctgccaagggctacgtcaccctaattgcaagctgcaaaacctgaggcttaagaggtgtaggatcagctcttctgcctgcgaggacctgagcgccgcattgatagccaataagaatctcactcggatggacctgtccggcaacggagtgggattcccaggtatgatgctgctgtgcgaaggccttcggcatccccaatgccgcctccaaatgattcaactaagaaaatgccaattggaatcaggcgcgtgccaggaaatggctagtgtgcttggcacaaaccctcaccttgtagagcttgacctaactggaaacgccctcgaggatctggggctccggctgttatgccaggggctcagacaccccgtgtgcagactgcgaaccctgtggctgaagatctgtcgactgaccgcagcagcatgtgacgagcttgcaagcacactgtctgtcaatcagtctcttagagaacttgacctttcactaaacgagctcggggacttgggggtgctgttgctgtgtgagggacttcggcaccctacttgtaagttacaaaccctgcgactgggcatctgccgtctgggctcagccgcatgcgaagggttatctgtggttctgcaggccaaccataacctgcgcgagctggatttgtcattcaatgacttaggtgactggggtctttggttgctggctgagggtctgcagcacccggcctgcaggctgcaaaaactttggctcttcggaatggacctcaacaagatgacacacagccgactcgcggctttgcgggtgaccaagccttatctggatatcggctgttag

SEQ ID NO: 17708 - DNA, 2517 bp, synthetic construct
  source 1..2517: mol_type = other DNA; note = Synthetic coding sequence
atgaccggagccgagatcgagcctagtgcacaggctaagcccgaaaagaaagcaggagaagaggtcattgccgggccagagagggagaatgatgtcccactcgtcgtgcggccaaaagttcgaacacaggccacgaccggggccaggcctaagacagaaaccaaatcagtgcctgcagcacgtcctaagactgaggctcaagccatgtccggagccaggccgaaaacagaagttcaggtcatgggcggcgctcggccaaaaactgaggctcaggggattacgggggctcgccctaaaaccgacgcccgtgctgttgggggagctcggtcaaagaccgatgcaaaggcaataccgggagcacggcctaaggacgaggcacaggcatgggctcagtctgaatttggtaccgaagccgtgagccaggccgaaggtgtgtcccagaccaatgccgttgcgtggcctctcgccaccgccgaatcgggatccgtgaccaaaagtaaggggttgagcatggaccgcgagcttgtgaatgtagacgcagaaaccttcccaggtacgcagggtcaaaaaggaatccagccttggttcgggcctggagaggagactaacatgggttcatggtgctacagccgacccagggctcgcgaggaagcctctaacgagtcgggcttttggtccgccgacgagacatcaacagcttccagtttctggaccggggaagagacatccgtgagaagctggcccagagaggaaagcaacacccggtccagacaccgcgccaagcaccagacaaacccacgctcccggccccgttccaaacaggaggcctatgtggacagctggagtggctcagaagatgaggccagtaatccctttagcttttgggtgggcgagaatacaaataatctctttcgccccagggtgcgagaagaggcaaatattcggtctaagctaagaactaacagagaagactgctttgaaagcgagtccgaagatgagttttacaagcagtcttgggttctgccaggagaggaggctaacagcagattccgccaccgcgacaaggaggacccaaacactgccttgaaactccgcgctcagaaggacgtcgattctgatcgtgtgaaacaggagccacggtttgaagaggaggtgatcattggatcctggttctgggctgagaaggaggcctcactagagggtggtgcatctgccatttgcgagagtgaacccggcacagaagagggtgccattgggggcagtgcctattgggctgaggagaaatctagcctcggggccgtggcccgggaagaggccaaacctgagagcgaggaggaagctatcttcggaagttggttttgggatagagacgaggcctgcttcgacctcaacccgtgccctgtgtataaagtgtctgacaggtttcgggacgcggctgaggaattgaatgcgtcgagtaggcctcaaacttgggacgaagtgaccgttgagtttaagccaggcttattccatggagtggggtttaggagtacatctccattcggcataccagaagaggcaagcgaaatgctggaggctaaaccaaagaacctagagctgtcacctgaaggagaggagcaagaaagtctcctgcagccagatcagccttctcccgagttcacttttcagtatgatccatcgtaccgctctgttagggagattcgggagcatctgagagctcgggagagcgcggagtctgagagctggagttgctcttgcatccaatgcgagctgaagataggctccgaggagtttgaagagttccttcttctgatggacaagatcagggatccattcatacacgaaatcagtaagatagccatgggaatgcggagcgcatctcagtttactagagacttcatccgcgactccggggtggtgagcttgattgaaactttgctcaattacccctcatcacgagtaagaacctctttcctggaaaacatgattcatatggctcccccataccccaatctgaacatgatcgaaaccttcatctgccaagtctgcgaagagacactggctcacagtgtggattcactggaacagctgaccgggatccggatgctgaggcatcttacaatgactatcgactaccataccctgattgccaattacatgtccgggtttttgtctcttctgaccaccgctaacgcgaggactaagttccacgtgctcaaaatgctgctcaatctgtcagagaaccccgccgtggcgaaaaagctattcagcgccaaggcattgagcattttcgttggactttttaacattgaggaaactaatgataacatccagatcgtaattaagatgtttcagaacatcagtaacattattaaaagcggcaagatgagcctgatagatgatgattttagtctggagccactgataagtgccttccgcgagttcgaggagcttgccaagcagttgcaggctcagattgacaatcagaatgacccagaagtgggacagcagtcctag

SEQ ID NO: 17709 - DNA, 165 bp, synthetic construct
  source 1..165: mol_type = other DNA; note = Synthetic coding sequence
atgggaaactcagacagccagtatactctgcaaggctccaaaaatcattctaataccattaccggggcgaaacagatcccctgttcacttaaaattaggggtattcacgcaaaagaggaaaaaagcctgcacgggtgggggcatggatccaatggcgctgggtag

SEQ ID NO: 17710 - DNA, 1269 bp, synthetic construct
  source 1..1269: mol_type = other DNA; note = Synthetic coding sequence
atggcttcactcagcagggccttaagggttgccgcagcccacccccgccaatcacctacacgcggtatgggcccctgcaacctgagcagcgctgcaggccccaccgccgagaagtctgtgccctaccagagaactctgaaagagggacagggcacctctgtggttgcacagggcccaagtagaccactgccttcaactgccaacgttgttgtcatcggcggtggcagcctggggtgtcagacactttaccacctggccaaattgggcatgtctggtgccgtactgctcgaacgcgagcggctcacctctggcacaacatggcacacggcaggcctgctttggcagctgagaccatcagatgtagaggtggaactgcttgctcatactcgacgagtcgtaagtagggagctggaggaagagaccgggttacataccggctggatacagaatggtggactgtttattgcttccaataggcaacggctcgacgagtataagcgtcttatgtcgttaggaaaggcgtacggagtggagagtcacgtactgagtccagctgaaaccaagaccttgtaccctctaatgaatgtggatgatctgtacggcactctgtacgtccctcacgacggcactatggatcccgctggaacctgcacaactcttgctcgcgctgcatccgcaaggggagcccaggtgattgagaattgcccggtaactggcattcgtgtatggacggacgacttcggagtacgccgggtggccggggtggagacccagcacggcagtattcaaacgccttgcgttgtgaattgtgctggcgtttgggccagcgccgtaggacgtatggctggtgtcaaggtccctctggtggcaatgcaccatgcctacgtggttactgagaggattgagggcattcaaaacatgcctaacgtgcgcgaccacgacgccagcgtgtatttgcggctacagggagatgccctgtccgtgggaggctacgaggcgaacccgatcttctgggaagaagtaagtgacaagttcgcgttcggcctcttcgacctggactgggaggttttcacccagcatatcgaaggtgctataaatcgtgtccccgtgctggagaagaccggcatcaagtcgactgtttgtggccctgagagttttacccctgaccataagccactgatgggtgaagccccagagctgcgagggttcttcctgggttgtggctttaactccgccggtgagtctgggcaggcactacttgccccatag

SEQ ID NO: 17711 - DNA, 327 bp, synthetic construct
  source 1..327: mol_type = other DNA; note = Synthetic coding sequence
atgtcaatgttgaaaccatcgggactgaaggcacccacaaaaatactgaaacccggtagcaccgccctcaagacccctaccgctgtcgtcgcccccgttgaaaaaacaatcagtagtgaaaaggcttccagcacaccatcgtccgagacccaagaggaattcgtggatgacttcagagtgggagaaagggtgtgggttaacggcaacaagcccggcttcatccagtttctgggagagactcagttcgccccgggtcagtgggcgggaattgtgctggatgaacccatcggcaaaaacgatggctctgtggcaggcgtcaggtattag

SEQ ID NO: 17712 - DNA, 2148 bp, synthetic construct
  source 1..2148: mol_type = other DNA; note = Synthetic coding sequence
atgaaacgcggccggctgcctagctcatcagaagacagcgacgataatggcagtctttccacaacgtggtcccaaaatagccgtagtcagcatcgcagaagctcgtgttccaggcatgaggaccggaaaccgtctgaggtttttcggacggatctgattacagccatgaagctgcatgacagctatcagttaaaccctgacgaatattatgtgctcgccgacccttggcggcaggagtgggagaagggtgtgcaagtgcctgtttcgcccgggactataccccagccggtcgcccgagtggtatctgaggagaagagccttatgttcatacgccctaaaaaatatatcgtttcttccggttccgaaccaccggagctggggtacgtagatattaggacactagctgacagtgtctgtagatatgacctcaacgacatggatgcggcttggctcgaactgaccaacgaggagtttaaggaaatgggcatgccagagttagacgaatataccatggagcgggttctggaggaattcgagcagagatgttatgacaacatgaatcatgcgatcgaaaccgaagaggggctcggtatagagtacgatgaagacgtggtgtgcgacgtatgccagtctcccgacggggaagacggaaatgaaatggtgttttgcgataagtgcaatatttgcgtgcaccaagcatgttatggcatcctgaaggtgcccgaggggagttggttgtgcagaacctgcgctctgggcgtgcaacctaaatgtctgctgtgtcccaagaaaggaggggccatgaaacccactcgatccgggaccaagtgggttcacgtgagctgtgccttgtggattccagaggtatcaataggcagcccagagaaaatggagccgatcactaaggtgagtcatataccctccagcaggtgggccctggtctgtagcctgtgcaatgagaagtttggcgcctcaatccagtgttcggttaagaattgtaggactgccttccatgtgacctgcgctttcgatagggggttggagatgaagacaattcttgctgagaatgacgaagtcaagttcaaatcctactgtccaaagcactcaagccatcggaaaccagaggagtcactgggcaagggcgctgcccaggagaacggcgcccctgaatgtagccctcgaaaccctctggagcctttcgcaagtctcgagcagaatagggaagaagcccaccgcgtgtccgttaggaagcagaagttgcaacaattagaggacgaattttacactttcgttaacctcctggatgtcgccagggccctgcgcttgccggaggaggttgtcgatttcttgtatcagtattggaagctcaagcgcaaggtcaacttcaataaacccctgatcacccccaaaaaggatgaggaggacaacctggccaagcgagagcaggatgtgttattcagaaggctgcagctgtttacacaccttaggcaggacctagagagagtgaggaatctgacctatatggtgactcggcgtgagaaaatcaagcgtagtgtttgtaaagtgcaggaacaaattttcaatctctacaccaaacttctggaacaggaacgggtgagtggcgttccatcgtcatgctcttcgtcgtccttagagaatatgctgctctttaattctccatccgtgggaccagacgcccctaaaattgaggatctgaagtggcattccgcctttttcagaaagcaaatggggacctccctggtccactcactgaagaagccacacaagcgcgatcccctgcagaattctcctgggagcgagggaaaaaccttactgaagcagcccgatctatgtgggagacgtgagggcatggtggtgcctgaaagcttccttgggcttgagaaaaccttcgcggaagcccgtctgatcagcgcccaacagaaaaacggggtggtgatgccagatcatggtaagcggcgggacaacagatttcattgcgaccttattaagggggacctgaaagataagtcatttaagcagagccacaagccactccgatctactgacgtgtcacaacgccacttagacaacactcgggcggccgcgatttggcggttccgcgtcatctggcaaggaccagccgcctag

SEQ ID NO: 17713 - DNA, 162 bp, synthetic construct
  source 1..162: mol_type = other DNA; note = Synthetic coding sequence
atgggacgacgcagcaccagtagtaccaagtctggaaaatttatgaatccgaccgatcaggcccgcaaggaagcgcgcaagagagagctcaagaaaaacaagaaacagaggatgatggtcagggccgcggttctgaagatgaaagatcccaagcagatttag

SEQ ID NO: 17714 - DNA, 1035 bp, synthetic construct
  source 1..1035: mol_type = other DNA; note = Synthetic coding sequence
atgaccacgagaagtgtgctggatgtggaaacttttgtggccgatatcctgaagggtgagaatctgtccaaaaaagccaaggagaagcgcgagtccctgatcaagaagattaaagatgtgaaatcgatttacctgcaggagtttcaggacaaaggcgatgccgaggatggagaggagtacgacgatcccttcgccgggccgcccgataccatctctctggcctcggagagatacgacaaagacgacgaggcccccagcgacggggcccaattcccaccgatcgccgcccaggaccttccctttgtactcaaagctggatacctggagaagcggagaaaagatcatagcttcctgggatttgagtggcaaaaaaggtggtgcgccctgtccaaaacggtgttctattattatggatcggacaaggacaagcagcagaaaggcgaatttgctatcgacgggtattccgtcagaatgaacaacaccctgcggaaagacggaaagaaagactgctgctttgagattagcgctccagacaagagaatataccaattcaccgccgcctcgcccaaagatgccgaggaatgggtgcagcaactcaaattcgtgctgcaggatatggagtccgacatcatacccgaggactacgacgagagaggagagctctacgacgatgtagaccatcctctgccaatctcaaacccgttgacttcatcacaaccaatcgacgacgagatctatgaagagctgcctgaggaggaagaggacagcgctcccgttaaggtagaggaacagcgtaagatgagtcaggattctgtgcaccacacgtcgggtgacaagagtacagattacgcgaatttttaccagggtttatgggactgtactggagcctttagcgatgagttgtcatttaagcgaggcgatgtgatttacatccttagtaaggagtataatcggtacggttggtgggtgggcgagatgaaaggcgctattggactcgtgccgaaagcatatataatggagatgtatgacatctag

SEQ ID NO: 17715 - DNA, 2868 bp, synthetic construct
  source 1..2868: mol_type = other DNA; note = Synthetic coding sequence
atggaagtggggagtgaggaggaaaagtgggagaaacttgacgcagaatttgatcactttgttgtagacatgaagcccttcgtgctgaagctccctcaccggacggagcgccagcgatgtgccctctggattcggaagctctgcgagcctagtggaaccggggctggcattatggggaggaaaaatcgaaatttatacgctaagctgttgttacatatgctcaagaggggcgcattggagggtccattcacccatagacctgagccaggcacacttaagatacttccaagttacatgtcaatctactttgatgagcccaaccccgccagagccaaaggatcttctcctgagggcctgcccgcctgggtgttgggcgaattggagaccagcgaacataagttgaatgaaagttggaagctctccagtggcgaggataacactctggttcagagcccaaccgacgtgtatagtcgtgaacaatatactggaaagctgagagttcggagccactcgctctcacctacacaccgcgaagatggacagaacattacccccaagatctgcgaggtttattccaaaaaatccccggtgagcttggacgacagcgatattgaggcgagactgaactcgtggaatctgggaatcgagaaccctcggtacctgcgccagaaacctattcccgtatccctcatgactccgaaattttctcttcgcaaaagtagctctttccatgatgaccattttctctccagaatccgagagaaagagttggacatgaaaactaagatgatggaggcaaagttccacgaagagaagctcaagttgcaacagaaacatgacgccgacgttcagaaaatcctggaacggaagaataatgagattgaggagctgaaaacgctgtatcgcagcaaacaacacgagactgaagaaactatcagaaaactggagaagaaagtgcagaccctgataagagattgccaagtgatacgggagacaaaagaagaccagatcgctgaactcaagaagatctgcgaacaaagtactgagtctctaaacaatgactgggaaaaaaagctacacaacgccgtggccgagatggagcaagaaaaatttgacctacaaaaacagcacacggaaaacatccaggagctgttggaggacactaacgtacgcctgaacaagatggagtccgaatatatggcccagactcagagcactaaccatatgatcaaggagctggaggcacgagtgcagcagctaaccggagaagctgagaatagtaaccttcaacggcagaaactgatccaggaaaaagcggaattagagaggtgctatcaaatcacttgttctgagttgcaggaagtgaaggcacgccgtaatactctgcataaggaaaaagaccatcttgtgaacgattacgaacagaacatgaaactcctgcagacaaagtacgacgccgatattaaccttctcaagcaagagcacgccctgagcgcaagcaaggcatcatcgatgattgaagagttggaacagaatgtctgccagcttaagcagcagctgcaggaatcggaactccagcggaagcagcaactccgtgaccaggagaataaattccagatggaaaaaagccacctgaagcatatctacgagaaaaaggctcacgatctccagagtgaactggataaggggaaggaggatacccagaaaaagattcacaaattcgaggaggccttgaaagaaaaggaggagcagttgacgcgcgtcaccgaagtacagcgattacaggcccagcaggccgacgcggcactcgaggaattcaagcgacaggtggaactcaactccgagaaggtttatgcagaaatgaaagagcaaatggaaaaagtggaagcagatttaacccgctcaaagagcctcagggagaagcagagcaaagaatttctatggcaacttgaggacattcgccagcgctatgaacagcaaattgtcgagttaaagctcgagcacgagcaagagaagacccacctattgcaacaacacaacgctgaaaaggactcattagtacgggatcatgagcgcgagatagagaatctcgagaagcaactgagagcggcaaatatggagcatgaaaaccagattcaggaattcaagaagagggatgcccaggtcatcgctgacatggaagcccaggtgcataagctccgggaagagttgataaatgtaaattcacaaaggaaacagcagcttgtcgaactggggttactccgggaggaagagaaacagagagccacacgcgagcacgaaatcgtcgtgaataaactcaaggcagagtcagagaaaatgaagatcgaactgaagaagacgcacgcagctgagacggagatgacattggagaaggctaattcaaagctgaagcagatcgaaaaagaatacacacagaagctggccaagtccagccagataatcgccgaactgcaaacaacaatctcaagcctgaaggaagaaaattcgcaacagcagcttgcagcagagcgcaggttacaggatgtaaggcagaaattcgaagacgagaagaagcagctgatccgcgacaatgatcaggctatcaaggtcctccaggatgaattggagaacagaagtaatcaagtgagatgcgccgaaaaaaaactgcagcataaagaactcgaatctcaggaacaaatcacctatatcaggcaggaatatgaaaccaagctgaaaggattgatgcctgcatctcttcgccaggagctagaagacaccatttccagtctcaaatctcaggttaatttcctccagaaacgggctagcatactgcaagaggagctgactacttaccaggggagacggtag

SEQ ID NO: 17716 - DNA, 834 bp, synthetic construct
  source 1..834: mol_type = other DNA; note = Synthetic coding sequence
atgctctctcaaaaggaagtggccgttgccgacgccaaaaaaagtctggaactgaatccaaacaactccacggccatgctaaggaaggggatttgcgaataccacgagaaaaactatgcggcagcattagaaacttttaccgaaggtcagaaactcgacagcgccgacgccaatttcagtgtgtggattaaaagatgtcaagaggcccagaacggttccgagagtgaggtgtggacccaccagtccaagattaagtacgactggtaccagactgagagccaagtggtgataaccctgatgataaaaaacgtgcagaagaacgacgtgaacgtggaattctccgaaaaagagctgagcgcgctggtcaagttgccttccggtgaggactacaacttgaagctggaactgctgcaccctatcatacccgagcagtccacttttaaggtgctgtcaaccaagatcgagattaagttgaaaaagcctgaggcagtgcgatgggaaaaattggagggtcagggggacgtgcccacccccaagcagttcgtagcagacgtgaagaacctttaccctagcagttcaccttatactagaaattgggataaacttgtaggagaaatcaaggaagaagagaagaatgagaagcttgaaggcgatgcagccttgaatcgcctgtttcagcagatctacagcgatggaagcgatgaggtgaagagagccatgaataagtctttcatggaatctggagggactgtgttatcaaccaactggtctgacgtcggtaaaagaaaggtggagatcaaccctccagacgatatggagtggaagaaatattag

SEQ ID NO: 17717 - DNA, 807 bp, synthetic construct
  source 1..807: mol_type = other DNA; note = Synthetic coding sequence
atgggatccgcaaaatcagtccctgtaactccagctcgaccacctcctcacaataagcatctggctcgggtggccgacccgagaagtccgagcgccgggattttgcgcactcccatacaggtggagtcgtctccccagcccggactgccagctggcgaacagctagagggactgaagcacgcccaggacagtgatccacgctcccccactctaggtatcgcccgaacacctatgaagacctcttcgggagatccccccagcccactagtaaaacagctttccgaggtttttgagacagaagacagtaagtccaacctcccccccgaacctgtgcttcctccggaggccccgctgtcttccgagttagacctgcccctcgggacacagttatccgtggaggagcagatgccaccctggaaccagacggagttcccaagtaagcaggttttctctaaggaagaggcccgccagcctaccgagactcccgtcgcgtcccagagctcggataaaccaagccgcgaccccgaaacaccccgtagctcaggatccatgcgcaatcgttggaaacctaattcctccaaggtcttgggacgcagtccacttaccattctgcaagatgacaattcacctggaaccctaaccctccgacagggcaagagaccttcccctctgtcagaaaacgtgtccgagctgaaagagggcgcgattctcggcactggccggctcctgaaaactggcggccgcgcatgggagcagggtcaggatcacgacaaagagaatcaacatttcccacttgttgaatcctag

SEQ ID NO: 17718 - DNA, 1140 bp, synthetic construct
  source 1..1140: mol_type = other DNA; note = Synthetic coding sequence
atggtgtttaagctgaagaccaaagaggagcagcatagcatgctaggcagtgggttcaaagctgagagactgagggtcaatctgcgcctcgtgattaatcggcttaaactcttggaaaagaaaaagacagagttagctcagaaagctcgcaaggagatcgcagattatctcgcagcaggaaaggatgagcgagcacgaatcagggtggaacacatcatacgggaggactatcttgttgaggcaatggagattctggagctctactgcgatctgctgctggctcgctttggactcatacaatcaatgaaagagctggattctggattagccgagagcgtgtcaacgcttatctgggccgccccacgattacaaagcgaggtggccgagctgaagatagtggctgaccagctatgcgcaaagtatagtaaggaatatggaaaactctgccgcacaaaccagataggtaccgtgaatgaccgactcatgcataaactcagcgtggaagcccctcccaaaattctggtggaacgatatctcattgagatcgctaaaaactacaatgtcccatacgaaccggactccgtggtcatggccgaggccccacccggtgttgagaccgatctgattgacgttgggtttaccgacgatgtcaagaagggaggaccaggccggggcggttcgggaggctttaccgctccggtcggagggcctgatggtactgtgcctatgccaatgcccatgcccatgcctatgccgagtgccaacacgcccttcagctatccgctgcctaaggggccctcagatttcaacggactgccaatgggcacgtaccaggcatttcccaatatccacccacctcagatcccagccactccccctagctatgagagcgttgacgacatcaatgctgataagaatatatccagcgctcagatcgtgggacctggcccgaaaccggaggcttctgctaaacttccttcaagaccagctgataactacgataactttgtcctgcccgaactgcccagcgtgcctgacaccctgcccacagcgagcgcgggcgcttccaccagtgcaagcgaggacatcgactttgacgacctgtccagaagatttgaggaactcaaaaagaagacgtag

SEQ ID NO: 17719 - DNA, 903 bp, synthetic construct
  source 1..903: mol_type = other DNA; note = Synthetic coding sequence
atggccagaccactgagcacgcctagtagttcccagatgcaagcgcgcaagaagcataggggtatcattgaaaaaaggcgtagggatagaatcaattcctctctgtcagagctgcggaggctggtgcctaccgccttcgagaaacaggggagcagtaagctcgaaaaagctgaagtgctgcagatgacagtagaccatcttaaaatgctgcacgctacaggaggcaccggctttttcgatgcccgggcgttagccgtcgattttcggtcaatagggttccgtgagtgtctgaccgaggtgatccggtaccttggcgttctcgaaggaccttcctctcgcgccgacccagtccgtattcggctgctgagtcatcttaattcatatgccgcggaaatggagccttcccctacacccacaggaccactggccttccccgcctggccttggagtttcttccattcatgccctgggctcccagcccttagcaatcagctcgcgatccttggccgagtcccttctccagttctccctggtgtttcctcacctgcctaccccattcccgcgctgcggaccgcccccctgaggcgggccaccggcatcatcctcccggccagaaggaatgtacttccgtctcggggagcgagcagcacccgccgcgcccgaccactagagcgacctgcaacccccgtgcccgtggcccctagcagccgggctgcgcgcagctcccacattgcccccctccttcagagtagttcacccaccccacccggcccgactggctcagctgcctacgtcgccgttccaacccctaactcatcatctcctggacctgcaggtagacccgccggggccatgctgtatcactcctgggtgtccgaaattaccgagatcggggcattctag

SEQ ID NO: 17720 - DNA, 318 bp, synthetic construct
  source 1..318: mol_type = other DNA; note = Synthetic coding sequence
atgagtgtggtgccgcctaatcgaagccagactggctggccaaggggagtgactcaattcgggaacaagtatatccagcagaccaagcccctgaccctggagagaacaatcaatttatacccattgaccaattatacattcgggaccaaagaaccgctgtatgagaaggactccagtgtcgccgccagatttcaaaggatgcgggaggaatttgacaagatcggcatgaggaggacggtggaaggcgtgttgatcgttcacgaacatcggcttcctcacgtgctgttacttagccggtttaacttcatttacaactag

SEQ ID NO: 17721 - DNA, 588 bp, synthetic construct
  source 1..588: mol_type = other DNA; note = Synthetic coding sequence
atggggaactccgactcacagtataccctgcaaggcagcaagaaccactccaatacgatcaccggggctaagcagattccatgtagcttaaagattcgggggatccacgctaaggaagaaaagagcttacacgggtggggacacggctctaacggagcgggttataagagtcggagtctggccaggagttgcctgtcccacttcaagagcaaccagccctatgcctctagactcggtgggcccacttgcaaagtaagcagaggcgttgcttactctacccatagaacgaatgctcctgggaaagacttccaggggatctccgcagccttttccacagaaaatggttttcattcagtggggcacgaactagccgacaatcatataacatccagagattgcaatggacatctcctaaattgttacggtaggaatgagtcaatagcaagtaccccccccggtgaggataggaagtcaccccgcgtactgatcaagaccttaggcaagctggatgggtgccttagagttgaatttcacaatggcgggaaccctagcaaggtgccagctgaagattgcagcgaacctgtctag

SEQ ID NO: 17722 - DNA, 1581 bp, synthetic construct
  source 1..1581: mol_type = other DNA; note = Synthetic coding sequence
atggttcccggcgaggagaatcaactggtcccaaaggaagacgtcttttggcgatgccggcagaacattttcgacgaaatgaaaaagaagtttctgcagattgaaaacgccgcagaggaaccacgtgttctctgcatcatacaggacaccacaaactctaagacggtcaatgagcggattaccttaaatcttcctgcatcaacgcccgtgagaaaactctttgaggatgtggctaacaaggtcggatatataaacggaacctttgaccttgtgtggggtaacggaataaatactgctgatatggcacccctcgaccacacgagcgacaagtccctgttggacgcgaactttgagcctggaaagaaaaatttcctccacttaacagataaggacggcgaacagcctcagatattgttagaggattcttctgccggcgaagattctgttcatgaccgctttattggtccgttaccccgggaaggatccggtggtagcacatctgactacgtgagccagtcatactcgtactccagcatcctgaacaaatccgaaaccggatatgtaggacttgtcaaccaggcaatgacgtgttacctgaactccctactgcagactctcttcatgactcctgagttcaggaatgcactttacaagtgggaattcgaggagtcggaagaggatccggttaccagtattccataccaactccagaggttgtttgttttgcttcaaaccagcaagaaaagagcaattgaaactaccgacgtaactagatcctttggttgggacagtagtgaagcttggcagcaacatgatgtgcaagaactttgcagagtcatgtttgacgcgctcgagcagaaatggaaacagacagaacaagctgatctgatcaatgagctatatcaggggaaattgaaggactacgtgcgttgcttggaatgtggttacgagggatggcggatagatacctaccttgatatcccactcgtaatcaggccctacggatcttcgcaagcatttgcctctgtagaggaggccctacatgcttttatccagcccgagatcctggacgggcccaatcaatatttttgtgagaggtgtaaaaaaaaatgcgatgcgagaaaaggtctgaggtttctgcatttcccctacttgctgacgttacagcttaagcgattcgattttgactacaccacaatgcaccgcatcaaattaaatgaccgaatgacatttccagaagagcttgatatgagtacctttattgacgttgaggatgagaagtccccccagactgagtcgtgtacggactcaggcgcggagaacgagggaagctgccacagcgaccagatgagtaatgacttttctaatgacgatggcgtggacgaggggatctgcctggagacaaacagcggtacggagaagatttccaagtctggcctggaaaagaactcgctaatttacgaacttttctccgtgatggtgcactcagggagtgccgccgggggccattactatgcgtgcatcaagtcatctgtgatgtcctctgggactgcttcaatgatcaatatgagtgcagggtag

SEQ ID NO: 17723 - DNA, 963 bp, synthetic construct
  source 1..963: mol_type = other DNA; note = Synthetic coding sequence
atggggaaagagcaggaattgctggaagccgctcggacagggcatttgccggccgtcgagaagttgctgagcggcaaaagattgagcagcggattcggcgggggcggtggtggagggtccggcggcggcgggggggggagcgggggcgggggcgggggactagggtcctcttcacaccctttgtcatccctgctaagcatgtggagaggcccaaatgtcaactgtgtggatagtaccggatataccccactccatcacgctgctctcaatggacacaaggacgtggtggaggtcttgctccgtaacgacgcactgacaaatgtagcagatagcaaggggtgttatccactacacctggcagcttggaaaggcgatgctcagatcgtccgactcctgatccaccaggggcctagccatacaagagtgaatgagcagaacaatgataatgagacagcccttcattgtgcggcacagtacggtcacaccgaggtggtcaaggtgctgcttgaagagctgaccgacccaacaatgcgcaataataagtttgaaacaccgttggatctggcggctctgtacggaaggttggaggtggtgaagatgctgctgaatgctcatccaaacctgctaagctgcaatacgaaaaaacatacacccctgcatcttgcggcccggaatggccacaaagctgttgtccaggtgcttttggacgcagggatggatagcaactatcagaccgaaatgggtagcgcattacacgaggctgcacttttcggcaaaacagatgttgtccagattctcttggcggccggcacagatgtcaacatcaaggacaatcacgggctcactgccctagacacagtccgcgagctaccaagtcagaaatcccagcaaattgctgcactgatcgaggacctggatacccttcagttctatttcattagctgccccttccagggactctag

SEQ ID NO: 17724 - DNA, 660 bp, synthetic construct
  source 1..660: mol_type = other DNA; note = Synthetic coding sequence
atggtgattcacaagaaccctccggatactcctactgaaagccagtttacgaggttcctgtgtagttcacctttagaagccgagacccctcctaatggtcccgattgcggctatggctcatttcatcagcagtactggctcgatggcaagatcatcgcggtgggcgttattgacattctgccaaactgtgtgtcaagtgtgtatctgtactacgaccctgattatagctttttgagcttgggcgtctactccgcactgcgcgaaatcgccttcactagacagctccacgaaaagacctcacaattgtcatattattacatgggattttatattcactcctgccccaaaatgaaatataaagggcagtaccggcccagcgacctgctctgcccagaaacttatgtgtgggtgcctatagaacagtgcctgccttctctggagaactccaagtattgcaggtttaatcaggaccctgaggccgtggatgaggatcgaagtacagaaccagacagactgcaagtgttccataaacgggctattatgccttatggggtttataagaagcagcagaaagacccctcagaagaggctgctgtacttcagtatgcgtcacttgtgggccaaaagtgtagtgagcggatgctcctcttcaggaattag

SEQ ID NO: 17725 - DNA, 1791 bp, synthetic construct
  source 1..1791: mol_type = other DNA; note = Synthetic coding sequence
atgcagcagaaggagctcggcactttcgcgcagtcatccatcgcattacatcaccagtataatcctaagttccagacactgttccaaccctgcaatctgatgggtgcaatgcagcttatcgaggacttttcaactcacgtctctatagactgtagtccccacaaaacagtgaagaaaactgcaaacgagttcccctgcctgccaaagcaggtcgcttggatcttggcaacatctaaagtttttatgtacccagaacttctgcccgtgtgttcactcaaagccaaaaatccacaggacaaaatactgtttacaaaggctgaagataacaaatatctgctgacatgcaagaccgcccgccagctaactgtccggattaaaaacctgaacatgaaccgggcacccgacaacataattaaattctacaagaagaccaaacagctgcccgtgctgggtaagtgttgcgaagagatccagccccatcaatggaagcctcctattgaaagagaggaacatcgcctcccattttggctcaaggccagcttaccatctatacaggaggagttgcgccacatggcagacggtgccagggaagtagggaacatgaccggaaccactgagatcaactcggaccaaggactggagaaagacaactctgaactggggtctgagacgcgctacccactgttactgcccaagggagtggtacttaagcttaagcctgtggccgatagattccctaaaaaagcatggcgacaaaagcgctcatccgtccttaaaccattgctgatccagccctcaccatctctccagccatcctttaatcccggcaaaaccccagctcaaagcactcactcggaagccccccctagtaagatggttctccggatcccccacccaatccagcccgccaccgtcctgcagacagtcccaggagtgccacctctcggggtcagcggaggggagtcttttgaaagcccagccgcattaccggctatgccccccgaagccagaaccagttttcccctttcggaatcccagaccctgctgagctcagccccagtccctaaagtgatgatgccctcgcccgcctcatctatgttccgaaagccttatgtgaggaggcgtccttccaagcggagaggagctcgggctttccggtgcattaagccggcccccgtgatccaccctgcgtccgtgatttttactgttcctgctacaacggtcaagattgtttctctgggaggcgggtgcaacatgatccaacccgtgaatgccgccgtggcccagtccccccaaaccatccctatcgctaccttactcgtgaatccgaccagcttcccctgcccattgaaccagccgctggtggcctcttccgtcagccccctaatcgttagcggcaactctgttaacctgccaataccatccacccccgaagataaagcacatatgaacgttgatatcgcctgcgctgtggctgacggagagaacgcctttcagggccttgagccaaaattggagccacaggaactttccccgttaagtgcgaccgtgttccctaaagtggagcatagtccaggaccaccccccgtggacaagcagtgtcaggaagggcttagtgagaattcagcatacaggtggacagtcgtgaaaaccgaggagggccgtcaagctctggaacccctcccacagggtattcaggaatccttaaacaatagcagccccggagatctcgaggaggtggtgaagatggagccagaggatgcaactgaggaaatcagcggattcctctag

SEQ ID NO: 17726 - DNA, 912 bp, synthetic construct
  source 1..912: mol_type = other DNA; note = Synthetic coding sequence
atggccgacaagagcaagtttatcgagtacattgatgaggcgttggaaaagtctaaagagactgctctgtctcacctattcttcacctatcagggcatcccgtaccccattaccatgtgtacctccgagacgttccaggctctggacactttcgaagcgcggcatgacgatattgtcctcgcgagctaccctaagtgcgggtctaactggatactgcacatcgtgtctgagctcatatatgccgtgtccaaaaaaaagtataagtatccagagtttcctgtactcgagtgtggggatagtgagaagtaccaaagaatgaaaggcttcccatctcccagaatactggccacccatctgcattacgacaagctccccgggagcatttttgaaaataaggccaagattctcgtgatcttcaggaatcccaaggacactgcagtgtcttttctgcactttcataacgacgtgcctgatataccgtcttacggctcctgggacgagttttttcggcaattcatgaagggtcaggtgtcctggggcaggtacttcgatttcgctatcaactggaacaagcatctggatggtgacaatgtgaaattcatcctgtacgaggatctcaaggaaaatcttgccgctggaatcaagcagatcgccgagtttcttgggttctttcttacaggagaacagattcagaccatatcggttcaatctactttccaggcgatgcgggcgaaatcccaggatactcatggcgctgtgggaccctttctctttagaaaaggagaagtgggcgactggaagaacctgttcagtgagatccaaaaccaggagatggatgaaaaatttaaagaatgcttagctggtacatcgctcggcgccaagctgaagtatgaaagctactgccaaggctag

SEQ ID NO: 17727 - DNA, 366 bp, synthetic construct
  source 1..366: mol_type = other DNA; note = Synthetic coding sequence
atgggtgtgcctgaaattcccggggaaaagttggtcactgaacgtaataaaaaaaggctggagaaggagaagcatgagaaaggggcccagaagaccgactgccagaagaatttgggaacagtgggggcagttgcccttgattgcaagggtaatgtcgcatatgccacaagcacagggggaattgtgaacaagatggtcgggcgggttggagactctccttgcctggggagaacaaaggggtgccttctgcccctaccccttttcagccgacctcaagctttcctcaccttatacagcctccccctgagcgtgtcttgctgtgtgccattcctccttttagtacagttacaggacgtctgggagtag

SEQ ID NO: 17728 - DNA, 579 bp, synthetic construct
  source 1..579: mol_type = other DNA; note = Synthetic coding sequence
atgaccttggggagcaagtcgcagcagccccccgaggatattaaagccctctcgtggaacagacaggcccaacacatattgtcaagcgcacatccgtcaggcaaggccgtcgtctgggatctcagaaagaacgaacctatcatcaaagtgtcggaccattccaaccgcatgcattgctccggattagcctggcatccggacattgccacacagctcgtcctatgctccgaggatgatagactccccgttatccagctctgggacctcagatttgcctcgagcccgttaaaggtgctcgaatcccactcgcgcggaatcttatcagtctcctggtctcaggctgacgccgagctgctcctgactagtgccaaggactctcaaatcctttgccggaacctcggctccagtgaagtcgtctataagctccccacccagtcttcttggtgttttgacgtccagtggtgccctagagacccgagcgtcttcagcgccgcgagcttcaatggatggatcagtctgtattccgtcatgggaagatcgtgggaagtgcaacatatgcgccaagccgataaggtctag

SEQ ID NO: 17729 - DNA, 621 bp, synthetic construct
  source 1..621: mol_type = other DNA; note = Synthetic coding sequence
atgaaggatgttgataacctgaaaagtatcaaagaagagtgggtgtgtgagactggttctgataatcagcccctgggcaacaaccaacagtccaattgtgagtactttgtggactccctcttcgaggaggctcagaaggtctcgagtaagtgcgtaagccctgctgagcagaaaaaacaggttgacgtcaacattaaactgtggaagaacggcttcacagtgaacgacgattttcggtcctacagcgacggcgcttctcaacagtttctgaacagcatcaagaagggcgaactcccaagtgagttgcagggcattttcgacaaagaagaagtggacgtcaaggtggaggacaaaaaaaacgagatctgtctttctactaagcccgttttccagccgttcagcggccagggccatagattagggcgcgttagccatattaaggatttcattgagaaataccaagggtcgcaaagatctccgcccttctcactggctacagctctgcctgttctaagattactcgacgaaaccctgacacttgaggaggccgacctgcaaaacgccgtgatcatccagagactgcagaagactgcgagtttcagagaactgtccgaacactag

SEQ ID NO: 17730 - DNA, 1359 bp, synthetic construct
  source 1..1359: mol_type = other DNA; note = Synthetic coding sequence
atgaggggatgtagttatggactgtgcagacgcggactgctcttttgtgtgatcttggacgaccagtccgggaagaaatctgtgaacgataagaatttgaagaaaaccgtcgaagacgaagaccaggactctgaggaggagaaggacaatgatagttacatcaaggaaagaagcgatataccgtctgggacatccaagcacctccagaagaaagcgaaaaaacaagctaagaaacaagctaagaatcagcgccggcagcagaaaattcaggggaaggtcctacacctgaacgatatctgcacgatcgaccatcccgaagacagcgaatatgaggctgagatgtcgctgcagggggaagtgaacattaagagcaaccacattagtcaggaaggggtgatgcacaaggagtactgcgtcaatcagaaggatctgaatggacaggcgaaaatgattgaatctgtcaccgacaaccaaaaaagcactgaagaggtggatatgaagaacatcaatatggacaacgatttagaggttctaacatccagtcccaccagaaatctcaacggagcctacctgacggagggctctaatggcgaggtggatatctccaatggttttaaaaatctgaatctgaacgctgccctccacccagacgagatcaatatagaaatcttgaatgacagccatacaccaggcacaaaagtgtacgaagtcgtgaacgaggacccggagactgccttctgcaccctggctaaccgggaagtatttaacactgacgaatgctcgatccaacattgcttgtatcagtttactagaaatgagaaactgagggatgcaaacaagttgctttgtgaggtttgtaccagacgtcagtgcaatggacctaaagccaatattaaaggagaaaggaaacacgtttacaccaatgctaaaaagcagatgttaatttcactagctcccccagttcttactttacacctgaagagattccagcaggcaggattcaatcttcgcaaggtcaataagcatatcaagtttcccgaaatacttgatctggccccattttgcaccctcaagtgcaaaaacgtggccgaggagaacaccagagtcctgtatagcctctatggagtcgtcgagcactccggaacaatgaggtctggtcactataccgcctacgccaaagcacgcaccgccaattcccacctatctaatctggtgttacacggcgatatccctcaggactttgaaatggagagcaaagggcagtggtttcatatctctgacactcacgtgcaggctgtgccaacgacaaaggtgttgaattctcaggcatatctcctgttttacgaacgtatcctgtag

SEQ ID NO: 17731 - DNA, 450 bp, synthetic construct
  source 1..450: mol_type = other DNA; note = Synthetic coding sequence
atggaaaggatcgaaggcgccagtgtcggaaggtgcgcagcaagcccctatctgagaccccttaccctgcattatagacaaaatggggcacagaaatcttgggacttcatgaagacgcacgatagcgtaaccgttctcctgttcaatagttcgagaaggtctctggtgctggtgaaacagttcagacccgcagtatacgccggcgaagtggagagaaggtttccaggctccctggccgcagtcgaccaggatggccctcgggagctccagcccgccttacccggctcagccggagttacggtggaactgtgcgcaggtctcgtcgaccagcctggcctctcactcgaggaggtggcatgcaaagaagcttgggaagaatgcggatatcatctggctccttctgatttacgcagagtcgctacatattgggacgcgactatgggctcatag

SEQ ID NO: 17732 - DNA, 489 bp, synthetic construct
  source 1..489: mol_type = other DNA; note = Synthetic coding sequence
atgaactccaatgcctcagagcataccgggatgttgagaacttgttggtcacacagccattgggacccattctcttccgggtcagtgaccgcaatgtgggcgacccacagtccaactagtaaagcttgggccgggatacaaggcagagggaggtgggccctcggatttccgtggagaggacaaggtgttttacacgtgatagccagtcagaaagcggcagtcaccgaggcggttgatttacgcaccggggcagcctctcaggcgatgtccgaggcatttgtgcgcagcggaatgttttaccttaggccggctttcgtgttgttatgctataaatggggtaagttgagacacagcgaggtgtctaacctcctcggagtggcctggccagtgagcgaagaagcatgtatgggaacctggggatccctggcagtggccgtcaccttgccggctcagggcttgggaacttgggggagagatgagggcgaatag

SEQ ID NO: 17733 - DNA, 1320 bp, synthetic construct
  source 1..1320: mol_type = other DNA; note = Synthetic coding sequence
atggtgccttcaagagaggccttactgggtcccggaacgacagccatccgatgccccaaaaagctgcagaaccagaattataaggggcacggccttagcaaaggcaaggagcgcgagcaacgggcatctatacggttcaaaactaccctaatgaatacgttgatggatgttctcagacatcgccctggatgggtggaggttaaggacgagggcgagtgggatttctattggtgcgatgtttcatggttgcgagagaattttgaccatacatatatggacgagcacgtacgcatcagccactttcgcaatcactatgagctgacaaggaagaactatatggtgaaaaacttaaagcgttttcgcaagcagctggaacgcgaggccggaaagctagaagccgcaaaatgtgacttctttcctaaaacatttgagatgccttgcgagtaccatctttttgtggaggagtttcggaaaaatcccggaattacatggattatgaagcccgtggcaagatcccaaggaaagggcatttttctctttagaaggctgaaagatattgtggactggaggaaggacacacgatcgtccgatgaccagaaagacgacattcccgttgaaaactacgtcgcccagcgatatattgaaaacccttatctcatcggagggagaaaattcgatctgcgagtttacgtgttggttatgtccgtgtttgccgaatgtctgctgtggtcaggccacaggcggcaggacgttcaccttaccaatgttgcagtgcagaaaacctctccagattaccaccctaaaaaaggttgcaaatggaccctgcagcgcttcagacagtacctggcctccaagcatggccccgaagccgtagaaactctctttagggacatcgataatatattcgtgaaatcattgcaatctgtgcagaaagtcatcatcagcgacaagcattgcttcgagctctacgggtacgacatactgattgaccaagatctgaaaccatggttgctggaggttaatgccagtcccagcttgaccgccagttcacaggaggattatgaattgaagacctgcctattggaggacacactgcatgttgtggacatggaagcgcggctgaccggccgcgaaaaaagagtgggaggctttgatctcatgtggaatgatggccccgtaagccgggaagagggggcacccgacctgagcgggatgggtaacttcgtgactaatacgcatcttgggtgtgtgaacgatagaaaaaaacagttaagacagctcttctgctcactccaggtccagaaaaaggcttccagctag

SEQ ID NO: 17734 - DNA, 867 bp, synthetic construct
  source 1..867: mol_type = other DNA; note = Synthetic coding sequence
atggccaaatggggcgaaggagatcctaggtggattgttgaggaaagagcagatgccacaaacgtgaacaactggcactggaccgaacgcgacgcttcaaattggagcaccgacaagctgaaaacattgttcctcgctgtacaagttcagaacgaagaggggaaatgtgaagtaaccgaggtcagcaagctcgatggcgaggcctctatcaacaacaggaagggcaagctgatcttcttttatgagtggagcgtgaaactcaactggacggggacaagtaagagcggggtgcagtacaagggtcatgtggagatccctaacttaagtgatgaaaacagcgttgatgaggtggaaatttcagtcagtctagcaaaggatgaacccgataccaatcttgtcgcactaatgaaggaagaaggcgtgaagttactgagggaggcaatgggcatctatatcagcacactgaaaaccgagttcacacagggcatgatcctgcccacaatgaacggagagagcgtggaccccgtaggccagcccgcactgaagaccgaagaacgaaaggcaaagccagcaccatccaagactcaggctcgaccggtcggggtcaagattcctacatgtaaaattactttgaaggagactttcctgacgagccccgaggaactgtaccgcgttttcaccactcaggagctggtacaagcctttacccatgccccagccacactcgaggccgacaggggaggcaagttccacatggtagacgggaatgttagtggcgagttcacagatcttgttccagagaaacacattgtgatgaagtggagatttaagtcctggcccgaaggatcacattgtcatagcggatag

SEQ ID NO: 17735 - DNA, 1053 bp, synthetic construct
  source 1..1053: mol_type = other DNA; note = Synthetic coding sequence
atgcctagctttatccggcatggcccaacaattccccgacgcacagacatctgcctccctgacagttctcctaacgctttcagtaccagtggcgacgttgtctcccgtaatcagagcttcctaagaacccctatacaaagaacgcctcacgagatcatgcgccgggaatccaacagactcagcgccccctcctacttggcccgttcattagctgatgtcccacgcgaatacggcagttctcaatcattcgtgaccgaggtttccttcgctgtcgagaatggtgattctggaagtcggtattattattccgataactttttcgatgggcagcgaaagcgacccctgggtgacagagcccacgaggactatcggtactacgagtacaatcacgacttgttccaacgcatgccacagaaccaggggcgtcatgcctccggaatcggaagggtggccgcaactagcctcgggaacttgactaatcatgggtccgaagatctcccccttcctcccggctggtccgtggattggaccatgcggggccgcaagtattatattgatcacaacaccaacaccactcactggagccatccacttgagcgggagggcctccctcctggttgggaaagagtagaaagctctgagtttggcacctattacgtggaccacacaaacaagaaggctcagtaccgccacccttgcgcccctagtgtgcctaggtacgaccagccgcccccggtaacttaccaacctcagcaaacggaacgcaaccagtcactgctggtgcccgctaacccgtatcacaccgcagaaatccccgactggctgcaggtgtatgcccgagctcccgttaagtacgatcatatcctgaagtgggaactttttcaactggctgaccttgacacctaccagggcatgctcaaactgctcttcatgaaagagctggagcagattgtgaaaatgtatgaggcctatcgccaggcactgttaacagaactagaaaacaggaagcagcgacagcaatggtacgcacagcaacacggaaagaacttctag

SEQ ID NO: 17736 - DNA, 537 bp, synthetic construct
  source 1..537: mol_type = other DNA; note = Synthetic coding sequence
atgaccttccgcgaagggcaccagtgggaaaaaatcccgttgtctggctctaatcaggagatcagacggcagaaggagcggattacagaacaacctctgaaggaggaggaagatgaagaccgcaagaataaaggtcaccaggccgctgagattgaatggctggggttcagaaaaccttcccaagctgacatgctccatagcaagcacgatgaggaacagaaggtttgggatgaggaaatcgatgacgacgatgatgataattgtaacaatgacgaagacgaggttcgagtaatcgagttcaagaaaaagcacgaggaagtcagtcagttcaaagaggaaggggacgcctcggaagactcacctctgtctagtgcttccagccaagccgtgacccccgatgagcagcctacgcttggcaagaagagtgatatcagcagaaatgcctactctcggtataatacaatctcttacaggaagatccgtaagggcaacactaagcagagaattgatgagttcgagtccatgatgcatttatag

SEQ ID NO: 17737 - DNA, 312 bp, synthetic construct
  source 1..312: mol_type = other DNA; note = Synthetic coding sequence
atggctgcctttaagctcgacttcctgcctgaaatgatggtggatcactgcagcttaaactcatcaccggtgagtaagaagatgaatggaaccttagatcaccctgatcagcccgacctggacgcaatcaaaatgtttgtcggtcaggtgcctcgcacctggtcagagaaggacctcagagaactgttcgaacagtacggggcggtctatgaaattaatgtcctgcgcgaccgctcccagaatcccccccagagtaaagggtgttgttttgtcactttctacaccaggaaggccgcactggaagcccagtag

SEQ ID NO: 17738 - DNA, 1917 bp, synthetic construct
  source 1..1917: mol_type = other DNA; note = Synthetic coding sequence
atgccacccattaacttgcaggagaaacaggttatttgtttaagtggagatgatagctccacctgcataggcatattggctaaggaagtggaaatcgtggccagcagcgattcttctatatcgtctaaggctaggggctcaaacaaggtgaagatacagcctgtcgccaagtatgactgggaacagaagtactactacggtaatttaatcgctgtgagtaactcattccttgcctacgccattcgcgcggccaacaatgggtctgctatggtgcgagtgattagtgtctctacatccgagcgaacacttctcaaagggtttacagggtcggtggccgacttggctttcgctcacctgaatagccctcagctcgcttgtctggacgaagcgggaaatttattcgtctggcgacttgccctagttaatggcaaaatccaagaggagattctcgtacatattcgacaacctgaaggaacaccactgaatcattttcggagaataatctggtgccccttcataccggaggaatctgaagattgttgtgaagagtcatcacctacagtcgcgttacttcatgaggatcgggccgaggtgtgggacctggacatgctacgcagtagtcattccacctggccggtggacgttagtcaaatcaagcaggggtttattgtagtgaaggggcatagtacctgtctgagcgagggcgccttaagccccgacggaacagtcttagctactgcttcacatgatggctatgtgaaattttggcagatttacattgaaggacaggatgaaccacggtgcctccacgagtggaaacctcacgatggtcggcccctatcttgcttattattctgtgacaaccacaagaagcaggaccccgatgtgcccttctggcggttcctcatcacaggcgccgatcaaaatcgcgagctaaaaatgtggtgcacagtctcttggacatgtctgcagactattaggttttctccagacatattctctagcgtcagcgtccctccgtctctcaaggtgtgtctcgaccttagcgccgagtacctgatcttgagcgatgtgcagcgcaaggtcctgtacgtgatggagctgctacagaatcaggaggagggccatgcttgctttagttctatctctgagttcttactgactcatcccgtgttatctttcggtattcaggtggtgtcacggtgccggctgcgccacactgaggtgctgcccgccgaggaagagaatgactccctaggagcagacggcacgcacggggctggcgccatggaaagcgcggccggcgtcttgatcaagctgttttgcgtacacaccaaagcactacaggacgttcagatccgcttccagccacagctgaatcccgatgtcgtcgcccctctgcctacgcataccgcgcacgaagactttacattcggtgagagccgccccgagctcggctctgaaggcttggggagcgccgcgcatggctcacaaccagaccttaggcgaattgtagagttgcccgccccagccgacttcctgagtctgagtagcgaaactaagcctaaactgatgaccccggacgccttcatgacacccagtgcttctcttcagcagattacggcctctccttcatcaagcagctccggatcgtcctcttcgtcctctagtagttctagctctctgactgccgtttcggccatgtcctctacatcagccgtcgaccccagcctgacaaggccgcccgaagagctgacgctatcccccaaactgcagctagatggatcgcttacaatgtccagtagcggatccttacaggcaagccccagggggttacttccaggcctcctgcccgcacctgcagacaaacttacaccaaagggccctggccaggtgtgtgactgggtatgcgtttag

SEQ ID NO: 17739 - DNA, 495 bp, synthetic construct
  source 1..495: mol_type = other DNA; note = Synthetic coding sequence
atgcgcatcttgattcttggattggatggggcaggaaagaccaccattctatatcgacttcaggtaggggaagtcgttaccacgattcccacaatcggcttcaacgttgagactgtaacctataaaaatcttaaattccaagtttgggaccttggaggacagacatcaattagaccctactggcggtgttattactcaaataccgacgcggtgatctacgtggtggactcttgcgaccgggaccgcatcggtatatccaagagtgagctagttgccatgctagaagaggaggaactcagaaaagctatcctagtggtgttcgcaaacaagcaggatatggaacaggccatgacttctagcgaaatggcgaatagcctcggactgccagccctgaaagataggaaatggcaaatattcaaaacctctgccaccaaaggcactgggctggatgaagctatggagtggctcgttgaaaccctgaagagcaggcagtag

SEQ ID NO: 17740 - DNA, 1944 bp, synthetic construct
  source 1..1944: mol_type = other DNA; note = Synthetic coding sequence
atggcccaagggtccgtttctttcaatgatgtgactgtagatttcactcaggaagagtggcagcacctcgatcacgcccaaaaaaccctttatatggacgtgatgctggagaattactgccaccttatttctgttggttgtcatatgactaagcccgatgtgatcctcaagctggagcggggcgaagaaccttggaccagttttgctgggcatacctgtctggaggaaaactggaaggccgaggacttcctggtcaagttcaaggagcaccaggagaaatactccaggagtgttgtatctatcaatcacaagaagttggtcaaagaaaagtccaagatttacgaaaagacgttcactctcggaaagaaccctgtgaacagtaaaaatttgccaccagagtacgatacgcatggaaggatattaaagaacgtgtctgagttaattatatcaaacctgaatccagcacgaaagcgtcttagtgaatataatgggtacggcaagtccctgctcagcactaagcaggagactactcacccagaggtgaaaagtcataaccaatccgcgagagcattttctcataacgaagtcttgatgcagtaccagaagaccgagacccctgcccagagcttcggttacaacgactgcgagaaaagcttcttgcagcgtggcgggctgatcacgcactccagaccatataagggagagaacccatctgtgtacaataagaagcgccgagcaacaaacattgagaagaaacacacttgtaatgaatgtggcaagagcttctgtcgtaaatctgttttgatcttgcatcaggggatccattcagaagaaaagccctaccagtgtcaccagtgtgggaatgcatttcgtcgaaaaagctacctaatcgaccatcaaagaacgcacaccggagaaaaacctttcgtgtgcaatgaatgcggcaagtctttcagactgaaaactgccctgaccgaccaccagagaacgcatacaggagagaaatcttatgagtgccttcagtgtaggaatgcctttcgtttgaagtctcacctcattaggcaccagagaacccacactggtgagaagccctatgagtgtaacgattgcggtaagtcctttcggcagaaaacgaccctctctttgcatcaacgcatacatacaggggagaaaccgtacatatgtaaggaatgcgggaagtcgttccaccaaaaggccaatctgaccgttcatcagcggacccatacaggcgagaaaccctatatttgcaatgaatgtggcaagtcctttagccagaaaacaacccttgctttgcacgaaaaaacgcataacgaggagaaaccctacatctgtagcgagtgtggcaaatctttcagacagaagaccaccctggtagcccatcagcgcacacatacaggggaaaagtcatatgagtgccctcactgtggcaaagctttccgtatgaagtcctacctgatagaccaccacagaactcacaccggggaaaaaccctacgagtgcaacgagtgtgggaaaagttttagtcaaaaaacaaacctgaacttacaccagcgcatccacaccggcgagaagccatatgtgtgtaacgagtgtggcaagagttttcgccagaaagccacacttactgtgcaccagaagatccacacagggcagaaaagctatgagtgccctcagtgtggcaaggccttctccagaaagtcctatttgatccatcatcagcggacccataccggggagaagccatacaagtgctcagagtgcggaaaatgttttaggcaaaagacaaacctgatcgtccatcaacggacccatacgggcgaaaagccttacgtgtgtaacgagtgcgggaaatcttttagctacaaacggaatttgatcgtgcaccagaggactcataagggtgagaacatcgagatgcaatag

SEQ ID NO: 17741 - DNA, 3570 bp, synthetic construct
  source 1..3570: mol_type = other DNA; note = Synthetic coding sequence
atgaagctggagtgtattcccgcccctataactccttccaccgtgccgtctttccccccaactccacccactccccccgccagtccccctcatacccccgtcatcgtgcccgccgctgcgacaaccgtgtcatctccctctgctgctataacagtccagagggtcctggaggaagacgagtccatcaggacatgtctgagtgaagacgccaaggaaattcagaacaagatagaggtggaggccgatggccagacagaggagatcctggacagtcaaaacctgaacagccgaaggtctcctgtaccagcgcagatagctataaccgtccccaagacatggaagaagcctaaagatcgcacccggaccactgaagaaatgctggaagctgagcttgagctgaaggctgaggaagagctcagcatcgacaaggttctagaatccgaacaggataagatgagccagggctttcatccagaaagggacccctccgacctcaagaaggtgaaggccgtggaagagaacggcgaagaagctgagcccgtgcggaatggggcagaaagcgtcagcgagggagaagggattgacgccaacagcgggtcaacagactcatcaggtgatggcgtaaccttccctttcaagcctgagagttggaagcctactgataccgaggggaagaaacaatacgaccgagagttcttgctggacttccagtttatgccggcatgtatacaaaagcctgaggggctgccccccatcagtgacgtggtgctggataaaattaaccagccgaaacttccgatgcgcaccttagatcctagaatcctgcccagggggccagactttacaccagcctttgctgactttggccggcagacccctggcggtaggggtgtcccgctcctaaacgtcggatcacggcggtctcagccgggtcaaaggcgagaaccccgcaagatcatcactgtgtctgtgaaggaagatgtgcatctcaagaaagccgagaacgcttggaagccttctcagaaacgagacagccaggctgatgacccagagaatatcaagacccaggaattgttcaggaaagtgagatctattctaaacaaactcacaccccagatgtttaaccagctcatgaaacaagtgagcgggctcacagtagatacagaggagcgattaaaaggagtgattgatctggtgtttgagaaggcaattgatgaaccaagcttttcagtggcttacgccaatatgtgccggtgcttggtcacactgaaggtcccaatggcagataaacctggtaacacagtaaacttcagaaagctgctgctcaacagatgccagaaagagttcgagaaggacaaggcggacgacgacgttttcgagaagaagcagaaggaactggaggccgcttcggctcctgaagagcgcactcgcctgcacgatgaattggaggaggcaaaagataaagctagaagacggagcattgggaacatcaagttcataggagaactctttaaattgaaaatgttaacagaggccatcatgcacgattgcgtagtcaagctgctgaagaaccatgacgaagagtctctagaatgcctctgtaggttattaactaccattgggaaagatctggattttgagaaggcgaaacctcgcatggaccagtactttaatcagatggaaaagatcgtgaaagagagaaaaactagctcgaggattcggttcatgctccaggatgttattgacctgcgcctctgcaattgggtgagcagacgcgcagaccagggtcctaaaactatcgagcaaatacacaaggaagccaagatcgaggagcaggaagaacaacgcaaagttcagcagctaatgacaaaagaaaagcgccgacccggtgttcagagagtggacgaaggaggttggaataccgtgcagggggcgaagaattccagagttctcgatcccagcaaattccttaagattactaagccgacaatcgatgaaaagattcagcttgtacctaaagcacagctaggtagctgggggaaaggctcatccggaggagccaaagcttccgagactgacgccctcagatcttcagcaagttccctgaaccggtttagcgctctccagccccctgccccctcgggatccacccctagtacacctgtagaattcgactctcgccgaaccttaaccagtagaggcagcatggggcgggaaaagaacgataagccccttccttccgcaactgctcgacctaatacctttatgagaggagggtcaagcaaggatctcttggataatcaatcgcaggaagagcaacgcagagagatgctcgagaccgtgaaacagctaacaggcggcgtcgacgtagaaaggaacagtactgaagcggagcgaaataagactcgggaatctgctaagcccgaaattagcgcaatgtctgctcacgacaaagccgctctgagtgaggaggaactggaacgcaaatccaaaagtataattgacgaatttttacatattaatgactttaaagaggccatgcagtgcgtggaggagctgaatgcccaggggttactacacgtattcgtgcgcgtaggcgttgaaagcaccctggagcggagtcagatcacacgtgatcacatgggccagctgctgtaccaattggtacagtccgagaaactgtccaagcaagattttttcaagggattcagcgaaacacttgagctggccgatgatatggctattgacatcccccacatttggttatacctagcagaactggtcactccaatgctgaaggaaggtggaatctctatgcgggagctcaccattgagtttagtaagccattgctgccagtcggccgggcaggtgtgctcctgtccgaaattttgcatctgctgtgtaaacaaatgagtcacaagaaagttggggctctgtggagagaagccgacctctcctggaaagacttcctgcccgagggagaggacgtgcacaacttcctgctggaacaaaagttagactttatcgaatcagactctccgtgcagctctgaagctctgtcaaaaaaggaactcagcgctgaggagttatataaacgtttagaaaagttaatcatcgaagacaaggcaaatgacgaacagatattcgattgggtggaggctaatcttgacgagatccagatgtcgtctccgacctttctgcgtgctctcatgactgccgtatgcaaggcagctattattgctgacagcagtacctttcgagtcgacaccgctgtaatcaaacagagggtgcctatcctcttaaaatacctggattccgatacggaaaaggagctgcaggccctgtatgcgctccaagccagcatcgtgaagcttgatcagccagcaaacctgctgagaatgtttttcgattgcctttacgatgaagaagttatctcagaagatgccttctacaagtgggagtccagcaaggatcccgcggagcagaatggaaaaggggtggccctgaagagcgtgacagctttctttacctggcttcgggaggccgaagaggaaagtgaggataactag

SEQ ID NO: 17742 - DNA, 591 bp, synthetic construct
  source 1..591: mol_type = other DNA; note = Synthetic coding sequence
atgtggtcagttttgcaggacggtcccattagtcgggttattgtattttctcttagcgccgccaaagaaaccaaagatcggccacttcaagatgaatattccgtcctggtggctagcatgctcgaacccgccgtcgtgtatcgcgacctgctgaatcgggggctggaggatcagctgcttctaccagggtcggatcagttcgactcggtgctctgctcattggtgaccgacgtggatttagacgggcgacccgaagtgctggtagctacctacggacaggagcttttatgttataagtaccggggccccgagtccggactgcccgaggctcaacatggctttcacctactgtggcagagatccttttcctctccgctactggccatggctcacgtcgacctcaccggagatggactccaggagctagcagtagtgagtttgaaaggcgtgcacatcctgcagcatagccttatccaagcatcagaattggtgctgacaaggctgcgacaccaggtagagcaaagacgcaggagattgcaggggctcgaagacggggcaggagctgggccggctgaaaatgccgcctcatag

SEQ ID NO: 17743 - DNA, 1056 bp, synthetic construct
  source 1..1056: mol_type = other DNA; note = Synthetic coding sequence
atggtttcgcatacgtttcatatgagaaccgaagagtctgacgcgagccaggagggcgacgatttacctaagagcagcgcaaacactagccatccgaagcaagatgactctcccaaaagcagtgaggaaaccatccagcccaaagaaggagacatccctaaggctcccgaggagaccatccagtctaaaaaggaggacttacctaagtcaagcgaaaaggccatacaaccgaaggagagcaatatacctaagagtagcgcgaaacccatacagcccaaattagggaatattcccaaaacatcagtgaagccgtcacagcctaaagaaagtgacatcccaaagtccccggaggaagccatccagccaaaggaaggcgacatcccaaagtcattggaagaagctattcaaccaaaagagggcgacatccccaagtctccagaggaaacgattcaaccaaagaaaggggacataccaaagtctcccgaagaggctatacagcccaaggagggcgatattcctaagtcccccaaacaggcaatccagccaaaggagggggacattccaaaaagcttagaggaagccattcccccaaaggagatcgatatccctaaaagcccagaggagactatccagcctaaggaagacgatagccccaagagcctggaggaggccacgccatccaaagagggggatatcttgaaaccagaggaggagacaatggagtttcctgagggagacaaggtgaaggtgatactttcaaaggaggatttcgaggccagcctaaaagaggcaggcgagcgcttggtagccgtggatttttcagctacttggtgcggtccctgtagaacaatccggccattttttcatgccctatcggttaaacatgaagacgtggtcttccttgaggtcgacgctgataattgcgaagaagtagtcagggagtgcgccattatgtgcgtccctactttccaattttataagaaggaagagaaggtcgatgaactgtgtggggcactgaaagagaagctagaagcggtcattgcagagcttaagtag

SEQ ID NO: 17744 - DNA, 1473 bp, synthetic construct
  source 1..1473: mol_type = other DNA; note = Synthetic coding sequence
atgcccgacggaaagattcagaagcttatcattaccgaggagacggcgaagatacgcccattcgcagtggctgcagttttaaggaacatcaaatttaccaaagatcgctatgacagttttatagagctccaggaaaagctacaccagaatatatgtagaaagcgggccctggttgccatcggtacacatgacctggatactttaagtggcccttttacttatacggctaagcgcccctcggacattaagtttaaaccactgaacaagaccaaagagtacaccgcctgcgagttgatgaatatttataaaaccgacaatcacctgaagcattacttgcacattatagagaacaaaccgctgtacccagtcatctacgattctaatggggtggtgctttccatgccgcccattattaacggcgatcactcgagaataacagttaatacgcggaacatctttattgagtgcacaggcacagatttcaccaaagcaaaaatagtgctcgacattatcgtgaccatgttctcagagtattgtgaaaatcaatttaccgtggaggccgccgaggtggtgtttccaaatggcaaaagccataccttccctgagctcgcttatcgtaaagaaatggttcgtgcggacctcatcaacaagaaggtgggaataagagaaacaccggaaaaccttgcaaagctcctgaccagaatgtatctgaagtctgaggtgatcggagacggaaaccagattgagatcgagatacctccaacaagagctgatattatccatgcttgcgacattgttgaagacgcggctatagcctacggatacaacaatatccagatgaccctaccgaagacctataccatagctaaccaatttccgctcaacaagttgactgaattgctgagacacgacatggctgctgccggcttcaccgaggcactgacgtttgccttgtgctctcaggaagacattgccgacaaactgggagtggacatctccgccactaaggctgtgcacatctctaaccccaagacagctgaattccaggtcgctcgcaccaccctgctcccggggctgctgaagaccatcgccgctaacaggaagatgccacttccactcaagctctttgagatatctgacatcgtcatcaaggactcgaacacagatgtcggtgccaagaactaccgacatctttgcgcagtatactataacaaaaatcccgggttcgagatcattcacggactcctggacaggatcatgcagttactcgatgtgcctcccggagaggacaagggaggttacgttataaaggcctctgaggggcccgcatttttccctggacggtgtgccgagatctttgctagaggccagtccgtgggcaaactgggtgtgctgcaccccgacgtcataaccaagtttgaacttacgatgccttgctctagcctggagattaacgtcgggcctttcctttag

SEQ ID NO: 17745 - DNA, 1458 bp, synthetic construct
  source 1..1458: mol_type = other DNA; note = Synthetic coding sequence
atggccgctgaactatatgcacctgccagcgcagctgcagcagatttagcaaattccaacgcaggcgctgccgtgggacggaaagcagggcccaggtctccccccagcgcgcctgcacctgctcctccccctcctgcgccagctcctcctacccttggcaataatcatcaggagtccccaggctggcgatgctgccgaccaacactgagggagcgcaatgccttaatgttcaacaatgaacttatggcggatgtccactttgttgtggggccccccggcgctaccaggaccgtgcccgcacacaagtacgtgctcgccgttggtagttcagtgttctatgcaatgttctacggtgacctggctgaggtcaaatcagagattcacatacccgacgtggagcccgccgcctttctcattctcctgaagtacatgtactctgacgaaattgacctggaggccgatactgtcctggctaccctctacgccgccaagaaatacattgtgccagcgctggctaaggcctgtgttaactttctcgaaacctccctggaagccaagaatgcctgtgtgctgctaagtcagagtcggctcttcgaggagccggagctgacccagcgttgctgggaggttatagatgctcaggctgaaatggctctgcggtccgaggggttttgtgaaatagaccgccagacgctggagattattgtaacgcgagaggcgctaaacacaaaagaggccgttgtcttcgaagcagtattgaattgggccgaagccgaatgcaagcgacaggggctcccaattacaccaagaaacaagcgccacgtcctcggccgtgccctgtacttggtccgcatccctaccatgaccctggaagagtttgcaaacggtgcggcgcagagtgacatcctgacactcgaagagactcattccattttcctgtggtacacagctaccaacaaaccgaggctggacttcccactcaccaaacggaagggccttgccccccaacggtgtcacaggttccaatcctcagcctaccgtagcaatcaatggagatacaggggaaggtgcgattcgatccaatttgcagtggataggcgggtgttcatcgccggtctagggctgtacgggtcaagctctgggaaggctgaatactcagtgaagattgaactcaaacgcctgggcgtggttcttgcacaaaacctgacgaagttcatgtccgatgggtcttcaaacacattccctgtgtggttcgagcatcccgtgcaggtggagcaggatacgttctataccgcttctgcagtgctcgatggcagcgagctgtcatactttggccaggaaggcatgaccgaagtacagtgcggaaaagtcgcattccaattccagtgctcctcagactccactaacgggacaggcgtgcagggagggcagatacccgagctgatcttctatgcgtag

SEQ ID NO: 17746 - DNA, 204 bp, synthetic construct
  source 1..204: mol_type = other DNA; note = Synthetic coding sequence
atggctctgctggctgagcacctgctgaaaccactgccagctgacaaacaaattgaaaccgggccctttctggaggccgtgagtcatctgcctccattcttcgactgcctcggtagccccgtgttcaccccgataaaagctgatattagtggcaacatcaccatgaggaagttaaggctgcggggcgtcgagggactagcatag

SEQ ID NO: 17747 - DNA, 816 bp, synthetic construct
  source 1..816: mol_type = other DNA; note = Synthetic coding sequence
atctgtgagcgcattcgaagcacggtggacgagaaagagcaaaagcagctgctgatggatttagatgtagtgatgcgatcctctgattgcccgtatatcgtccagttttacggggctctgttcagagagggggactgttggatctgcatggagctgatgtccaccagcttcgacaagttctataagtacgtgtacagtgttctcgacgatgttatccctgaggagatcttaggaaaaatcacactggccaccgtaaaggcactaaaccatcttaaggaaaatctcaagatcatccaccgcgatattaaacctagcaatatcttgctggaccggtctgggaacatcaagttgtgcgactttgggatctctgggcagctggtggactcaatcgcaaaaacccgtgacgcaggctgcaggccttacatggcccctgaacgcatcgacccctcagcatccaggcaaggatatgatgtgagatcagacgtgtggagcctcggaataaccttatatgagctcgctaccggtaggtttccgtatcccaaatggaattctgtattcgatcagctgactcaggtagtgaaaggagatcccccccaattaagtaactccgaggaacgggaattttccccatcctttatcaacttcgtgaatttgtgtttaacaaaggatgagtcaaagcgccccaaatacaaggagctattaaaacacccctttattctgatgtatgaagaaagggccgtagaggtggcttgttatgtctgtaagatcctagatcagatgccagcaactcccagtagcccgatgtatgtcgactag

SEQ ID NO: 17748 - DNA, 291 bp, synthetic construct
  source 1..291: mol_type = other DNA; note = Synthetic coding sequence
atgagcgaaaaggtggactggctgcaaagtcagaacggagtttgtaaagtcgacgtctacagccctggagataaccaggcccaggactggaaaatggacactagcactgatccagtgcgggtattatcttggttgaggcgggatctcgagaagtcgacagcagagttccaggatgtcagatttaagcccggcgagagcttcggtggggaaacgagcaactctggtgatccccacaaggggttcagcgtggactattataacacaaccactaaaggaacacccgagcgatag

SEQ ID NO: 17749 - DNA, 792 bp, synthetic construct
  source 1..792: mol_type = other DNA; note = Synthetic coding sequence
atgctcagctctaagggattaacagtggtggatgtctatcagggatggtgtggcccgtgcaaaccggtcgtgtcactctttcaaaaaatgcgaatcgaggtgggcctggacctactccacttcgctctagcagaggcagacagactcgacgtgctcgagaaatacagaggaaagtgcgaacccacattcctgttttacgccatcaaagacgaagcgctcagtgacgaagatgaatgcgtctcccacggaaagaataatggcgaggacgaggacatggtgtcttccgagagaacatgtacacttgccattattaagccagatgctgtcgcacacgggaagacagatgaaatcattatgaagattcaggaggccgggtttgaaattctgaccaacgaagagaggactatgacagaagccgaggtgaggcttttctaccagcacaaggccggtgaagaagctttcgagaaactcgtccaccatatgtgctccggcccaagccatctgctgatattaacgcggacggagggcttcgaggacgtggtgaccacctggaggaccgtgatggggcctagggaccccaacgttgcacgaagagaacagcccgagtctctgcgggcccaatacggcaccgagatgcccttcaatgccgtccacggaagtcgggacagagaggacgccgacagagaactagcactcctgtttccctcacttaaatttagtgacaaagacacagaggcgcctcagggcgaatctagcacacaaccccggctgaagatcaccgacctggactag

SEQ ID NO: 17750 - DNA, 867 bp, synthetic construct
  source 1..867: mol_type = other DNA; note = Synthetic coding sequence
atgtcttccagcatgtggtacattatgcagtctattcaatcaaaatactctctgtccgaacgccttatacgcactatagctgccattcgcagtttccctcacgataacgtggaagacctcatccggggcggagcggacgtcaattgcacccacggaaccctcaagccgctccattgcgcctgcatggtgtccgacgccgactgtgtggagctgctcctcgaaaaaggcgccgaggtgaacgccctggacgggtacaatcgcaccgccctgcattacgccgccgagaaggatgaagcctgcgtcgaggtcctgttggagtacggcgcaaatccaaatgccttagacgggaatcgggatacaccgcttcactgggccgctttcaagaacaacgccgagtgcgtgagggccctgctcgagagcggagcctcagtcaatgcacttgactacaacaacgacactccactgtcatgggccgcgatgaaaggtaatttggaaagtgtatccatcctgctagactatggcgcagaagtgagggttattaatcttataggtcaaaccccaatcagtcgtcttgtcgctctgctagtacgcgggctgggcacagagaaggaagattcatgttttgaactgttgcaccgggcagtcggccacttcgaactgcggaaaaatggtacaatgcctcgggaagtcgctcgcgacccgcagttgtgtgagaaactgacagttctgtgcagcgcgcccgggaccctgaagacgcttgctcggtatgccgtgcgcaggagcctgggcctgcaatacctgcccgatgccgttaagggcctgcctctcccagcctccctgaaagaatatctgctcctgctggagtag

SEQ ID NO: 17751 - DNA, 549 bp, synthetic construct
  source 1..549: mol_type = other DNA; note = Synthetic coding sequence
atgcccatcccaccaccccccccaccccccccgggacccccacccccccccacctttcaccaggccaatacagagcagcctaagttatccagggacgagcagcgaggaagaggggccctgttacaggacatctgtaagggcaccaaactgaagaaggttaccaatattaacgatagatccgcccccattctggagacacctccaccacccccgcccgtgatccgtaatggagctcgcgacgcgcccccccctccgcctccctacagaatgcacggctcggagcccccatctagaggcaagccaccacccccccccagccggaccccagctggacccccaccacccccaccaccccccctgcgcaacggacatagagactccatcaccaccgttcgctcattcctggacgactttgagagcaaatacagcttccacccagtggaggacttccccgcacctgaggaatacaaacattttcagcggatttacccaagcaagaccaaccgcgccgcccggggggcccctcctctaccccctatactgcgctag

SEQ ID NO: 17752 - DNA, 999 bp, synthetic construct
  source 1..999: mol_type = other DNA; note = Synthetic coding sequence
atggaccaaccagctggccttcaggtagactatgtattccgaggggtagagcacgcagtgcgcgtgatggtgagcggacaggttttggagctggaagtggaggacaggatgacggcagaccagtggcgcggcgaattcgatgcaggcttcattgaggacctgacccacaagaccggaaatttcaaacagtttaatattttctgtcacatgctggaatctgcccttacccagagttcggaaagcgtgacacttgatctgcttacatacaccgatctggaatccctcaggaaccgtaaaatgggtgggcgtcccggcagtctcgctcctcgatctgcacagctcaatagtaagcgttacctaattctcatctactcagtggaatttgatcggattcattatcccctgcctctgccgtatcagggtaaacctgacccagtcgtgctgcagggcattatcaggtccctgaaagaggaactcggaagactccagggcctcgacggccaaaacacgcgagatacacgcgagaacgaaatatggcatctgagagaacagcagcaacaacggaatcgtctcggaagcggcgggagtggagatgggccctccgtttcttggtctagacaaacgcagccacccgccgcgctgacaggcagaggcgacgcccccaatcgatcaagaaaccgcagctctagcgttgatagcttcaggtcacggtgctcaagcgcctcttcctgctcagacctggaagatttctctgaatcattgtctcgtggggggcacagacggcgtggcaagccgccttctcctactccttggagtggcagcaatatgaaaagccctcctgtggaaaggagtcatcatcaaaagtcgcttgctaacagtgggggctgggtgccgattaaggaatactcaagcgaacaccaggcggctgacatggctgagatcgacgcacgcctcaaagccctccaggagtacatgaacagactggatatgaggtcatag

SEQ ID NO: 17753 - DNA, 516 bp, synthetic construct
  source 1..516: mol_type = other DNA; note = Synthetic coding sequence
atgtcctcaaagaggacaaaaaccaagactaagaaacgcccacagcgcgccacttcaaacgttttcgccatgtttgaccagtcccaaattcaggagtttaaagaggcatttaacatgattgatcagaaccgggacggatttatcgacaaggaagacttgcatgacatgcttgccagcctaggcaagaatccaaccgacgagtaccttgatgcgatgatgaatgaagcacctgggcccatcaactttaccatgttccttaccatgtttggggagaaattgaacggcaccgatcctgaggacgttattaggaatgcatttgcctgcttcgatgaggaggccactgggacgatccaggaggactatctccgtgaactgcttacaactatgggagaccggttcaccgacgaagaggttgacgagctttatagggaagcccctattgacaagaaaggaaatttcaattatattgagttcacacgcatcctgaaacatggtgccaaggataaagacgactag

SEQ ID NO: 17754 - DNA, 2391 bp, synthetic construct
  source 1..2391: mol_type = other DNA; note = Synthetic coding sequence
atgagcctggatgacaacttgagcggcactagcgggatggaagtcgatgacagagtgtcggctctcgagcagagactgcaactgcaggaggatgaactggccgtcctcaaagcagcactagccgatgcactgaggcgtttgagggcctgcgaagagcagggagccgcgctgcgggcgcgcggcacacccaagggaagagcaccccctcggctcggcaccactgccagcgtttgccaattgcttaaaggcctccccacaaggacccccctgaacggaagtggccctcccagacgggttggcggttatgccacatcaccaagctccccgaaaaaggaggcaacctcgggcagatcctcggtcagaaggtacctgtcacctgagagactggcaagcgtgcggcgagaggacccaagaagccgcacgaccagtagtagttctaactgctctgcaaagaaagaaggtaaaaccaaagaggttatcttcagtgtggaggacgggtctgtcaaaatgtttttgcggggtcggcccgtgccaatgatgattccagacgaactcgcaccaacttatagcctggacaccagatcagagctccctagttgtagactgaagctcgagtgggtgtatggatatcgcggacgagactgcagggccaacctctaccttctgcccacgggcgaaatagtctatttcgtcgccagcgtggccgtgctgtactcagtggaggagcaacggcaaagacattatcttgggcataacgatgacattaagtgcctggccattcatccagatatggtgacgattgcaacagggcaggttgcaggcactacaaaagaggggaaaccactgcccccacacgtacggatctgggatagtgtcagtctcagcacccttcatgttctaggacttggagtcttcgacagggcagtgtgctgcgtggggttttcgaagagcaatggaggcaaccttttatgcgccgtggacgaaagtaatgaccacatgctgtccgtatgggactgggctaaagaaactaaagtcgtggacgtcaaatgttcaaacgaggccgtcctcgtggctacatttcaccctacggacccaaccgttctgataacgtgcggtaagagccacatctacttctggactttggaaggcggctccctctctaaacgacagggactattcgagaaacacgaaaaaccaaaatatgtcctgtgtgtgactttcctggagggcggtgacgttgtgaccggtgattccggcgggaacctctatgtttgggggaaggggggcaaccgtatcacccaagccgttctcggggctcatgatggcggggtgttcgggttatgtgcgctgagggatggtacactggtaagtggggggggcagagacaggcgagtcgtgctctggggaagcgattacagtaaattgcaggaagttgaggtgcccgaagactttgggccagtccgcacagtagccgagggccacggtgatacgctgtacgtcggaactacgcgtaattctatcctgcaggggtccgttcatactggcttttcgctattagtgcaaggacacgttgaagaactctgggggctggctacccacccttccagggctcaatttgtcacttgtggtcaggacaagctcgttcatttgtggagctccgacagccaccaacctctctggagtcggattatcgaggaccctgctcgctccgcaggcttccatccttctggatcagtcctggccgttgggactgtcacaggaaggtggctgttgctggataccgagacacacgacctcgtggctattcacactgatggcaacgagcagatctcagttgtgagctttagccctgacggggcttatctggctgtaggaagccacgataaccttgtctacgtgtacacagtggatcagggaggccgtaaggtttcgaggctgggcaagtgttcgggacacagctcatttatcactcatctcgactgggcccaggatagttcttgtttcgtcaccaattctggggattacgagattctgtactgggatcctgcaacgtgtaagcaaatcacatcagccgacgctgtgcggaacatggagtgggctacagccacctgcgtcctcggcttcggcgtgttcggcatttggagtgagggggctgacggaaccgatattaacgccgtagctagaagccacgacggcaagctgctggcaagtgctgacgattttgggaaggtgcatctgtttagctacccatgttgtcagccccgggccctcagccacaaatacggcggtcattcgagtcacgtgacaaacgtcgctttcctctgggatgatagtatggccctgaccaccggggggaaagatacttcggtcctgcaatggcgggtggtttag

SEQ ID NO: 17755 - DNA, 1059 bp, synthetic construct
  source 1..1059: mol_type = other DNA; note = Synthetic coding sequence
atggctctcctgggacaagctttaaagtggcagcagcatcagggtctcctgccaccaggaatgacgatcgacctgttccggggcaaggcagcagtcaaggacgtggaagaggagaagtttcctacacaactctcccgccatatcaagttcggacaaaagagtcacgttgaatgcgctaggtttagtccggatggccaatacctggtgacggggtccgtggacggtttcatagaagtgtggaatttcactaccgggaaaatccgcaaggacctgaaatatcaagcacaggataacttcatgatgatggacgacgcggtactgtgtatgtgtttcagtcgggacaccgagatgctggccaccggggcccaagatgggaaaatcaaagtctggaaaattcagagcggccagtgtctcaggcgatttgaacgcgctcacagtaagggggtcacctgtctgtcattctctaaagactcttcccagattctgtctgccagctttgaccagaccattcggatccacggtcttaagagcggcaaaactttaaaagagttccgggggcactcctcatttgtaaatgaagcaacctttacccaggacggccactacatcatctcagctagctctgacggcaccgtgaagatctggaatatgaaaacaaccgagtgttcaaatacattcaagtcacttggcagtactgccggaacagacatcacagtgaattcagtgattctactccctaagaatcctgagcactttgtggtctgcaaccgtagtaacactgtggtgatcatgaacatgcagggccagatcgtccggagttttagcagcggcaagagagagggtggagactttgtgtgttgtgcgctctcaccccgtggagaatggatttattgtgttggtgaggattttgtcctctactgtttctccacagtaaccggcaaactagagcggacactgactgttcacgagaaggacgtgattggtatcgcccaccacccgcaccaaaacctgattgcgacttacagcgaggatggcctgctcaagctgtggaaaccatag

SEQ ID NO: 17756 - DNA, 951 bp, synthetic construct
  source 1..951: mol_type = other DNA; note = Synthetic coding sequence
atgcagagttgggtcttaatcagcaaagagcttatttccctgttgcatctctcgctgttacacttggaagaggacaaaaccacagtcagtcaggagtcacgccgggctgagacactggtctgctgctgcttcgacctgctcaagaagctacgagccaaactgcaatccctaaaggctgagcgcgaagaggcccggcatagagaggaaatggccctaagagggaaagatgcagctgaaattgtgctcgaggctttctgtgcccacgccagccagcgaatttcccaattagagcaagatctcgcctccatgcgagagttcaggggtctcctcaaggatgcccaaacacagcttgtcggcctccatgcaaagcaggaagaactggtccagcagaccgtgtctcttacctccacactgcagcaagattggagatccatgcaacttgactatactacgtggaccgctctgctgtcccgatctcggcagctgacggagaaactgaccgtaaaatcccaacaggcgctgcaggagcgggatgttgcaatcgaagagaaacaagaagtgagcagagttctcgagcaagtaagtgcccagttagaagagtgcaaaggccagaccgaacagctggaactcgaaaactccagattggccacagatttacgagctcagctccagattttggccaatatggatagccaattgaaggaactccagtcccagcatacacactgcgcgcaagacctcgctatgaaagacgaacttttatgtcagctgacccagtccaatgaagaacaagccgctcaatggcagaaggaggagatggccttaaaacacatgcaggcagagctgcagcaacagcaggccgtacttgccaaggaggtgagagatttgaaggaaactcttgagttcgctgatcaggaaaaccaggttgcccaccttgaactagcctggtag

SEQ ID NO: 17757 - DNA, 597 bp, synthetic construct
  source 1..597: mol_type = other DNA; note = Synthetic coding sequence
atgacactgcgttgcctcgagcccagtggcaatggcggggagggtacccgatcccagtggggtaccgccggctcagcagaagagccttctccccaggccgcgagacttgctaaggctctccgagagctgggtcagacaggctggtactggggttcaatgacagttaacgaggctaaagagaagttaaaagaagctcctgagggaacgtttttaatcagagacagttcacactcggattatctgttaacgattagcgtgaagacttctgccggaccaacaaatctgagaatcgagtaccaagatgggaagttccgtcttgatagtattatttgtgtgaaatccaagctgaagcagtttgactccgtggttcatctgattgactactatgtgcagatgtgcaaggacaagcgaacaggccccgaagccccccgtaatggtacggtccacttgtatttgaccaagccactctatacctccgctccatcattacagcacctgtgtcggctcacgatcaataagtgcacgggggctatttggggccttccattgcctactcgactgaaagactacctcgaagagtacaagtttcaggtctag

SEQ ID NO: 17758 - DNA, 591 bp, synthetic construct
  source 1..591: mol_type = other DNA; note = Synthetic coding sequence
atggtccccagaccctggtcaggttctccagggcctggtgaatgccttcactccctactgagcgaaaggctctggatttgtcgagacatatctgctcagcggcggtccgcccctggaagtccacgcccgtcagattgccagcaactgagttttctacccggcaaccagccaacattcctctgtctgcaggctctggccgccctcgttcccggagtcacacaggtggacaacaagagtggatttctgcagaaaaggccacaccggcagcaccccggtattctcaagctgccccatgtgcggcttccgcaggccctggctaatggggctcagttgcttctcctgggatccgccggccctacgatggaaaaccaggtgcagacactgacatcgtacctttggtcccggcacctccccgtggagccggaggaacttcagagacgtgcccgtcaccttgagaagaaatttctcgagaaccccgggcccgattttcagagccttttttctcctcagacctaccttaggcagcgccgtaacttcgtggaacagtgctatacacactacgtgaagttaccaacaattggcaagaattag

SEQ ID NO: 17759 - DNA, 1131 bp, synthetic construct
  source 1..1131: mol_type = other DNA; note = Synthetic coding sequence
atgccggacgtggtgcaaactcgtcaacaggcttatcgcgacaaactggcccagcagcaggctgcagccgcggctgctgccgccgccgccgcttcgcaacaaggttctgccaaaaatggcgaaaacaccgctaatggggaggaaaatggagcccacaccatagctcggatatggaatctgtcagagaatagtacctctggttccacacagcttgtgctgcgccactgtatccgggagggtggtcaggatgtccctagtaataaggatgtaacgagcctggattggaatagcgaaggcacacttcttgcgactggcagctatgatggattcgcccggatttggaccaaggatggaaacctcgcatctaccttgggacagcacaaggggccgatcttcgcgttgaaatggaataagaaaggtaacttcatcctgtcagccggtgtggataagaccactatcatctgggatgcccacactggagaggccaagcaacagttcccattccatagcgcacctgcgctggatgtggactggcagagcaataacacctttgcctcctgcagcaccgacatgtgcattcacgtgtgcaagctcggccaggaccgccctatcaaaacattccagggccacacaaacgaggtaaacgcaatcaagtgggatcccacaggtaacctgctggcttcctgcagcgatgatatgaccctgaagatctggtctatgaaacaggacaattgtgtccacgacctccaggcacacaataaagagatttatactattaaatggtctccaaccggcccaggcactaataatcccaatgctaatctgatgctagcatctgcctcgtttgactctactgtcaggttatgggacgtggaccggggcatttgcatccacacactcacaaaacaccaggaaccagtgtattcggtagccttttccccagatggaaggtacctggcgtccgggtctttcgataaatgcgtgcacatctggaacacacagacaggtgctctggtgcacagctaccggggcaccggtggcatcttcgaagtctgctggaatgcagctggcgacaaggtgggggcctccgcctccgacgggtctgtttgcgttctggatttacgcaaatag

SEQ ID NO: 17760 - DNA, 1116 bp, synthetic construct
  source 1..1116: mol_type = other DNA; note = Synthetic coding sequence
atgcacattaaatcaatcatccttgagggctttaagtcctatgctcaaaggacagaggtgaatggtttcgatcccctctttaatgccatcaccggactgaacgggagtgggaagtccaatatcctggatagtatttgcttcctgctaggtatcagcaacctatctcaggttagggctagcaatttacaggacctggtctacaagaacggccaggcagggataacaaaagccagcgtttcaatcacctttgataactccgacaaaaaacaatcccccctggggtttgaagtgcatgatgagatcactgtgactagacaggtggtgatcggcgggcgcaataaatatctcatcaacggggttaacgctaacaacacccgtgtgcaggacctcttttgttcagtggggctgaatgtgaacaacccgcactttctgatcatgcagggtcgaatcacaaaggtattgaacatgaaaccccccgagattctcagcatgattgaagaagccgccggcactcgaatgtatgagtataagaagattgctgctcaaaagaccatcgagaaaaaggaagccaagctgaaggaaatcaaaacaattctggaggaggaaatcaccccgaccatccagaaactgaaagaagaaagatctagctatttggagtaccagaaagtgatgcgggaaatcgaacatctgagcagactgtacattgcctaccaattcctgctggcagaggatactaaggtaagatctgccgaagagcttaaggagatgcaagacaaagttataaaactgcaggaggagttgagcgagaatgataaaaagatcaaagctctaaatcacgagatcgaagagcttgagaagagaaaggataaagagacaggaggaatcctccgcagtcttgaagacgcgctggctgaagcacaacgcgtgaataccaagagccagtctgccttcgatctgaaaaagaaaaatctggcctgtgaagagagcaagcgtaaagagttggagaagaatatggtcgaggacagtaagactcttgctgctaaagaaaaagagaagattaagagaaaggccttttggaagtccgccggaagctgtctagttattctagttgattag

SEQ ID NO: 17761 - DNA, 507 bp, synthetic construct
  source 1..507: mol_type = other DNA; note = Synthetic coding sequence
cacaagcttcagtcgggtatcggtcggcttattctgaaagaggaaatgaaagcaaggagctcttcctacgcagacccttggacacctccaaggagctccacatcctcaagagaggccctgcacacagctgggtacgagatgtcacttaatggaagcccgcgctcccattacctggccgacagtgatccactcatctctaaatcagcttcactgccagcttatcgacgcaatggactccacaggactcccagcgccgacctcttccactacgatagcatgaatgctgtaaactgggggatgagagaatacaaaatttatccctatgaacttttgctggtcaccacgcgggggaggaatcgtcttcctaaagacgttgaccgcacgagactcgaacgacacctgagccaggaagagttctatcaggtctttggcatgacaataagtgaattcgataggctggccctctggaagcgaaatgaacttaagaaacaggctcggctcttctag

SEQ ID NO: 17762 - DNA, 1770 bp, synthetic construct
  source 1..1770: mol_type = other DNA; note = Synthetic coding sequence
atgagcgtgtccgttcatgagacccgcaagtcaagaagtagcacgggatcaatgaatgtgacactattccacaaagcctcgcaccctgattgcgtgctggcccacctgaatacattgcgaaaacattgcatgtttaccgacgtgaccctgtgggctggggatcgagctttcccctgccatcgggcagtacttgcagctagtagcaggtacttcgaagcgatgttctcccatggcttgcgggagagccgcgacgatactgtgaacttccaggacaacctgcaccccgaagttctggaactcttactcgatttcgcttactcgtctcgaatcgcaataaatgaggagaatgccgaatcccttctggaggcaggggacatgctccaatttcacgacgtgcgcgatgctgcagccgagtttctggagaagaacctattcccttcaaactgcctggggatgatgcttctctccgatgcccatcagtgccggcgactttacgagttttcctggagaatgtgtttggtgcatttcgagacagtccgacagtccgaggactttaatagtctctccaaggacaccctcttggacctgatatcatcagatgagttggagacagaggacgaacgcgtggttttcgaggcaattttacaatgggttaagcatgacttggagccccgcaaggtacacctgccggaactcctgcggagcgtgcggctggccctcttgccctctgactgcttacaggaagccgtgtcttctgaagcccttctgatggccgacgagcgtaccaaactgataatggacgaagccttacgatgcaagacccggatccttcaaaatgacggcgtcgtaacctcaccttgtgcccgcccgaggaaagccggtcacaccctgctcatcctcgggggtcagaccttcatgtgtgacaagatatatcaggtcgaccacaaggccaaagagatcattcccaaagctgacctcccaagcccgagaaaggagttctccgcatcagctataggatgcaaagtttatgtaaccggaggacgggggtccgagaatggcgtctcaaaagacgtgtgggtatacgataccgtgcatgaagagtggtccaaagctgctcctatgttaattgcccggtttggtcatggcagcgcggaactcgagaattgcctttatgtggtgggagggcacacttctctggctggggtgtttcctgctagcccatcagtgagccttaaacaagtggagaaatacgacccgggcgcaaataagtggatgatggtagccccactccgcgacggagtatccaatgctgctgtggtctcagccaagctgaagctgttcgtgttcggagggacatccatacatcgggatatggttagtaaagttcagtgctatgatccctctgagaaccgatggactataaaagcagagtgtccgcaaccctggagatacacagccgcggcggtcctgggaagccagatctttatcatgggcggcgatacggagtttacagcagccagcgcctaccgatttgattgcgaaacgaaccaatggacaagaatcggtgatatgactgccaagcggatgtcatgccacgcactggcatccgggaacaagctgtacgtggtcggtggctattttggaacccagcgctgcaaaactttggactgttacgatccaactagcgacacctggaattgtattacaacagtaccatacagcctaatacccactgctttcgtgtctacatggaagcacttgcctgcctag

SEQ ID NO: 17763 - DNA, 1287 bp, synthetic construct
  source 1..1287: mol_type = other DNA; note = Synthetic coding sequence
atgtccatgttgaaacccagtggacttaaggctcccacaaagatcctgaagccagggtcgacggccctgaagaccccgaccgctgttgtcgcacctgtcgagaaaacaatcagttccgaaaaggcttcgagtacacctagtagtgagacccaagaggagtttgtggatgatttcagggtcggagagagggtgtgggtcaatggaaacaagcccggtttcatccaattcttaggagagacgcagtttgctccaggtcagtgggcagggatcgtgttagacgaacctattggaaagaatgacgggagtgttgccggcgtgagatatttccagtgcgaacctctgaaagggatattcacccgcccttctaagctgaccagaaaggtgcaggccgaggatgaggccaatggcttgcagaccacccccgcgagtcgggccacgtcccccctgtgcacaagcacagcatctatggtgagttcttcccccagtacccctagtaatattccgcaaaagccttcccagccggcagcaaaggagccatcagcaacgccccctatcagtaacttaacaaaaacggcatccgagtccatcagcaacctctctgaagctggatcaataaaaaagggcgaaagagagctgaaaattggggaccgcgtgctcgtggggggcaccaaagccggcgtggtaaggtttcttggagagactgacttcgccaaaggcgaatggtgtggggtggaacttgatgagccattgggcaagaatgatggagcagtggctggtacgcggtactttcagtgccaacctaagtatggattattcgctcctgtgcacaaggtgaccaaaataggatttcctagcacaacacccgccaaggcgaaggccaacgcagtgaggagggtcatggctaccacttccgcttccctcaagaggtccccctcagcctccagcttatcctcgatgtcaagcgtcgcgtcatcagtcagctccaggccaagccgaaccgggcttcacgtgcttgagctggaagccaagatggaccagctgaggaccatggtggaggctgcagatcgcgaaaaggtcgagctccttaatcagctcgaggaagagaagcggaaagtggaggatcttcagttcagggtggaggaggagagcattacgaaaggagatttggaacagaaatcccagatttctgaggaccctgagaacgtgcgcgggcacctgactgtctggatatttcctctgttgaccaagatagatcacagattgaagtgtctgctgatctatagctag

SEQ ID NO: 17764 - DNA, 3483 bp, synthetic construct
  source 1..3483: mol_type = other DNA; note = Synthetic coding sequence
atggttgtgacccttggtcctgggcccgactgcctgatcctcgaggccagtcgccagccccagctggtgcccaaacccgagcgaatggcatccgatggggccagcgccctgccaggacctgatatgtctatgaaaccgagcgcagcacccagcccatcacctgcactgccgtttctgcccccaacttcagatccaccagatcatccacccagagagccacctcctcaacccataatgccttccgttttcagccctgacaaccctctgatgctgtctgccttccctagttcactattggtcacaggtgatggcggaccttgcttatccggtgccggcgctggcaaagtgattgtgaaggtgaagaccgagggggggagcgcagagccctcgcagacccagaacttcatactcactcaaactgcgctgaattccaccgcacccggaacaccctgtggcggtctcgagggacccgcacctccgtttgttactgcaagcaacgtgaaaaccatcttgccttccaaggcggtaggcgtgtcacaggagggccccccgggtctgccaccacaaccaccccctcctgttgctcaacttgttccaatcgtgccacttgaaaaggcatggcccggccctcatggtaccacaggagaaggaggccccgtcgcaacactgtccaagcctagtctcggtgatcgctccaagatttccaaagacgtttatgaaaatttcagacagtggcagcgctataaggctctcgcacgcaggcacctgtcccagagtccagataccgaagcactgtcgtgtttcctgatcccagtactgcggtcactcgcccggcttaagcctaccatgaccctagaagaaggtctccccctggccgtgcaggagtgggaacatacttcgaactttgatcgcatgattttctacgagatggctgagcggtttatggaattcgaagctgaggaaatgcagattcagaatacacagctaatgaacgggtctcaggggctgagcccagccactccactcaagttagatccgctagggcctctagcctccgaagtgtgccagcaaccggtgtatatccctaaaaaagctgcgtccaagactcgagcaccccgtcgccggcagcggaaggcccagcgcccacccgcccctgaagcaccgaaagagatccccccggaggccgtgaaggagtatgtggacattatggagtggttggtcggaacccacctggcaacaggcgaaagcgatggcaaacaggaagaggagggacaacagcaggaggaggaaggtatgtaccctgaccccggcctgctatcttacattaacgagctgtgttcacaaaaagtgttcgtgagcaaggttgaagcagtgattcaccctcagttcctagcagacttgttgagccccgagaagcaaagggatccattagcactgatcgaggagctcgaacaggaggagggactgacccttgcgcagttggtgcagaagcgactgatggccctagaggaggaggaggacgcagaggccccaccatccttcagtggtgctcagctggatagctcacccagcgggtctgttgaagatgaggacggggatggcaggcttagacccagtccggggctgcagggggctggtggggctgcctgcttaggcaaagtctccagctctggaaaaagagcaagggaagtgcatggaggccaggagcaggcactggatagtccccggggcatgcaccgagatggaaacacactcccatcacctagttcctgggacctgcagcctgagctggccgcaccccagggtacaccagggcccctaggggttgagaggagagggagtgggaaggtcataaaccaggtgtctctgcaccaggacggacatctgggaggcgctggacccccaggtcactgtttggtcgccgatcgtacatctgaagcccttccgctttgctggcaaggcggtttccaacccgagtccacccccagtctggacgccggcctggctgagctggcccccttgcaggggcaaggtcttgagaagcaggtattgggattacaaaagggacagcagaccggagggcgcggagtgctcccccaaggcaaagaaccactcgcagtgccttgggaagggagctccggtgcaatgtggggcgacgatcgggggacaccgatggcccagtcatatgaccagaatcccagtccacgggctgctggtgaaagggatgatgtgtgcttgtccccaggagtgtggctgtcttcagagatggatgctgtcggcctcgagctacccgtccagatagaggaggttatcgaaagtttccaggtcgagaaatgtgtgaccgaataccaggaaggttgccagggtctcggatctagaggaaacatctccttggggcccggggaaacccttgtgcctggtgacactgaaagttctgtgataccttgcgggggaacggtggcagctgcagcactcgagaaacgtaactactgctcgcttcccggtccactcagagctaactcaccacccttacgctcaaaagagaaccaggagcagtcatgtgagaccgttggccacccaagcgatctgtgggctgaaggctgctttcctctcctggaaagcggagactcaacactgggctcctccaaagagacactgccgcccacttgccaggggaacttgttgatcatggggaccgaggatgcttccagtctgccagaagcgtcccaggaagcagggtcccggggcaactcattctctcctctcctggagactatagagccagttaatattttggatgtgaaggacgattgcggactgcaacttcgcgtgtccgaagatacctgcccactgaacgtgcactcttacgatccgcagggggagggcagagtcgacccagatctctctaagccaaagaacttggctccactgcaagaatcgcaagagagctatacaaccggcactcctaaggctacctccagccaccagggcctcggaagtaccttgcctaggcgcggcacgcggaacgccatcgtcccccgcgagacttccgtgtccaaaacccatagatctgccgatagggcgaaaggcaaagagaagaagaaaaaggaggccgaggaagaagatgaggagctgtccaactttgcctatctgctggcctccaaacttagtctttctccccgggagcaccccttatccccgcaccacgcatcaggaggacaaggctcccagcgagccagccacctgttaccggcgggcgctaaggggcctagtaagctgccatacccggttgccaagtcaggcaaacgggcattagccgggggacccgcacccacagagaagaccccccactccggggctcagctgggggttccccgggaaaaacccttagcccttggggtggtcagacccagtcagccccggaagcggagatgcgattcctttgtgacaggccgccggaaaaaacgaagaaggtcccagtag

SEQ ID NO: 17765 - DNA, 1548 bp, synthetic construct
  source 1..1548: mol_type = other DNA; note = Synthetic coding sequence
ctaaactcacaatgtcgcaataaaaaccctttcgccgccgggccccggcctccgcaccatcaattttttcagagacctcagattcaaccgccacgagcaacaataccaaatagctccccctcaatccgtccaggtgcccaaactcctacagccgtgtaccaagccaatcagcatatcatgatggtgaatcacctacctatgccctaccctgtaccacaaggacctcaatattgtatccctcagtatagacattccggtcctccttatgtcggtcccccccaacagtatcctgtgcagccacctggcccaggcccattttatcccggacccggacccggggatttccctaacgcctacggcaccccattctatccttcgcaaccggtttatcagtcagcccccattattgtgccaacccagcaacagcccccacccgccaaaagggagaaaaaaactattcggatccgggaccccaatcagggaggaaaagatataaccgaagaaatcatgtccggaggcgggtccagaaacccgacgccacctatcgggcggcctacctcaaccccaactccgccacagcagctgccctcccaggtcccagagcactcacctgttgtctatggcaccgttgaaagtgcccatctagccgctagtacacctgtgacggccgcgagcgatcagaagcaggaggaaaaaccaaagccggatcctgtcctcaaaagccccagcccagttctcagattggtgctgtcaggagagaagaaagagcaggagggccagactagtgagactacagccatcgtttctatcgcggaactgcccctgcccccaagtcccactacggtgtcgtctgtcgccagaagcacgatcgctgctccaacctctagtgctttgtcaagccagccaatctttacgacggcgattgatgacaggtgcgaattatcaagccccagagaagacaccataccaataccgtcgctgacatcatgtacggaaacgtcggatccactaccaaccaacgagaatgacgatgacatctgtaagaaaccctgcagtgtggcccctaatgatattcccctggtgtcttccacaaacctgatcaatgaaatcaacggcgtgtccgagaagttaagcgccactgaaagtatcgtggagatagtgaaacaggaagtcctgcctctgacactggaattggaaattctggagaatccgcccgaggagatgaagctggagtgcatcccagccccaataactccatccacagtccctagtttcccgccaacgccacctactccacccgcatcacccccacacacacccgtgattgtgcccgcggctgctacaaccgtctctagtccttcagcagccatcaccgtacagagagtacttgaagaggatgaaagcatacggacatgcctgtctgaggacgctaaggaaattcagaacaaaattgaagttgaagccgacgggcagacagaggaaatcctggattctcagaatttgaactcacggcgtagccctgtcccagaaacatcaaatgaatgttag

SEQ ID NO: 17766 - DNA, 204 bp, synthetic construct
  source 1..204: mol_type = other DNA; note = Synthetic coding sequence
atggccctgctggcagagcacctcctcaagcctcttcccgctgataaacagatcgagaccggacccttcctggaagccgtcagccatcttccaccctttttcgattgcttgggaagcccagtgttcacccccattaaggccgacatctcaggtaacatcaccatgcggaagttacgtctacggggagtggaaggcctggcctag

SEQ ID NO: 17767 - DNA, 2418 bp, synthetic construct
  source 1..2418: mol_type = other DNA; note = Synthetic coding sequence
atgatgcagaatgttcacctggctcccgaaactgacgaggacgatctttacagtggctacaacgattataatccaatttatgacatcgaggagctggagaatgatgctgccttccagcaggcagtcagaactagccatggccgccggccaccctccaagacctccctcgcttcttctataggcaggccaatgactggagcaatacaggatggtgtgacccgacccatgacagctgtccgcgccgctggcttcaccaaggccgccctcaggggtagcgctttcgacccactgagccagtcgcgaggtccagcctctcctctggaagcaaagaagaaggactccccagaagaaaagatcaagcagctggagaaggaggtgaacgagcttgtggaggagtcttgcatcgcaaacagttgcggcgacctaaagctagcactggaaaaggcaaaggatgcaggtcggaaagagcgagtgcttgtcaggcagcgggagcaggtaaccacccccgagaatattaatctggacctgacgtattcggtcctatttaacctggctagccagtatagcgtgaacgaaatgtacgcggaggccctgaacacatatcaagttattgtcaagaacaagatgttcagcaatgcagggattttaaagatgaatatgggcaacatttatctgaagcagcggaattactccaaagctatcaaattttatagaatggcacttgatcaggttccgagcgttaacaaacaaatgcgcatcaaaataatgcagaacattggcgtcactttcattcaggcaggccagtacagtgacgccattaattcatacgagcacatcatgtcaatggcccccaatctgaaagcgggttataatttgacaatttgttacttcgccattggcgaccgggaaaagatgaagaaggcttttcagaagctaatcacggtcccgctggaaatcgacgaggataagtacatctctccatctgacgatccccacaccaacttggtgaccgaggctatcaaaaacgatcacttgcggcagatggaacgtgagcggaaagcgatggccgagaagtacatcatgaccagtgcaaagttaatcgctcccgttatcgaaaccagttttgcggctgggtatgactggtgtgtggaagtggttaaagcttcccaatacgttgagctggctaacgacttggaaattaataaagccgtgacatacctgaggcagaaagattataaccaggcagttgaaatcctgaaggtccttgagaaaaaggattcgcgggtgaagagtgcagccgctacaaacctctctgcattgtactatatgggaaaggatttcgcgcaggcatctagttatgcggacatcgccgttaacagcgacaggtacaaccccgcagcgctgaccaataagggaaacactgtcttcgctaatggagattacgaaaaggctgccgaattctataaggaagcccttcggaatgactcttcttgcacagaggccttatacaacatcggtctgacttatgaaaaacttaatcgcctggacgaggcgctggactgctttctgaaactccacgctatcctgcgaaacagcgccgaggtgctgtatcaaattgcgaatatctacgaactgatggaaaatcccagccaagcaatcgagtggctgatgcaggtggtatctgttatccctacagatccgcaggtactaagtaagcttggggaactatacgatcgggagggagataaaagccaagcatttcagtactactatgaatcctacaggtatttcccatgtaatatcgaggtgattgagtggctcggggcctactacattgacacacagttctgggagaaagccatccagtacttcgaacgggctagcctaatccagccaacacaagtgaagtggcagctaatggtggcctcatgcttccgccggagtggcaattaccaaaaagcgctggacacatacaaagatacccacagaaaatttccggagaatgttgagtgcctgcgctttctggtgcgcctatgtactgatctcggcttaaaggatgcccaggaatatgccagaaagctgaagaggctggaaaaaatgaaagaaatccgagaacaaaggattaaatctgggcgggatggatccgggggaagtaggggcaagagagagggaagcgcatcaggagacagtgggcagaactatagcgccagttccaaaggtgaacgactgtcagctagactccgtgctttgccaggtaccaacgagccctatgaatcgtccagcaacaaggaaatcgacgcttcctacgtcgatcccttgggaccacagatcgagcgccccaagactgcggcaaaaaaaagaatcgatgaagacgattttgccgatgaagaattgggcgatgatctcctgccagagtag

SEQ ID NO: 17768 - DNA, 765 bp, synthetic construct
  source 1..765: mol_type = other DNA; note = Synthetic coding sequence
atggcccctggctccttcgctgagtacactgttgtgcccgcctccattgcgacacctgtcccctcagttaagccagagtatctcacattgcttgtctctgggacaactgcatacatctcactcaaagaactcggcgggttgtctgaaggcaaaaaggtcttggtaactgctgcagccggcggtacgggccagttcgcaatgcagctgtcaaaaaaagccaagtgtcacgtgatcggcacctgctcatctgacgaaaagagcgcattcctcaaaagtttagggtgcgatcggccgataaactacaagactgagcctgtgggaaccgtcttgaaacaggaataccccgaaggagtcgacgtggtctacgagagtgtcggtggtgcgatgtttgatctggcagtggatgccctggcaacgaagggccggctgattgttataggatttatctccggataccaaactccgactggcctgtccccagtgaaggccggaacactgccagccaagttgctgaaaaaatctgcctcagtccagggctttttcctcaatcactatttgagcaagtaccaggccgcaatgagtcacctcctcgaaatgtgtgtcagcggcgacctcgtctgtgaggtcgacttgggcgacctaagcccagaagggagattcaccgggctggaatccatatttagggctgtgaactacatgtatatgggaaaaaacacagggaagatcgtagtggaattgcctcattctgtgaatagcaagctgtag

SEQ ID NO: 17769 - DNA, 1212 bp, synthetic construct
  source 1..1212: mol_type = other DNA; note = Synthetic coding sequence
atgcaccatccgatccagatgaaacccgcggacagtgagaaatccaacgcagtagaggaccgcaagctgtttatcgggatggtgtctaagaagtgtaacgaaaacgatataagggtgatgttttccccatttgggcagatagaggagtgtcgcatcctcaggggaccggatggactgtcccggggttgcgctttcgtgacgttcagcacccgggctatggctcaaaatgccattaaggccatgcatcaatcccagaccatggaggggtgctcatcacctatcgtggtcaaattcgccgacacccagaaggataaggagcaaaggaggctgcagcaacaactcgcccagcaaatgcagcagctgaatactgctacctgggggaatctgactggtctcggcggcttaaccccgcaatacctcgccctccttcagcaggcaacaagcagcagtaatctcggtgcattttccgggatccaacagatggcgggtatgaatgctcttcagctgcagaacctggccactttggcggctgccgccgcggcagctcaaacatccgccacctcgacgaacgctaacccgctctctacaactagctccgcccttggggctttgacttcccctgtcgccgcaagcaccccgaatagcaccgctggcgccgccatgaacagtctgacctccttggggacgctccagggattggccggggcaacagttggtttaaataacattaatgccctggccgtggcacaaatgctatccggcatggccgccctcaatggaggactgggagcgacaggcctgaccaatgggactgccggaaccatggacgccctcacgcaggcttacagtgggattcagcagtatgccgccgctgccttacctactttatactcccagtcactgctgcaacagcagtctgcggctggatctcaaaaggaggggccagaaggagcaaacctgttcatctaccatctgccccaggagttcggggatcaggacatcttacagatgttcatgcctttcgggaatgtgatttcagcaaaggtattcattgacaagcagactaatctttctaaatgcttcggctttgtgagctatgacaaccctgtctctgcccaggcggccattcaggcaatgaatggatttcagatcgggatgaagagactaaaggtacagctgaaacgttcaaagaatgatagtaaaccatattag

SEQ ID NO: 17770 - DNA, 1332 bp, synthetic construct
  source 1..1332: mol_type = other DNA; note = Synthetic coding sequence
atggcagagtttttaaaacaagttaagccttatgtcgaagagggtctccatccacagataatcattcgcgcctttcggacagccacccaacttgctgttaataagattaaagagatcgcagtgactgtgaagaaagccgacaaggtggagcagcgtaagctgcttgaaaagtgcgctatgactgcactttccagcaaactaataagccagcagaaggcattcttcgccaaaatggtcgtcgacgcggtcatgatgcttgacgacctactgcagctgaaaatgattggtattaagaaggtgcagggtggtgccctggaggatagtcagctggtggcaggtgtcgcgttcaaaaaaaccttcagttacgcgggcttcgagatgcagccgaagaaataccataatccaaaaatagctcttttaaatgtcgagttggagctcaaggccgaaaaggacaacgctgagatcagagtacatacggtggaggattatcaggccattgtcgacgccgagtggaatattctgtacgataaactggagaagattcaccactcgggagcaaaggtcgtgctaagtaagcttccaataggcgatgtagcaacccagtattttgccgatagggatatgttctgtgcaggccgagtccctgaagaagaccttaaaaggaccatgatggcctgcggcgggtccatacagacatccgtcaacgcactgagtgctgatgtgctgggcagatgtcaggtgttcgaggagacacagatcggcggggaacggtacaatttctttaccggttgtccaaaagccaagacctgtacgtttatcctgagggggggagccgagcaatttatggaggagaccgaacgctccctacatgatgccataatgatcgtgcgccgcgctatcaagaacgacagcgtggtagcgggcgggggcgcaatcgaaatggaactgtccaagtacctgagggattacagcaggaccatccccggcaagcagcagttgctgatcggtgcctatgctaaagccttggaaattattccccgacagctatgcgacaacgccggctttgacgcaaccaatatcctcaacaagctcagggccaggcatgcccagggcgggacatggtacggagtcgacataaataatgaggatatcgcagataacttcgaggccttcgtctgggaacctgcaatggttaggattaacgccctgactgccgcgagcgaagccgcttgcctgattgtgtcggtcgacgaaaccatcaagaacccacgtagtacagtcgacgccccgactgctgctgggcggggaagagggagggggaggccacactag

SEQ ID NO: 17771 - DNA, 2193 bp, synthetic construct
  source 1..2193: mol_type = other DNA; note = Synthetic coding sequence
atgcagcttttcgagcagccctgtcccggagaggatccacgcccgggcggacagattggagaagttgagcttagttcatatacgcctcccgccggcgtgccgggcaagcccgccgctccccattttctgccggtactgtgctcggtatcgccaagtgggtcgcgcgtgccacacgacttactgggtggaagcggcggttttaccctggaggatgctctgtttggcttacttttcggtgctgatgctacactgctgcaatcgccagtggtcctgtgcgggttgcccgacggccagctttgctgcgtgattcttaaagctctcgtgacttcccggtcagcacccggagacccaaacgccctggttaagatccttcatcatctggaggagcctgtgatatttattggcgcactgaagacggaaccacaggcggcggaagcggcagagaattttcttcccgacgaggatgttcattgcgattgcctcgttgcctttgggcatcatggcaggatgctagcgataaaagccagttgggatgaaagtggcaaactggtgccagagctgcgagagtattgcctacctgggccggtgctctgtgcagcatgcggcggcgggggacgcgtgtaccatagcaccccttctgatctatgtgttgttgacctgagcaggggctcgacacctctggggccagagcagcctgaagaaggccccggcggcttgccgcctatgttgtgtccggccagcctgaatatttgtagtgtcgtgagtctgagcgccagtcccaggacccatgaaggaggaactaagctgttagctctcagcgcaaaaggaagacttatgacatgctctctggatttggactccgaaatgcctggtcccgcccgaatgactaccgagagcgcgggtcagaaaattaaggaacttctttcagggattggaaacatctccgagcgggtctccttccttaaaaaagcagtggatcagagaaataaagcccttacctctctcaatgaggcgatgaacgtcagttgcgcattgctgtccagcgggacaggcccacggccaatcagctgtaccacttccactacgtggtcgcgcttacagacacaggatgtgttaatggcaacttgtgtactggagaattcaagtagtttctcactggaccagggatggaccctctgtatccaggtgctaacatctagttgtgctctggatttggactcagcatgttctgccatcacatacaccatcccggtggatcaactaggccctggagccagaagggaagtcacactgcctctgggccccggcgagaatgggggtctggacctgcccgtgacagtgtcttgtaccttgttttatagtctccgggaggtggtcggtggtgctttagctccctccgattctgaagacccgtttctcgatgagtgcccctcagacgtcctccctgagcaggaaggcgtctgccttcccctaagtaggcatactgtcgatatgctccagtgcttgagattccctggcctggctcctccccatactagggctcctagccccctgggacctacaagggaccccgtcgctacgttcctagagacttgtagagagcctggctcacagcccgccgggccagcatccctgcgcgcagagtacttgccaccatccgtcgcctcaatcaaagtcagcgcggaattgcttcgggccgccctaaaggatggtcacagcggagttcctctgtgttgtgccacgctccagtggctgctggctgaaaacgctgccgtggacgtggtgagggcacgggctctgtcttccatccagggcgttgcgccagatggtgctaatgttcacctaattgttcgggaggtggccatgactgacctgtgtcctgcaggcccaatccaggctgtggaaattcaggtcgagtcttcttcattggctgacatctgccgggcccaccacgccgtggtgggaagaatgcaaactatggtgaccgagcaagcaacgcagggatcatcagccccagatctgagggtgcagtatctacgccagatccacgctaatcacgagaccttgctcagggaggtgcagacactacgcgatcgactgtgtaccgaagatgaggcttcgagttgcgccacagcccaacgacttttacaggtgtaccgacagctgaggcacccttccttgatcttactgtag

SEQ ID NO: 17772 - DNA, 4179 bp, synthetic construct
  source 1..4179: mol_type = other DNA; note = Synthetic coding sequence
atgtctatgctgaaaccaagtggtcttaaggctccgactaagattctcaagcccgggtccaccgctcttaaaacaccaaccgcagtggttgcccctgtcgagaaaactatttcgagtgagaaagcttctagtactcctagttctgaaacacaggaagagtttgtggatgatttccgcgtgggggagcgagtctgggttaatggcaataagccggggttcattcagtttctcggcgagacacagtttgcacctggtcagtgggctggaatcgtcctcgatgaacctatcgggaagaacgacggtagcgtggcgggtgttcgctactttcagtgtgaaccacttaagggtatattcacaagaccttccaaacttacacgtaaagtccaggcggaggatgaggccaacggcctccagaccaccccagcctcaagggccacaagtccgttatgtacctctaccgctagtatggtgtcctctagcccctctacaccctcaaacattccccagaaacctagccaacctgcggcaaaagagcctagtgcaaccccccctatttccaatctgactaagaccgcctccgagtcaattagtaaccttagcgaggctgggagcattaagaagggcgaacgggaattgaaaatcggagatcgagtgcttgtaggaggaacgaaggcgggagtcgtacgctttttgggagagactgacttcgccaaaggtgagtggtgtggcgtcgagctggacgaaccgctgggaaagaacgatggggcagtcgctggaactaggtatttccagtgtcagccaaaatacggcctgtttgccccagtgcataaggtgacaaagatcgggttcccatctacaacccctgccaaggcaaaggccaatgccgttcgacgcgtcatggccacaaccagcgcgagccttaaacggagccccagcgcctcttccttaagcagcatgtcctcagtggcttcctcagtgagcagccggcccagtcgtacgggcttgctgacagaaacatccagccggtacgcgaggaaaatttccggcacaaccgccctgcaggaagcgctgaaagagaaacagcaacacatagagcagctcctcgccgagagggatcttgagagggccgaagtggccaaggcaacttcgcatgtgggtgagatagagcaggaactggccctcgcacgagacggacacgaccagcacgtcctggagctggaggctaagatggaccaattgcgcactatggtcgaggcagcagatcgggagaaggtcgaactcctgaaccagctggaagaagaaaagcggaaagtggaggacttgcagttcagagtcgaggaagagtcaattacaaaaggagatctggaggtggccactgtttcggagaagtcgagaatcatggaactcgaaaaagatctggccttgcgagtacaggaggtcgcagagctcagacgaagactggaaagcaacaagcctgctggcgacgttgatatgagtctatcactgctgcaggaaatctctagcctgcaggaaaaactagaggtaacacgaaccgaccatcagcgggaaattacctctttaaaagagcactttggggcacgggaagagacccaccagaaagagatcaaagctttgtatacagctacagagaagctcagcaaagagaacgagtctttaaaaagtaagcttgaacacgccaataaggagaattccgacgttattgctctgtggaaatcgaagctggagaccgcgatagcttcccaccagcaagcaatggaggagcttaaggtgtcattttcaaagggcttgggaacagaaactgctgagtttgccgagctcaagacccagatcgagaagatgagattggactaccaacatgaaatagagaacttacagaaccagcaggacagtgagagagcagcacacgccaaggagatggaagccctcagggccaaactgatgaaggtgataaaggagaaagagaattctctcgaggccatcaggtccaagctcgataaagctgaggaccagcacctggtagagatggaagacacactgaataagctccaggaagctgagatcaaggtcaaggaacttgaagtgttacaggcaaaatgcaacgagcagacaaaggtgattgataacttcaccagccagttaaaggccaccgaagagaagctgcttgatctggatgcactgaggaaggcctcctcggaaggtaagagtgaaatgaagaagctgaggcaacagctggaggcggctgaaaaacagatcaagcatctcgagatcgagaagaatgcagaatcttcaaaggcctccagcatcactcgggaactacaggggagagagttgaagctgacaaatctccaggaaaatctcagtgaggtgagtcaagtcaaggagacgctggagaaagagctacagatactgaaggagaagtttgctgaagcatctgaggaggctgtctcagtgcagagatcgatgcaggagacagttaacaagctgcaccagaaggaggaacagttcaacatgctgtctagcgatttggaaaaattacgagagaacttggccgatatggaagcgaagttccgggaaaaggacgaaagagaagagcagctgatcaaggccaaggagaagttggaaaatgacatcgcagagattatgaagatgtcgggggataactccagtcagttgaccaagatgaatgatgagctgcgcctcaaggaaagagatgtggaggaactgcaactgaaactgacgaaagccaatgaaaacgcatcatttctacaaaaaagcatcgaggatatgactgtgaaggctgaacagtcacaacaagaggctgctaagaagcacgaagaagagaaaaaagagctcgagcgaaaactcagcgatctggagaagaagatggagacttcgcataatcagtgtcaggaactgaaggctagatacgagagagcaacaagcgaaactaaaacaaagcacgaagagattctccagaacttgcaaaagactcttctggatactgaagataagctgaaaggcgcaagggaggaaaacagtggtcttctccaagagctggaagagcttcggaagcaggcagataaagccaaagccgcgcagaccgcagaggacgccatgcagattatggagcagatgaccaaagaaaaaacggagacactggctagcctcgaagacaccaaacagacgaatgcaaagctgcagaacgagctagatactctcaaggaaaacaacttaaaaaacgtggaggagctgaataagagtaaggaattgctgaccgttgagaaccagaagatggaggagtttagaaaggaaatcgaaactttgaagcaggctgccgctcagaaatcacagcaactatcagccctacaagaagagaacgtaaagttggccgaagagctaggtcgcagcagggatgaggtgacatctcatcaaaagctagaagaggagcgctccgtgctgaacaaccagctcctggagatgaagaagcgcgaatcaaagttcatcaaagatgccgatgaggagaaggcgtctctgcaaaagtcgattagcattacctccgcattgctgacggaaaaggatgcggaactggaaaagttgcggaacgaggttaccgtgctgagaggcgagaacgcaagcgctaagtcgcttcacagcgtggttcagactctggaatcagacaaagtgaaacttgagctcaaggtaaaaaatctagaactccagctcaaggagaacaagaggcaactctccagttcaagtggcaataccgacacgcaagccgacgaagatgaaagagcccaagaatcccagatcgattttctcaatagcgtcattgtggacctccaaaggaagaaccaggatctcaagatgaaagtcgaaatgatgtctgaagctgccctgaatggaaacggggacgacctcaataactacgacagtgatgatcaggagaaacagtctaaaaaaaagcctagattgttttgcgatatttgcgattgctttgacctccacgatacagaggactgtccgactcaagctcaaatgtccgaggaccctcctcactcaactcaccacgggtcgcggggcgaggaacgcccatactgtgagatatgtgaaatgttcggccactgggcaactaactgcaacgacgacgaaacattctag

SEQ ID NO: 17773 - DNA, 492 bp, synthetic construct
  source 1..492: mol_type = other DNA; note = Synthetic coding sequence
atgttccgaaagatcggcatcgaggccctcaaacaggtgactaaacgatacgcaagaaaacagaacaggtgggtcaagaatcgttttctcagtcggcccggcccaatcgtacctccagtctatggcctggaagtctccgacgtgtcaaagtgggaggagagcgtgttggaaccagctcttgagattgtgcagtcttttatacaaggacacaagccaacagccactcctatcaagatgccttacaatgaagccgagaacaagaggtcttaccatttgtgcgatttgtgtgaccgaatcatcatcggtgaccgcgaatgggccgcacacatcaagtcgaaaagtcatctcaaccaactaaagaagcgccggcggctagattccgacgctgttaatactattgaaagccagtcagtctcccctgaccataataaggaacctaaggagaagggctcgcccggacagaatgaccaagaactgaaatgcagcgtctag

SEQ ID NO: 17774 - DNA, 1602 bp, synthetic construct
  source 1..1602: mol_type = other DNA; note = Synthetic coding sequence
atggcatcacctggcaaggacaattatagaatgaaatcatacaagaacaatgcactcaatcctgaggaaatgcgcagacgcagagaggaagaggggatccagctgcgaaagcagaagcgtgagcaacagctattcaaaaggagaaatgttgaactcatcaacgaggaggctgccatgtttgattcactgcttatggatagctacgtgtcttccacaaccggcgaatcagtgataaccagagagatggtcgaaatgttgttctcagatgactccgaccttcaattagcaaccacccagaagtttcggaaattactgagcaaggagccatcacctccaatcgacgaggtcatcaacactcctagggtagtggaccgcttcgtagagtttctcaagaggaatgagaattgcaccttacaatttgaggctgcctgggcgttaaccaatattgctagcggaacatctcagcagactaagattgtaatcgaggctggggccgttcccatcttcatcgagttattaaacagcgattttgaagacgtacaggagcaagccgtttgggccctaggcaatattgcaggcgactccagtgtgtgccgggactatgtgcttaactgtagcatcctcaatcctttgctgacccttcttaccaaatccacacgactgaccatgacaaggaacgccgtgtgggccctgtccaatctgtgccgagggaaaaatcctccccccgagttcgccaaggtgagcccctgtctgcccgtcctgagccggctattgttttcttccgatagcgatcttctcgctgatgcctgctgggctcttagttacttgagcgacggacctaatgaaaaaattcaggctgtgatagactcaggagtgtgccgacgcttggtcgagctcctgatgcataatgattacaaagtggcctctcctgctctgcgagccgtgggcaacatagtcactggggacgatatccagacgcaggtaatcctgaactgctcggcactgccatgcctgctgcatctcctgtcaagccctaaagaaagtattagaaaggaggcctgctggactattagcaacattacagccgggaaccgggcccaaattcaggccgtcatcgacgctaacatcttcccagtgttgatagagatcctgcagaaggcagaatttcgcacccgaaaagaggccgcatgggccattacgaacgcaacgagcggcgggacccccgaacagatccgatacctggtgtccttaggttgtatcaagcctctgtgtgatctgctgactgtcatggattccaagatagtccaggttgcattaaatggactcgagaatattcttcggctcggagaacaggagggcaagcgttccggaagcggcgtcaacccatattgcggacttattgaagaggcttatggcctcgataagatcgagttccttcagtcccatgaaaatcaggagatataccagaaagcgtttgatttgatcgaacattactttggcgtggaagacgacgactcaagtctggcaccccaagtggatgagacccagcaacagtttatatttcaacagcccgaagcgccaatggaaggctttcagctgtag

SEQ ID NO: 17775 - DNA, 993 bp, synthetic construct
  source 1..993: mol_type = other DNA; note = Synthetic coding sequence
atggaacggttcatggaacaggtggtgtttaaatacttacgcgcagagcccgaagaccactattttctgatgactgaaccccctcttaacacacctgagaatagagagtatctggctgagataatgttcgagagcttcaatgtgcccgggctgtacatagccgtccaggctgtcctcgctttggctgcatcatggacatccagacaagtgggggagcggacactcacaggaatcgtgatcgattctggtgacggcgtgacacacgtgattcccgtggccgagggctatgtgataggctcttgcatcaagcacatacccatcgctgggcgggacataacttacttcattcagcagctgctgcgggagagagaggtcggaatcccacccgaacaatctcttgaaactgcgaaggctatcaaggagaagtactgttatatttgtcccgacatcgtgaaagagtttgctaagtacgacgtggaccctcgcaaatggattaaacagtacaccggtatcaacgctataaatcagaaaaaatttgtgattgacgtggggtacgagagattcctcggcccagaaattttctttcatccagagttcgcaaatccagacttcatggaatccatttccgacgtggtcgatgaggttatccagaactgtcctatcgacgtgcgtagacccctttacaagaacgtggttctcagtggcggcagtaccatgttccgtgactttgggcgccgacttcaaagggacctgaagagagtggtggatgccaggctccgcctgtctgaagaactcagcggcggccggatcaagccaaagccagtggaagtacaggtagtgactcatcacatgcagaggtacgccgtttggttcggcgggtcaatgttggcatccactcctgagttctttcaagtgtgtcacacaaagaaagactatgaggaatatggtccctcaatatgtagacataaccctgtttttggcgttatgtcatag

SEQ ID NO: 17776 - DNA, 576 bp, synthetic construct
  source 1..576: mol_type = other DNA; note = Synthetic coding sequence
atgtccagagagcgcggatcaagaagcgaggagcccggtgccgggaatagagagtctggctcacgcgaaccggggctcgccgccgcagctatgagcaccgttgacctggctagagtcggggcatgtattctgaaacatgctgtgactggagaggccgtggagttaagaagcctgtggcgggaacatgcctgcgtggtggccggtctgagaaggttcggatgcgtggtttgccgctggattgcccaggatctgtcgagcctggctggcctgctggaccagcacggtgttaggcttgtgggcgttggcccagaagctctgggactccaggagtttctggacggagactactttgctggggagctgtacctcgacgagtcaaaacagctctataaagaacttggattcaagcgttacaatagcctcagtattctacctgccgcactgggcaagcctgtcagggacgtggctgccaagtcaccgggtgattacgtgcccaaagagcatatcctgcaggtgcttggaatctcagccgaggtatgcgcatcagacccgccccagtgtgacagggaagtgtag

SEQ ID NO: 17777 - DNA, 1050 bp, synthetic construct
  source 1..1050: mol_type = other DNA; note = Synthetic coding sequence
aatacaatacacgatgtgctcgacgtggaagcagcggttgttaaccttgataacagtgtggtagatctggaaaccctacaggctctgtacgaaaacagggctcagtcggatgagctggagaaaatcgagaagcacggtcggagtagcaaggacaaggagaacgccaaatccctggataaacctgagcaatttttgtatgaacttagtctaatccccaatttttcggagcgcgtcttctgtatacttttccagtcaactttttcagagtctatttgctcgattcgtcggaagctcgagcttctccaaaaactctgcgagacactcaagaacggacctggagtaatgcaggtgctggggctggtgctcgcatttggcaactacatgaatggggggaacaaaacaaggggccaggctgatggcttcgggttggacattctgcctaagctaaaggacgttaagagcagcgataattcacgcagtctcctgtcttatatcgtgtcatattatttgaggaatttcgatgaggacgcaggtaaagaacagtgtctgttccctctccccgaacctcaggacctctttcaagcctcacaaatgaaatttgaagacttccagaaggacctccgaaaactcaaaaaggacctcaaggcctgcgaggttgaggccgggaaggtctatcaggtgagctcaaaggaacacatgcagccctttaaggaaaacatggagcagtttattatccaggcaaaaatcgatcaggaagccgaggagaattcgctcactgaaacccataagtgtttcctggagactacagcttacttctttatgaagcccaagttaggagaaaaagaagtaagtcccaatgctttcttttccatctggcatgaattcagctctgacttcaaagacttctggaaaaaggagaacaaactgctgttgcaggagcgggtaaaggaagccgaggaggtgtgtaggcagaaaaaaggcaagtctctctacaagatcaaacccaggcatgacagtggcattaagaacaataactccatgcatacatag

SEQ ID NO: 17778 - DNA, 570 bp, synthetic construct
  source 1..570: mol_type = other DNA; note = Synthetic coding sequence
atgactgcatccgctagttctttttcaagtagccagggggtgcagcaaccaagtatctactccttttcccaaatcaccagaagcctttttctgtccaacggtgttgctgccaatgacaagctccttttgtcctctaacaggattaccgccatcgttaatgcctccgtggaaggtcagaggattctcagggggatacagtacatcaaggtaccagttaccgacgcaagagattctcggctgtatgacttctttgacccaattgcggatctcatccacacaattgatatgagacaaggtcgcacattactacactgcatggccggagtttcccgctccgctagcctgtgtctcgcttaccttatgaagtaccactccatgtcactgctggacgcccatacatggaccaaaagcagaagacccatcatccgccctaacaacggattttgggagcagctgattaactacgaattcaagctgtttaacaacaacactgtgagaatgataaattcacctgtgggtaatatccccgacatttacgaaaaggatctgagaatgatgatcagcatgtag

SEQ ID NO: 17779 - DNA, 549 bp, synthetic construct
  source 1..549: mol_type = other DNA; note = Synthetic coding sequence
atgtcgggacgatccgttccacatgcccaccccgccaccgcggagtatgagttcgcaaacccgtcccggctgggagagcagcggttcggtgaagggctcctacctgaagaaattctgactccgaccctgtaccatggctattacgttagacccagggcagctcccgcgggagagggatcgcgggcaggggcctccgagctacggctgagcgagggcaaatttcaagcctttttggacgtgagccacttcacacccgatgaggtgacagtgcgaacagtagataatcttctggaagtgtccgctagacatccacagagacttgaccggcacggattcgtctcacgcgagttctgccgaacttacgttcttccagccgacgtcgatccttggcgcgtgagggctgctctctcacacgatggaatcctcaacctcgaagctccccgtggtggacggcacctggataccgaggtcaacgaggtatacatctctctgctgcccgcccctcccgatccggaggaagaagaggaggccgccatcgttgaaccttag

SEQ ID NO: 17780 - DNA, 387 bp, synthetic construct
  source 1..387: mol_type = other DNA; note = Synthetic coding sequence
atggtgttccggaggttcgtggaggtggggcgtgtggcctacgtctctttcggccctcatgcagggaagctggtggccatagtggatgtgatcgaccaaaatcgcgctctggttgacgggccttgtacacaagtccgccgccaggcaatgccatttaagtgtatgcagctgactgactttatcctcaaattcccgcattcagcccaccagaaatacgtgcggcaggcctggcagaaggccgatattaacaccaaatgggctgcaactagatgggccaagaagatagaggcaagggaacggaaggctaaaatgaccgacttcgatcggtttaaggtcatgaaagcaaagaagatgcgaaaccggattatcaagaatgacacccgatag

SEQ ID NO: 17781 - DNA, 492 bp, synthetic construct
  source 1..492: mol_type = other DNA; note = Synthetic coding sequence
atgttccgcaaaatcggaatcgaggcactgaaacaagttaccaaaagatatgcccgcaagcaaaatagatgggtcaagaaccgattcctttctcgaccaggtccgattgtgccacctgtgtacggcctcgaggtttctgacgtgagcaaatgggaagaatctgtgttggagccagcactggagattgttcagtcgttcatacaggggcacaaacctacagcgacgccgatcaagatgccatacaacgaggctgaaaacaagcgttcctatcatctctgtgatctctgtgacaggatcatcatcggggatcgcgaatgggctgctcatatcaaatcaaagagccatcttaatcagttgaagaagagaaggaggttagattcagacgccgttaatacaattgaaagtcagtctgtttccccagaccacaacaaagaacctaaggagaagggctctcccggccaaaatgaccaagagcttaagtgctcagtgtag

SEQ ID NO: 17782 - DNA, 1224 bp, synthetic construct
  source 1..1224: mol_type = other DNA; note = Synthetic coding sequence
atggcagctgagctgtacgccccagccagcgccgccgcggcagacctcgcgaactccaacgccggggccgcagtcggtagaaaggccgggccgagatcccctccatcagcccccgcaccagcacctccaccgccggcccctgcgccacctacgctcggcaacaatcatcaggaatcccctggatggaggtgctgccggcccacactgcgggaacggaacgcgctgatgttcaacaacgagctgatggcagacgtgcatttcgtggtgggcccccctggagctacacggacggttcctgctcacaagtacgtgctggccgtcggtagttccgtgttttacgcaatgttctacggcgatctggccgaagtcaagagcgaaatccacatcccagatgtggagcccgcagccttcctcattctgctaaaatacatgtatagtgatgagattgatctcgaggctgacaccgtgctggctacgctgtatgctgcgaagaagtatatcgtgcctgctctggcaaaggcctgcgtgaatttcctggaaactagcctcgaggctaagaatgcgtgcgtgctgcttagccagtccaggcttttcgaggagccagagctgacacagagatgctgggaagtcatcgacgcacaggcagagatggccctgagatccgaaggtttctgcgaaatagacaggcaaacgctggaaattattgtgactcgagaggcccttaatacaaaggaagcagtagtgtttgaagctgtgctcaattgggccgaggcggaatgcaaacgccaaggccttccaattacccctaggaataagcggcacgtcctcggccgggctctataccttgtgcgcatccccaccatgacacttgaggagtttgctaatggggcagcccagtctgatatcctgaccctcgaggagactcacagcatatttttgtggtacactgcaaccaataagcccagactggatttccccctgactaagcggaagggactggccccccagaggtgccaccgctttcagagctctgcctaccgtagcaatcagtggcggtatagaggccgatgcgattctatccagtttgcagttgacagacgagttttcatcgctggcttaggcctttacggttcctcctccggcaaagccgagtacagcgtgaagatcgaattaaagcgcctgggcgtagtgctggcccagaacctgaccaaattcatgagctag

SEQ ID NO: 17783 - DNA, 603 bp, synthetic construct
  source 1..603: mol_type = other DNA; note = Synthetic coding sequence
atgctggaactggtggctcaaaagcaacgggaaagagaggaacgagaggagagagaggcattagagagagagcgccagcggagaagacagggacaggagctgagtgccgcgcgacagcgactgcaggaggacgagatgagacgcgcggcggaagagcggcgacgtgagaaggccgaagagctggctgcaagacagagggtacgggagaagatagagcgggacaaggctgaaagggcaaaaaagtacggcgggtccgtcggctcccagcctccccctgtcgccccagaaccgggacctgtgccaagctctccctcacaggagccacctactaaaagagagtacgaccagtgcagaatccaggttaggctacccgacgggacatccctcacccaaaccttcagggcaagagaacagctggccgcggtgcgcttgtacgtcgaattgcaccgaggggaggaactggggggaggacaggatcctgtgcagcttctgagtgggttcccgagacgggcgttctcagaggcggacatggagagacctctgcaggagcttggcctcgtgccaagtgcagtactgattgtagccaagaagtgtccaagctag

SEQ ID NO: 17784 - DNA, 885 bp, synthetic construct
  source 1..885: mol_type = other DNA; note = Synthetic coding sequence
atgggacttgcaagctggtcccaactggcttccactccacgcgccccagggagcagagacgctagatgggaacggcgcgagcccgcactgcgtggggcgaaagaccgactcacaattggcaagcacctggacatgggatcccctcagctcagaacccgggacaggggctggccatcacctaggccggagcgcgagaaacgaacgtctcagagcgccaggaggcctacttgtacggagtcccgttggaagtctgaagaagaggtcgagagtgatgatgagtacctcgctctgcccgcccggctcacccaagtcagtagtctcgtgtcctacctgggatccatttccactctggtgacgctgcccacaggcgacattaaggggcaaagccctctggaagtatccgattcggacgggcctgcaagcttcccaagcagcagttcgcagagccagctaccccccggcgccgcattgcaagggtccggagacccagagggccagaacccatgttttctgaggagcttcgtgcgggcccacgatagcgcaggcgaagggagccttggctccagtcaggcgctcggcgttagttctgggctgctcaagaccagacccagcttgcctgcccgcctggaccgatggccattttcagatccggacgtagaggggcagctgcctcggaaaggaggtgaacagggaaaggagtcactggtgcagtgtgttaaagtcatgactttaaacgtgaggaagctttgtgtgcaggtgtcctgcctgttccctcagagcaccaacattatcattaaacatgtgcatgtggatcaagctctgtttatgtgccaggccctctgttgcactctctcgtacagtgttctcaccactttcactagatag

SEQ ID NO: 17785 - DNA, 354 bp, synthetic construct
  source 1..354: mol_type = other DNA; note = Synthetic coding sequence
atggttagaaaaattaccctagtatccgccgctcccgggaaagtgatatgcgaaatgaaagtcgaagaggaacacactaatgcaattggcactttgcacggcggtctcacagccactttagtagacaacatatcaacaatggctctcttgtgtaccgagagaggcgctcctggcgtctcggttgacatgaacattacctatatgagccctgcaaagctgggcgaagacatcgtgataacagcccacgttttgaagcagggaaaaacattggcgttcacaagcgtggatctgaccaataaggccacaggcaaactcattgctcagggaaggcacaccaagcatctgggcaattag

SEQ ID NO: 17786 - DNA, 840 bp, synthetic construct
  source 1..840: mol_type = other DNA; note = Synthetic coding sequence
atgacaagcggcaaaatcaagaagtttattcaagagaatatcttcggaatttgtccgcatatgacagaggataacaaggatctcatccagggaaaggatctgctgattgcttattatgacgttgactacgaaaagaatgccaagggctctaactattggcgaaatcgagtgatgatggtggcaaagaagtttttggacgctggacacaagttaaacttcgccgtcgcgagccgtaaaactttctcccatgagctgtccgattttggtcttgagtcaactgctggggaaatccccgtcgtggccatccggacggccaagggggagaagtttgtgatgcaggaagagtttagcagagatggcaaagcccttgagagattcctacaagactactttgacggcaacctgaaacgctacctgaagtctgagcccattcccgagtctaatgatggtccggtgaaagtcgtcgtggccgaaaatttcgacgaaattgtaaataacgaaaataaagacgtcctcattgagttctacgccccatggtgtggacactgcaaaaaccttgaacccaaatacaaggagctgggtgaaaagttgtcgaaagaccctaatatagtcatcgccaaaatggacgctaccgcgaatgacgtgcccagtccctacgaagtgcgaggatttcccaccatttatttctccccagccaacaagaaattgaaccccaagaagtatgaggggggccgagagctgagcgacttcatcagctatctgcagcgggaagcgacaaatcctccagtgattcaggaggagaagcctaaaaagaagaaaaaagcacaggaagatctttag

SEQ ID NO: 17787 - DNA, 3228 bp, synthetic construct
  source 1..3228: mol_type = other DNA; note = Synthetic coding sequence
atgagccaggggttccacccagaacgcgatcccagcgacttgaaaaaagtgaaagcagtagaagaaaacggcgaggaagcagagcctgtccgcaatggcgccgaaagcgttagtgaaggggaggggattgatgctaattcaggcagcacagactcctctggggatggtgtgaccttcccatttaaacccgagtcttggaagcctaccgacaccgaggggaagaagcagtatgatagggaattcctgcttgatttccagtttatgccggcttgtattcagaagcccgagggtttgcctccaataagcgacgtcgtgctagataaaataaatcaaccaaagctgccaatgcgcaccctggacccccgcatcttgccccgtggtccagacttcacccccgcgttcgcggatttcggcaggcagacaccaggaggcaggggcgtgccaatctgtaaggtgcagagccgccatgggctcccgatattagagcagtctaaagcccccacatgccctcccctagtgatgtctcatccgcccatgaaatcactgccgctaggcctgcttaatgtgggaagccgcaggtcccagccaggccaaaggcgcgagcccagaaagatcattaccgtctctgtgaaagaagatgttcacctcaagaaagctgagaatgcctggaaacccagtcagaagcgagattcccaagcagatgaccccgagaacatcaagacccaggagctattccgaaaggttcggagcatccttaacaaattaacaccccagatgttcaaccagctgatgaagcaggtgtcaggcctgacagttgatacagaagagaggctgaagggggtgattgatctcgtgttcgaaaaggccatcgatgagccttctttctctgttgcctatgccaatatgtgccgctgcctggtgaccttgaaggttccgatggccgataaacccggtaatacagtcaacttcaggaagctgcttcttaatcggtgccagaaggagtttgagaaggataaggccgacgacgacgtgttcgaaaagaaacagaaggaattggaagccgcttcagcccccgaagaacgtactaggctgcacgatgagttggaagaggccaaagataaggccagacgccgatctatcgggaatataaagtttattggggagcttttcaaactgaagatgttaactgaggctatcatgcacgactgtgtcgtgaagctgctgaagaaccatgatgaagagtctctggagtgcctctgccgcctcttgacgacaatcggcaaggacctggactttgaaaaggctaagccccgtatggaccaatatttcaatcaaatggagaagatagtgaaggaacgaaagacgtcttcgcggatccgattcatgctccaggatgtaattgatctcaggctctgtaattgggtctccaggcgagcagatcagggccctaagactatcgagcagattcataaggaagccaaaatcgaggaacaggaagaacaacgaaaagtgcagcagctgatgactaaggagaaacgacgcccgggcgtgcagagggtggacgaggggggctggaacaccgtgcagggagctaaaaacagcagagtgctggacccaagtaagttcctcaaaatcacgaaaccaaccatcgacgagaagattcagctcgtgcccaaagcacaacttgggagttggggcaagggatcttccggcggtgctaaggcatcagagacggacgcgcttagatcatcggcatcgtcactgaatcggtttagcgctctgcagccccccgctccaagcggaagcaccccctcaactcctgttgaattcgactcacgcagaaccttaacttctagaggatcaatgggccgggaaaagaacgacaagccgctgccaagcgcgactgctcgcccaaacacatttatgagggggggctcctccaaagacctgctggacaaccagtcccaggaggaacaaagacgcgagatgttggagactgttaagcaattgacagggggcgtggatgtcgaaagaaatagcactgaagcagagcgcaacaagacccgggagagtgccaagcccgagatatccgcgatgtcagctcacgacaaagccgccctgtccgaggaggaactggagaggaagtcaaaaagtatcattgatgagttcctgcatatcaatgattttaaagaagcaatgcagtgtgtggaagaattgaacgcccaggggctcttacacgttttcgttcgcgtgggagttgagtctaccctcgaaagaagtcagataaccagggaccacatgggccagttgttgtaccaattagtgcaaagtgagaaactctcaaaacaagacttcttcaagggattttccgagactctggaattggcagatgatatggccatcgacattccacacatatggttgtatctggccgaattagtgactcccatgcttaaagagggcggcatttccatgagggagcttaccattgagttttcaaaaccactgctgccagtgggcagggccggcgtgctgctgagcgagatccttcacctcctttgtaaacagatgtcacacaagaaggtgggggccctgtggagggaggccgacctgagttggaaagacttcctgccagagggcgaagacgtgcacaacttccttcttgagcagaagctagacttcatagagagcgactcaccttgttcatctgaagctctgtctaaaaaagaattgtccgctgaagaactgtacaaaaggcttgagaagttgattatcgaggataaggccaatgacgaacagatctttgattgggtggaagcgaacctcgatgaaattcagatgagctcccctaccttcttgcgtgccttgatgacagccgtctgtaaagccgcgatcattgccgactcaagtaccttccgcgttgacaccgctgtgattaaacagcgcgttcctatcctgctcaagtatcttgacagtgacactgaaaaggagcttcaagctttgtacgcactacaggccagtattgtgaagctggatcagcccgctaatctgctgaggatgtttttcgactgtttatatgacgaagaagtcatatcagaagatgccttctataagtgggaaagctccaaggaccccgccgaacagaacggcaagggggtcgctctgaagagtgtgacggcgtttttcacttggcttcgggaggcggaggaagagagcgaggacaactag

SEQ ID NO: 17788 - DNA, 474 bp, synthetic construct
  source 1..474: mol_type = other DNA; note = Synthetic coding sequence
atgaaatgcatcccatacagtgtcctgctcaaggatctcgaaatgcgcaacctcagagaactggaagacctcatcatcgaggccgtttacaccgacatcatccaggggaaactggaccagagaaatcaactgctggaagtagatttctgcatcggaagagatataagaaagaaagacattaataatatagtgaaaactttgcacgagtggtgcgacggatgtgaggccgttctcctgggtatcgaacagcaagtcctacgcgccaaccagtacaaagagaaccataatcgcacgcagcaacaggtcgaggctgaagttaccaatatcaaaaaaacacttaaagctactgcaagctcatctgcccaagaaatggagcagcaattagctgagcgtgagtgcccgccccacgccgaacagcgccagcctactaagaaaatgagcaaggtgaagggtctagtatcaagtcgacactag

SEQ ID NO: 17789 - DNA, 837 bp, synthetic construct
  source 1..837: mol_type = other DNA; note = Synthetic coding sequence
atggattgtagagaaatggacctttacgaagattaccagtcaccattcgacttcgatgccggcgtcaataagagctacctctatctctcgccttctggcaactctagcccgccagggagtccaacactccaaaaatttggtctactccgaactgaccctgtccctgaagaaggggaagatgtggcggcaactatctctgcgactgagactttgtccgaagaagaacaggaagagctcagaagagagctggccaaggtggaggaggaaatccagaccctgtctcaggttctggctgcaaaggagaagcacctcgcggagattaagcgcaagctcggcataaactctctgcaggaattgaaacaaaatatcgccaaaggatggcaggacgtcaccgcaacttccgcctataaaaagacgtcagagaccctttcccaggccggtcaaaaggccagcgcggctttcagctcagttggaagtgtgatcaccaaaaagctggaagatgtgaagaactccccaacatttaaaagttttgaggagaaagttgagaacttgaaggggagcccaaaaaatgttgagtcttttgcctccatgctcagacattctccactcacacaaatgggtcctgctaaggacaagttggtcatcgggcgcattttccacatagtggagaacgacctgtatatagactttggtggcaagttccattgcgtgtgcaggcggcctgaggtagatggcgagtcccccatttcttggtatgccgtgtggcgtagattctcacaggtgatgattacctgtttttcctctaactctgattttgggaagcatcggaaacggtag

SEQ ID NO: 17790 - DNA, 3123 bp, synthetic construct
  source 1..3123: mol_type = other DNA; note = Synthetic coding sequence
atggttagcagtgcacagatgggctttaacctgcaagctttgctggaacagctgtcccaagacgaattgtccaaattcaagtacctgataacaactttttcgctggctcatgaactgcagaagatcccacacaaagaggtggataaagccgacggtaagcagttggtcgaaatattaactacacattgtgatagctattgggtagagatggcctccttacaagtgttcgaaaagatgcaccgaatggatttaagtgagcgcgctaaggacgaagtgagggaggccgctctgaagtcctttaacaaaagaaaacctcttagcttgggcatcacacggaaagaacgcccccctcttgacgtggacgaaatgttagagaggtttaagacagaggcacaagacaaagataatagatgtagatacatactgaagaccaagtttcgagagatgtggaaatcatggcctggggactccaaagaagtgcaggtcatggcagagagatacaagatgctgattccctttagtaacccacgggttctccctggaccctttagctatacagtggtcctgtacggtcctgctggcctgggtaagacgactttagcacagaagctcatgctggactgggcggaagacaaccttatccataagttcaagtatgcattttacctaagctgtagagagctatcccggctaggcccctgttctttcgccgaactggtcttcagggactggcccgagcttcaagatgatatacctcatatcctggcccaggcccgcaagatcctgtttgtgatcgacgggttcgacgaactcggggcagcaccaggcgcgctgatagaggacatatgtggggattgggagaagaagaagccagtaccagtgttgctgggttcactattgaatagggtgatgctgcctaaagctgcccttttggtgacaactcggccacgagctctgagagacttgcgtatccttgcagaggaacccatttatatccgcgtggagggcttcctcgaagaggaccgaagggcttacttcctgaggcactttggcgacgaagatcaagcgatgagggcgttcgagctgatgcgctctaacgcagccctgttccagctgggttcagcccccgccgtgtgttggattgtctgcacaacactgaaactgcagatggaaaaaggggaagaccccgtacccacatgtctgactcgtactggtctgtttctgcgcttcctgtgttcgagatttcctcagggcgctcagctgcgcggcgccctccgaactctgtctttactcgcagctcaggggctgtgggcccagaccagtgttctgcatagagaagatcttgaaaggctgggtgtccaagaatcagatttacggcttttcttggatggagacattctgcggcaggacagggtgagtaagggttgttactccttcatccatctcagtttccagcaatttcttacagcattgttctacacactcgaaaaggaggaagaagaagatcgcgatggacatacctgggacattggtgacgttcagaagctgctgtctggcgtcgagcggttgagaaatcccgacctaatccaggcaggctactactcctttggccttgccaatgagaagagagcgaaggagcttgaggccacgttcggctgtagaatgagtcccgacatcaaacaagagttgctgaggtgcgatatttcgtgcaaggggggccatagtaccgtgaccgacctgcaggaattgttaggatgtctttacgaaagtcaggaagaggaactagtcaaggaagtgatggcacagttcaaagagatctccctgcacctgaacgccgtagatgtggtgccatcttccttttgtgttaagcactgtcgaaacctgcagaagatgtccctgcaggtgataaaggaaaatttgccggaaaacgtgacagcatctgagtcagacgctgaagtagaaagaagccaggatgatcagcatatgctgccgttttggacagacctttgtagtatttttggttctaacaaagaccttatgggtctggcaatcaacgactcctttctgtccgcttccctagtgaggatcctgtgcgagcagatcgcttcagatacttgccaccttcaacgcgtcgtgtttaaaaacatcagcccagccgatgcccataggaacctctgcctggccttacgtggtcataaaactgtcacatacctcactctccagggcaatgaccaagatgacatgtttcctgccttatgcgaggtgctcaggcatcctgaatgcaatttgaggtacttgggccttgtgtcttgttccgccactacccagcagtgggcagatctgagtttggcactcgaagtcaatcagtcccttacctgcgtgaacctgagcgacaacgagctcctggacgagggagccaagctgctgtatacaactctgcgccacccaaaatgctttctgcagagacttagtttggaaaactgccacctgacggaagccaattgcaaagatctggctgcagtcctggtggtgtcccgagaactaacacatctgtgtttggctaaaaaccccatcggcaatactggggtgaaattcttgtgcgaggggcttagatatcctgagtgcaagctgcaaaccttagtcctttggaattgcgacatcacttccgatggatgctgcgatcttacgaaattgctgcaggagaagagctctctgctgtgcctcgacctgggcctcaatcacataggggtgaaagggatgaaattcctgtgcgaggctctcaggaagccactttgtaacctgcgttgtctgtggctgtggggctgttcaatccctccattctcctgcgaagatctttgctctgccttgtcttgtaaccagtcactggtgacgttggatctgggccaaaatccccttggctcctcgggcgttaagatgctgttcgaaacactgacgtgctcctctggaacattgaggactttgcgattgaaaattgatgatttcaatgacgagctcaataagctgctcgaggaaatagaggaaaagaaccctcagctgatcattgacacagaaaagcatcatccgtgggccgagcgcccgtcgtcacacgattttatgatttag

SEQ ID NO: 17791 - DNA, 1809 bp, synthetic construct
  source 1..1809: mol_type = other DNA; note = Synthetic coding sequence
atgtccgacaaatccgacttgaaggccgaattggaaaggaaaaaacagagactggcccaaattcgtgaggagaaaaagcggaaagaagaggagagaaagaaaaaagaggctgatatgcagcaaaaaaaagagccggtgcaggacgattcggatctggacaggaagcgacgtgaaactgaagccctgcttcaaagcatcggcatcagtccagaacctcccctcgttcctactcccatgtccccctctagtaaatccgtttcaacccccagcgaagcgggtagccaggactctggcgatttgggcccgcttacaaggagaagattacacaagctcggcgtttccaaagtcacccaggtcgacttcctgccgcgagaagtggtttcctactccaaggagacacagactcctttggcaactcaccaatcagaggaagatgaagaagacgaagagatggttgaatccaaggtgggccaagatagtgagctggagaatcaagataagaaacaggaggtaaaagaggccccgcctcgcgagctcacagaagaggagaagcagcagatcctacactccgaagagttcttgatcttctttgacagaaccattcgagtcatcgagagggctctggcagaggactctgacatcttcttcgattacagcgggagagagcttgaggagaaggacggagacgtacaggcgggtgctaaccttagcttcaacaggcagttctacgacgagcactggtccaagcatagggttgtaacctgtatggactggagcttacagtacccggagttgatggtggcgagctacaataataatgaggacgccccccatgagcccgatggagtcgcactcgtatggaacatgaagtttaagaaaaccacgcccgagtacgtgttccactgccaaagtagcgttatgtccgtttgctttgctcgcttccaccccaacctggtcgtgggtggaacctactctggccagattgtgctctgggacaaccgctctcataggcgcactccagtgcagcgcactcctctcagcgccgctgctcacactcacccagtctactgcgtgaatgtcgtggggacacagaacgcccacaacctgatcaccgtgagcaccgatggaaagatgtgtagctggtcactagacatgctgtcaaccccccaggagtccatggaactggtctataataagtcaaaacctgtggctgtgactggcatggccttccccaccggggatgtcaacaactttgttgttggctctgaggaggggacagtgtacactgcttgccggcatgggtccaaggccgggattggtgaagtctttgagggacatcagggacctgtaacaggcatcaactgtcatatggcggtcggaccaatcgatttttcccacctgtttgtgacttcctcattcgactggactgttaagctgtggaccacaaagcacaacaaaccgctttatagttttgaggacaacgccgactacgtgtatgatgttatgtggagcccagtgcacccagcccttttcgcatgtgtcgacggtatgggcagactggacctgtggaacttgaacaacgacacggaggtgccaactgcctcggtggccatagagggagcctccgctctaaacagggtgcgttgggctcaggcgggcaaggaagtggccgttggcgacagtgaagggcgcatttgggtgtatgacgtaggtgagggtctggccatgcttccagggtggtcacagaatagttggacccaggcaattctgttgtgttggccccctaaggtgctcggcttacagacctag

SEQ ID NO: 17792 - DNA, 2847 bp, synthetic construct
  source 1..2847: mol_type = other DNA; note = Synthetic coding sequence
atgtacggctccgccaggtcggtggggaaggttgagccttcgtcccagagccccggtaggtcccctagactccctagaagccctagactcggtcatcgtagaaccaattccaccgggggttcgagtgggagctccgttggcggagggtcaggtaagacactatccatggagaacatacaatcacttaatgcggcctacgctacaagcggcccgatgtacctctccgaccacgaaaatgtgggatccgagactcccaaaagtacaatgactttaggcagatccggcggtcggctgccttatggcgtccgaatgaccgcaatgggctcatctcccaacatagccagttccggcgtggcgtctgatacaatagcattcggagagcaccacctaccaccggtttcaatggcttccacagtcccacattccctgcggcaggcgcgcgacaacacaatcatggatttgcagacacagctgaaggaggtgttaagagaaaacgatttgttacggaaggatgtggaagtgaaagaaagtaagttgtccagctctatgaattcaattaagaccttttggagcccagaattgaagaaggagcgcgcactgagaaaggacgaagcatccaagattacaatctggaaagagcaatatcgagttgtccaggaggagaatcagcacatgcagatgaccattcaagccctccaggacgagctgaggatacagcgcgatctgaaccagctctttcagcaggatagctcctctagaacaggggaaccttgcgtagccgaactgacggaagaaaattttcagagactccacgccgagcacgagcgacaggcaaaggagctctttctacttcggaagacactggaagagatggagttgcgcattgaaactcagaagcagacactgaacgcccgggatgagtctattaagaagttgcttgaaatgctacagtcaaagggactttccgccaaggcaactgaagaagatcacgaaaggactagaagacttgccgaggcagaaatgcatgtgcatcatctcgagtcacttcttgagcagaaggagaaagagaactctatgctgagagaagagatgcaccgccgcttcgagaacgcgcccgactctgccaagacgaaagcactgcagacagttatcgaaatgaaagactcaaagatttctagtatggaaagagggcttagggatctggaagaggaaatacaaatgcttaaaagcaacggtgccctctcgacggaggagcgcgaagaggagatgaagcaaatggaggtgtataggtcccactccaagtttatgaagaataaaattggacaagtgaaacaggaattatctagaaaggatactgaactcctggccctgcagacaaaactagagacactgaccaaccagtttagcgatagcaagcagcatatcgaggtgctcaaggaatccctgacagctaaagagcagagagctgctatcctccagacggaagtggatgccctaagactccggctggaggagaaggagaccatgcttaataaaaagactaagcagatccaggatatggccgaggaaaagggaacacaggctggcgagattcacgacttaaaagacatgctcgacgtgaaggagagaaaagtgaacgttctccagaaaaagatcgaaaacctccaagaacagctccgagacaaggagaaacaaatgagcagcttaaaagaaagagtgaagtctctgcaagcagatacgaccaacaccgacacggcattaactaccctcgaagaggccctggctgaaaaggagaggaccatcgagagactgaaggagcagcgggaccgagatgaacgggagaagcaagaagaaatagacaactacaaaaaggacctgaaggacttgaaggagaaggtgtctctgctccagggggaccttagtgaaaaggaggctagtttgcttgatttgaaggagcacgctagtagtttagcttcctctggcttgaagaaggattctaggctgaagaccctggaaatcgcacttgaacagaaaaaggaggagtgtctgaagatggaaagccagctcaagaaagcccacgaggccgcactagaggcccgcgcatcgcccgaaatgtcggaccggatccaacacctcgagagggagatcaccagatacaaagacgaatcctcaaaggctcaggccgaagttgacagactgctagagatcctgaaggaagtagagaatgagaagaatgacaaggacaaaaaaatcgccgagctggaatcgctattcagccgccaggtgaaagatcagaacaaaaaggtagccaatctcaaacataaggagcaggtggaaaaaaagaagtctgcgcagatgctagaggaagcacgaaggcgtgaagacaatttgaacgactcatcgcagcagctgcaggttgaagaactactgatggccatggagaaggttaagcaggaactggaaagcatgaaggcaaagctgagctccacccagcaatcattggctgagaaggagactcatttaaccaatctgcgcgcagagagaagaaagcacttggaggaagtgttggagatgaagcaggaggcactccttgctgccatatccgagaaagacgccaatattgctcttctggagctgagttcatctaagaaaaaaacccaggaagaggttgctgctttgaagcgagaaaaggaccgcctggtacagcagcttaaacaacaaacacaaaatagaatgaaactcatggcggacaattacgaggacgaccacttcaagagttcacacagcaaccagactaatcacaaaccctccccagaccaggacgaggaggaggggatttgggcatag

SEQ ID NO: 17793 - DNA, 2742 bp, synthetic construct
  source 1..2742: mol_type = other DNA; note = Synthetic coding sequence
atggaggtgggtagtgaggaagagaaatgggagaaactcgatgcagaattcgatcacttcgtcgtggatatgaaacccttcgtgctgaaactgcctcataggacggagcgacaaagatgtgccctgtggattaggaaactctgtgagccaagtggtactggggccggtataatggggcgaaaaaatagaaacctgtacgctaagctcttgctgcacatgctcaagaggggagcccttgaggggccttttacacacagaccggaaccagggacattaaaaatcttgcctagctacatgagcatctattttgacgaacctaatccggctcgagctaagggatcgtcccccgaaggcttgccggcttgggtcctgggggagctggagacatcagagcacaaactaaacgagtcgtggaagctgtccagcggagaggacaacaccctggttcaatcccccacggacgtatattcacgtgagcagtacactggcaagctgcgggtcaggagccacagcttatccccaactcatcgcgaagatgggcagaacattacccccaagatttgtgaagtctactcgaagaagtcacccgtgagccttgatgattctgatatcgaggctcggctgaattcttggaatctgggcttagacatgaagacgaaaatgatggaggccaagtttcacgaggaaaagttgaagctgcaacagaagcatgatgcggatgtgcaaaagattctcgaaaggaagaacaatgagatagaggaactcaagactctctatcggtctaagcagcacgaaacggaggaaaccatccgaaagttggaaaaaaaggttcagacgctaatacgtgattgtcaggttatccgtgaaactaaagaggaccagattgcagagctgaagaaaatctgcgaacagtctacagagtcgctgaacaatgactgggagaagaaactgcacaatgctgtggcagagatggagcaggaaaaattcgatttacagaagcagcacactgagaatatccaagagttattggaggacacaaatgttcgccttaataaaatggagtcggagtacatggcgcagacacaaagtactaatcacatgattaaagagttagaggcgagagtgcagcaacttacgggggaagctgaaaactctaatctgcaacggcagaagcttattcaagaaaaggcagagctggagcggtgctaccagattacctgtagcgaactccaggaagtgaaagccagacggaatacgctgcacaaggagaaggaccatttagtcaacgactacgaacaaaatatgaagttgctgcagaccaagtatgacgccgacataaatcttctgaaacaggagcatgcactaagtgcttctaaagcttcctcaatgatcgaggagctggaacagaatgtgtgccaactgaagcagcaactccaggaatcagaactgcagcgcaaacagcaactgagggatcaggagaacaaattccaaatggaaaaaagtcaccttaagcacatctacgagaaaaaagcccatgatcttcagtctgagttggacaaaggtaaggaggatacccagaaaaagatccataaatttgaggaggcccttaaagagaaggaagaacagcttactagggtgaccgaagtgcagcggctccaagctcagcaggccgacgccgcacttgaagagttcaagcgccaggtcgagctgaattccgaaaaggtctatgctgagatgaaggaacagatggagaaggtagaggccgacctgacaaggagcaaatctttaagggagaaacagagcaaggaattcttatggcagctggaagacattcggcaacggtacgagcagcagatagtggagctgaagttagagcacgagcaggaaaagacacatttgcttcagcagcacaatgctgagaaagacagccttgttagggaccatgagcgcgagatcgagaaccttgaaaaacagttgagggccgctaatatggagcacgaaaatcagatccaggagtttaagaaacgagacgctcaggtaattgccgatatggaggcccaggtacacaagctgcgcgaggagctgataaatgtcaactcgcagcgtaagcaacaactagtggagctgggcctgcttcgagaagaggagaagcagcgcgcgacgcgggagcatgagatcgtggttaacaaactcaaagccgagagcgaaaagatgaagatcgagctgaagaaaacacacgcagctgaaaccgaaatgacattggagaaggccaactccaagctgaagcagatcgaaaaggaatacacccaaaaactcgccaagagcagccagattatcgccgagctgcagacaaccatctcctcacttaaggaggagaattcgcagcaacagctggccgcggagagacgactacaggatgttaggcagaaatttgaggatgaaaaaaaacagctcatcagagacaacgaccaggccatcaaggtcctgcaggacgagctggaaaatagaagtaaccaggttcgttgtgccgaaaaaaaactgcaacacaaggaactcgagtcccaagaacagattacatacatacggcaggaatatgagactaagctgaagggcctgatgccagcctcactgagacaggagcttgaagacaccatctcaagcctaaaaagtcaggtcaactttctgcaaaaacgcgctagcatcctccaggaggaactgactacgtaccagggacgccgctag

SEQ ID NO: 17794 - DNA, 825 bp, synthetic construct
  source 1..825: mol_type = other DNA; note = Synthetic coding sequence
atgcaggatgaaaagctaagagacgaaacggagcagcctgtatcgaaagtgattgagcggaatcgtctccgcactgtattaaagaacttgtccttgttgaagctgctgaaatcgtctaataggaggatacaggagcttcacaagttggccaagaggtgctggcactccttactgtcagtgcccaagattttgaggatcagctccggcgagaatagcgcttgcaataaaaccaagcagaataacgaagagtttcaggagatcggctgctctgaaaaggagttgaaaagcaagaaactggaaagcaccggcgatcccaagaaaaaggagtataaagagtggaagtcacaggtccagagtggcatgcgaaacaaggagaaaacttctcttgctgctatgccaaggaaggaaaagcacatcgagccagaggtgcccagaacgtcaagggatgattcccttaaccccggagttcagggaagacaacccctaactgaaggtccaagagttatctttatcaagccttataggaatcgcactccaatgggccatatgaagcaattggatgttgctgaccaatggatttggtttgaaggtctcccaactaggatacaccttcctgcccctagagtgatgtgtcgctccagcacccttcgctgggttaagaggcgttgcacacggttctgtagtgcctcacttgaaatgccaatgtggcatccctacaaagtggacgttacatggacaagagctcggggtgctagccgcgggtggcggtccagacatcagctgaagggtcgcaacggctggcggaacagccgcgtgtataagtag

SEQ ID NO: 17795 - DNA, 156 bp, synthetic construct
  source 1..156: mol_type = other DNA; note = Synthetic coding sequence
atgcagctgcgccacattggggataacattgatcaccgaatggttagggaggatctgcagcaggatggccgggacgccctggatcactttgtgttttttttttttcgtcgggttcaagtactgctacattttttctggaacaaccaccttctgtag

SEQ ID NO: 17796 - DNA, 444 bp, synthetic construct
  source 1..444: mol_type = other DNA; note = Synthetic coding sequence
atggctggtggagccagagaagttttaacattgcaactggggcatttcgctggcttcgttggggctcactggtggaatcagcaggacgccgctctaggacgtgcgacagacagcaaagagccccccggcgaactgtgtccagatgtattatataggacagggcgcacactacatggtcaggagacctacactccacggttgatcctcatggatctgaaaggctctctgagctcattaaaggaagagggcgggctctaccgagataagcagctggatgccgccatcgcctggcaaggaaagcttaccacacacaaggaggagctttatccaaagaatccttacctgcaggactttctgagcgcggaggtgagggcctccgttctcaacttcctgactcgctgccacaacttgcgggtgtcgataggagctgggtcggcggaatag

SEQ ID NO: 17797 - DNA, 1677 bp, synthetic construct
  source 1..1677: mol_type = other DNA; note = Synthetic coding sequence
atgagtgtatctgttcacgagacacggaaaagccgctcctcaaccggaagtatgaatgtgacgctttttcataaagcctcccacccagactgcgtgctcgccgctagcagtcggtactttgaagcgatgttctcccacggactgagagagtcgcgggacgatacagtgaatttccaggataacttacacccagaagtcctggagctgttgctggacttcgcatactcgtccaggattgccattaacgaggagaatgcagaatcgctgctggaggctggagacatgctgcaatttcacgacgtgcgcgatgccgcagccgagttcctggaaaaaaacctctttccttcaaattgtcttgggatgatgctgctgagcgacgcccatcagtgcaggcgtttgtacgaattttcctggagaatgtgcttggtccacttcgagaccgtgcgccagtctgaggactttaactcattgtccaaagacactctgctcgatcttatctcgtccgatgagttagagacagaagacgaacgggtggttttcgaggcgatactgcagtgggtaaagcacgatttggagcccaggaaggtgcatctcccagagctactgcgcagcgttcgactcgccctcctccctagtgactgcttacaggaagctgtctcaagtgaagcgctgctcatggctgacgaacgaactaaactgatcatggatgaggctttgcgatgtaagaccaggatcctgcagaacgacggggtggtaacaagcccctgcgctcggcctaggaaggctgggcatactctcctgattcttggggggcaaacatttatgtgcgataagatttaccaggtagatcacaaggccaaagagataattccgaaggcggatctgccctcacctcgaaaagagttctcagcctccgcgatcggatgtaaggtgtacgttaccggcggaaggggctctgaaaatggtgtcagcaaggacgtgtgggtgtacgacactgtacatgaggagtggtccaaagcagctcctatgctgattgcacgattcgggcatggctccgcggagttagagaactgcctttacgtcgtgggcggacacacctccctggcgggtgtgttcccggcctcccccagcgtatctctcaaacaggtggagaagtatgatcccggggccaacaagtggatgatggtggccccgttaagggacggagtctctaatgccgccgtcgtgagtgcaaaactgaaactcttcgtattcggcggtacttccatccacagagatatggttagcaaggtccaatgttatgatccttcagaaaacaggtggactatcaaagcggaatgtccacagccctggcggtataccgccgccgccgtgctaggctcacagatcttcattatgggaggcgatacagagttcaccgctgcgtccgcttaccggttcgattgtgagacaaatcagtggactcgtatcggagatatgaccgctaaacggatgagttgtcacgccttggcatcaggaaataagctttacgtcgtcggaggttacttcgggacccagcggtgcaagacgttggactgctacgatccaacgtccgacacctggaattgtattactacagtaccctatagcttgattcctaccgccttcgttagcacttggaagcacttgcccgcttag

SEQ ID NO: 17798 - DNA, 2916 bp, synthetic construct
  source 1..2916: mol_type = other DNA; note = Synthetic coding sequence
atgaacttcctgcgcggtgtcatgggggggcagtcagcagggccacagcacactgaggcagaaacagttcggggcgctgctggcctgggcttgggtaaaggaagtggacagggccgagggcgaagcacacgcaggcctgaagaatgcggcctcaagtttcgacactctttccgcctcgtcaagcacattctctatcacgtgacaatcaacgtgtccgactcagagatcattggatatgcccttgatacgctgtacaatattatctccaacgaggaggaagaagaggtcggcggttcacaggaggagaactcaactagacagtccgaagatctcggcagccagttcacagaaatatttattaaacagcaggaaaacgttaccctgctcctgtcccttctggaggagttcgacttccacgtgcgatggccaggcgtcaaacttttgacgagtttgttgaaacagctgggtccccaagtgcagcagataatcctggtgagtccaatgggagtgagccgcctgatggatctactggccgattcccgcgaggtcattcgcaatgacggagtgttgctgctgcaggccctcactagatctaacggcgcaatacagaagatcgtggccttcgaaaatgcttttgaaagacttctcgatatcatatcagaagaagggaattccgatgggggtattgtggtggaggattgcctaatcctgctgcagaacctcctcaagaacaataatagtaatcagaatttttttaaggaggggagctatatccaacggatgaaaccatggttcgaggtgggcgatgagaacagtgggtggagcgcccagaaggtgactaacctgcatctgatgttacaactggtaagagtgctggtgagccctactaacccccctggagctacaagctcttgccagaaagcgatgtttcagtgcggccttctccagcaactgtgcactatccttatggctacaggggtcccagccgacatactgacagagaccatcaatacggtgagcgaggtgattcggggttgccaggtgaatcaggattatttcgcttccgtgaacgccccaagcaatccgccacgacctgcaatagtggtcctgctgatgtctatggttaatgaaaggcagccctttgtcctcaggtgcgcagtattatattgttttcagtgcttcctgtacaagaatcagaaaggtcagggggagatcgtgtcaacgctcctgccttcgaccatcgacgccacagggaacagcgtttctgcaggccagctgctttgcggcggcctgttctctacagattccctgtcaaactggtgcgcggcggtcgccctcgcacatgcgctgcaggaaaatgccactcaaaaggagcaacttttgagagtccagctggccacctctattgggaaccccccagtgtccctactccagcagtgcacaaacattctttctcagggggataagatcgaccggcggggatccaaaatccaaaccagagtggggttgcttatgctcctgtgcacctggctatccaattgcccaattgctgtgactcactttttgcataattctgcgaacgtgccattcctgaccgggcagattgccgaaaacttgggcgaggaagagcagctggtccagggtctctgtgcattgttgcttggcatatcaatatactttaatgataattcgctggaatcgtacatgaaggaaaagctgaagcagcttattgagaaacggattggcaaagaaaattttatagagaagttggggtttatctccaagcatgagctttatagcagggccagtcaaaagccccagcctaacttcccttctcccgagtatatgattttcgaccatgaattcaccaagcttgttaaagagcttgaaggcgtgattacgaaagcaatatacaagagctccgaagaggacaagaaagaagaagaggtcaagaaaaccctggaacagcatgacaacatcgtgacccactacaagaacatgatcagggaacaggatctgcagctggaggagctccgccagcaagtgagtactcttaagtgtcagaacgagcaactgcaaacagctgttacccaacaggtgtcgcagatccagcagcataaggatcagtataatttgctgaaaatccagcttggcaaagataaccagcaccaagggagttacagcgagggagcccagatgaacggcattcagcccgaggaaatcggaaggttacgcgaagagatcgaggagctgaaacgaaatcaggagctgcttcagtctcagctgaccgaaaaagatagtatgatcgagaatatgaaatcatcccagacaagcgggaccaacgagcaaagctccgctatcgtgagtgctagggactcagagcaagtagccgaactgaagcaggagctggcaaccctgaagtctcagctcaactcacagtctgtggagatcactaaattgcagactgagaaacaagagctgctccagaaaaccgaggcattcgctaaaagcgtcgaggtccagggcgaaactgagactattattgcaactaaaaccaccgacgtagaaggccggctcagcgcgttgctgcaggagaccaaagagctcaagaacgaaattaaagcgctgagcgaggaaaggaccgctattaaggaacagctggacagttctaattccaccatagctattctgcagacggagaaagacaagttagagctcgagattacggactcaaagaaggagcaggatgatttactagtactcctggccgatcaggaccaaaagattctcagtcttaagaataagcttaaagacttgggccatccagtcgaagaggaagatgagctggagtccggagatcaagaggacgaggatgatgagagtgaggatccaggaaaggatctcgaccacatttag

SEQ ID NO: 17799 - DNA, 258 bp, synthetic construct
  source 1..258: mol_type = other DNA; note = Synthetic coding sequence
atggggaacagcgactcgcagtacactctgcaggggtccaagaatcactctaatacgatcaccggagcgaagcagatcccctgtagcttgaaaatcagaggcattcacgcaaaggaagaaaaatccttgcacggctggggtcatggatccaatggtgctggatacaaatcacggagcctcgctcgttcttgtctctctcactttaagtcaaatcaaccttacgctagcagattgggcggccccacatgtaaagtgtag

SEQ ID NO: 17800 - DNA, 174 bp, synthetic construct
  source 1..174: mol_type = other DNA; note = Synthetic coding sequence
tgagggagagcccctgggcccgcaataggcgggcgaagagccggggatagctgtcctggatggcggcgaagaagtagaagtagagggcgtggtcagcgcctgagccacggacccaggagaagacctcagttactgacagagacaaggaggccagtgctcgttcagtggctgtag

SEQ ID NO: 17801 - DNA, 936 bp, synthetic construct
  source 1..936: mol_type = other DNA; note = Synthetic coding sequence
atggttagcttaagagtgaaccctcttagccttgttgaaataatattacacgtggttcggcagatgacagatcccaacgtggccctgacatttctcgaaaagacacgggaaaaagtcaaaagctccgacgaggctgtcatcctttgcaagaccgccataggggcccttaaactgaacattggagatctgcaagtgaccaaggagactatagaagatgtggaagaaatgttgaataacctccccggtgtgacctctgtacattcaaggttctacgatctgtcttctaagtattaccagactattgggaatcacgccagttactataaagatgccctccgatttcttggttgtgtggacattaaagatttgcccgtctcagagcagcaggagcgggcatttaccctcggactggctggattgttgggagagggcgtgtttaatttcggtgagttactgatgcaccccgtcctggagtccctacgcaacacagatcgccagtggctgatcgataccctctacgcctttaactcagggaacgtcgagaggttccagaccctgaaaacagcctggggccagcagcccgatcttgccgccaacgaggcccagttgctgcgcaaaatccagcttctgtgccttatggaaatgacattcactagacccgccaatcacaggcagcttacgtttgaagaaatcgcaaaatccgcgaaaatcacggtgaacgaggttgaactcctggtaatgaaggccctctcagtgggacttgtcaaaggctctatcgatgaggttgacaaaagagtgcatatgacctgggtgcagccccgagtgctagatctccaacaaatcaagggtatgaaagatagactagagttttggtgcacagatgtgaagagcatggagatgttagttgaacaccaggcccacgacatcttgacctag

SEQ ID NO: 17802 - DNA, 1161 bp, synthetic construct
  source 1..1161: mol_type = other DNA; note = Synthetic coding sequence
atgaagagccttaaggcatgcaaacgggaaatcaagagcgtcatgaatacagctgggaattcagccccgagcctgtttctcaaaagtaatttcgaatatctgaggggtaattaccgcaaggctgtaaaacttttgaactcctcaaatatcgctgagcacccgggctttatgaaaacaggagagtgcttgagatgtatgttctggaataacctggggtgtatccatttcgctatgagtaagcacaacctcggcattttttattttaaaaaagctttgcaggagaacgacaacgtctgcgcccagctcagcgctggcagtaccgatcctggaaagaagttctccggtcggccaatgtgcacccttctgaccaataagagatatgagctcctgtataactgcggaattcaactgctgcatatcggtaggccactcgctgcatttgagtgtctgatagaagccgtacaggtgtatcacgctaacccacgtctatggttgagattagccgaatgctgtattgccgccaacaagggtacctcagaacaggagacaaagggccttccctccaagaaggggatcgttcagagcatcgtcggccagggctatcatcggaagatagtgctggcctcccagtccattcagaataccgtgtataacgacggccagagtagcgccatcccggtggccagcatggagtttgccgctatatgccttcgcaatgcgctcctgcttttgccggaggagcagcaggatccaaagcaggaaaacggcgcaaaaaattcaaatcaactgggaggtaataccgaatcttctgaaagttctgagacttgcagtagcaaatcccatgacggagataagttcatcccagcacctccttcctccccattgaggaaacaggagctggagaacctgaagtgtagtattttggcttgctctgcctatgtcgccctggccctgggggacaacctgatggcactcaatcacgccgacaagctgctccagcagcctaaactgagtgggagtctgaagtttctgggccacttgtatgcagcggaggccctgatcagcctcgaccgaatctccgacgccatcactcaccttaaccctgagaatgtgacagacgttagcctgggtatttccagcaacgagcaggatcaaggctag

SEQ ID NO: 17803 - DNA, 1596 bp, synthetic construct
  source 1..1596: mol_type = other DNA; note = Synthetic coding sequence
atgctccaggagctcaacttcggcgcctacctggggcttccagcattcctccttcccctgaatcaagaggacaatacaaacttggccagagtgctaactaatcatatacacaccggccaccatagctcgatgttctggatgagggtgcccctggtcgcacccgaagatttgagggatgacattatagaaaacgctccaactactcacacggaggaatattcgggagaagagaaaacgtggatgtggtggcataacttccggaccctatgcgactactcgaaaaggattgccgttgcactggaaatcggggctgatctgcctagcaaccacgtcattgacagatggctgggggaacctatcaaggcagccatcttaccaacttctatatttctgacaaataagaaaggttttcctgtgctgtccaaaatgcaccagcggctcatctttaggttgctgaagcttgaggttcaatttatcatcacaggcacaaatcaccacagcgaaaaggagttttgcagctatttacaatatctggaatacctaagccagaatagaccacctccaaacgcctatgagctttttgctaaggggtacgaggattatctgcagtccccgctgcagcctctgatggacaacctggaatcccagacctatgaggtctttgagaaagaccccattaaatactctcaatatcagcaggctatttacaaatgccttctcgatcgggtccctgaagaggagaaggacacaaatgtgcaggtactaatggttctgggcgcagggcgcggcccactggtcaacgcctccctccgggctgcgaaacaggccgacagacggattaaactctacgcggtagaaaagaaccccaacgccgtcgttactctggagaactggcagtttgaggagtgggggagtcaggtgacggtggtgtctagtgatatgagggaatgggtcgcacctgaaaaggccgatataattgttagtgaactgctggggtcctttgcagacaacgagctttcgcccgaatgtctcgatggcgcccagcacttcttgaaggacgacggcgtcagcatccctggcgagtatacgtccttcctcgcgcctatttccagttcaaaattatataatgaggtgcgtgcttgccgggaaaaagacagggaccctgaggcccagttcgagatgccgtacgtggtgagattgcacaacttccatcaactgagtgcccctcaaccctgcttcacctttagccatccgaaccgtgaccctatgattgacaataacagatactgtactctcgagtttcccgtcgaggtcaatacagtgctgcacggattcgccggatacttcgaaaccgtactgtatcaagatatcaccctgtccatcaggcctgagactcatagccccgggatgttcagctggttccctatcctcttcccaattaaacagccaataaccgttagggagggccagacaatatgcgttagattctggcggtgcagtaatagcaaaaaagtgtggtacgagtgggcagttacagctccagtctgcagcgccatacacaaccctacaggcaggtcctacacaatcggcctctag

SEQ ID NO: 17804 - DNA, 789 bp, synthetic construct
  source 1..789: mol_type = other DNA; note = Synthetic coding sequence
atggcgctgagcctgggctggaaagcccaccgcaaccactgcgggcttcttctgcaggctctccggtctagcggtttgttgctatttccctgtgggcagtgcccctggcgcggcgccggaagttttcttgatccagagataaaagctttcctggaagaaaatacagaagtgaccagcagcggctccctgacgcccgaaattcaacttagactccttactcctagatgtaagttctggtgggagcgggcagacctctggccacatagcgacccttactgggctatctattggccaggaggccaggccctctccagatatctgcttgacaaccctgatgtcgttcggggcaagagtgtcttggatctgggtagcggctgtggtgcgaccgcaattgccgcaaaaatgtccggggcgagtagaatcctcgccaatgatatcgatcctatcgcgggaatggcgattactctgaattgtgagctcaaccgcctgaacccttttcctatactgatccagaatattctaaatctcgagcaggacaaatgggatctggttgtgttaggggatatgttttatgacgaggatctcgctgacagcctccatcagtggttgaaaaagtgtttctggacgtaccggactcgggttctgattggggatcctgggaggccccaattttctgggcacagtatacagcatcatctgcacaaagttgtggagtatagcttactcgagtcaactaggcaagagaattcaggcctgaccacaagtacagtctggggatttcagccttag

SEQ ID NO: 17805 - DNA, 1131 bp, synthetic construct
  source 1..1131: mol_type = other DNA; note = Synthetic coding sequence
atggccgctccgtcaccgagtggcacccctgtgtccagcatgcagggcaagcgcaaagcactgaagttgaatttcgcaaacccaccttttaagtccaccgcccgctttacactgaatcctaatccaaccggcgtgcagaacccccatatcgagagactgcgaacgcatagcatcgaatccagcggtaagttgaagatctcaccggaacagcattgggatttcacagctgaagacttaaaagacctgggggagatcggcagaggagcctacggaagcgtgaacaagatggttcataagccgtctgggcaaatcatggctgttaaacgaattcgctctactgtcgacgagaaggaacagaagcagctgttaatggacctggatgtggtgatgaggagctccgactgtccttacattgtgcaattctacggcgccctgttccgcgagggtgattgctggatctgtatggagcttatgtctaccagtttcgataagttttacaaatatgtttatagcgtccttgatgatgtcatcccagaggaaatcctgggtaagattaccttggccactgttaaggccctcaaccatctgaaagaaaacctcaaaataattcatcgggatattaagccatccaacatcttgcttgatagaagcggaaacatcaagctttgtgacttcggcatttccggacagctcgtggatagtatagccaagactcgggacgcgggctgtagaccgtatatggcgcccgaaaggattgaccctagtgcttctcgtcagggatacgacgtgcggtctgatgtttggtctctaggcatcactctctatgaactcgctaccgggaggtttccctatcccaaatggaactctgtattcgatcaactgacacaggttgtgaaaggcgaccccccccagctgtctaactccgaagaacgggagtttagcccatcattcatcaactttgtgaacctgtgcttgacgaaggatgagtctaaacgcccgaagtacaaggagttgctaaagcacccatttatcctcatgtacgaggagagagccgtggaggtcgcatgttacgtctgcaaaatcctcgaccagatgcccgccacaccgtcctcccccatgtacgtggattag

SEQ ID NO: 17806 - DNA, 1035 bp, synthetic construct
  source 1..1035: mol_type = other DNA; note = Synthetic coding sequence
atggccggttcaggctgtgcttggggcgccgaacctccccggtttctagaagcttttggaaggctgtggcaagtccaaagccgacttggtagcggaagcagcgctagtgtctatagggtaaggtgctgcggtaaccctggcagtcctcccggcgcacttaagcagtttctgcccccgggtaccaccggagccgcagccagcgctgcagagtacggattccggaaggaaagagccgctttagagcaactgcaggggcataggaatatagttaccctttatggcgtattcacaatccacttctcccctaatgtgccctcaaggtgtttactgctggagctgttagacgtctctgtgtctgagctgctcctatattcgtcccaccagggttgcagcatgtggatgatacaacactgcgctagggacgttcttgaggctctggcctttctgcaccatgagggctacgtccatgccgatctcaaaccgcgcaacatcctctggtccgcagaaaatgagtgtttcaaactgatcgactttggcctgagcttcaaggaaggaaaccaagatgttaagtacattcagaccgatggataccgggcccctgaggcagaactccagaattgtttggcacaggctggactgcagtctgatacagagtgcacctctgccgtagatctctggagcctgggcatcatcttgctcgaaatgttctcaggcatgaagctaaagcacaccgtccgcagccaggaatggaaagccaactcttccgcaatcatagatcacatttttgctagcaaggctgtcgtgaacgctgcaattcccgcctaccacctgagggatctcataaaatccatgctgcatgacgatccttcccgaaggattccggccgaaatggctttatgttctccgtttttctccattcccttcgcaccacatattgaggacctcgtgatgctccccactccagtgctcaggctgttgaatgtgcttgatgacgattatctggagaacgaagaggagtacgagggcctgtgttag

SEQ ID NO: 17807 - DNA, 1467 bp, synthetic construct
  source 1..1467: mol_type = other DNA; note = Synthetic coding sequence
atggcattgaagatgaacaccctaagtagtaaccgtgcgaacatgctcaaagaggtgcagctcatgaatcgcctgtcacaccccaacattctgcgtttcatgggagtatgtgtgcaccagggacagctccacgctctgacagaatatatcaattccggaaatttagaacaactgttagactcaaatttgcacttgccttggaccgtcagggtgaaactggcatatgatattgcagtgggtctctcttatctgcacttcaaggggatattccaccgagatctcacatccaagaactgtctgatcaagagagatgagaatggctatagtgcggttgtagcagattttggcctggctgaaaagatccctgacgtgtcgatgggatccgagaagctggcagtggtcggctcccccttttggatggcgccagaagtactgagagacgaaccctacaacgagaaggctgacgttttttcctacggtattattctgtgtgagatcattgcacgcatccaggccgatcccgactacttaccccggacagaaaattttggtctagactacgatgcttttcagcatatggtgggagattgcccccccgatttcctgcagcttaccttcaattgttgcaacatggacccgaaactgcggccctctttcgtagaaattgggaaaaccctcgaggagatactgtcgcggctgcaagaggaagagcaggagcgcgacaggaagctgcagcccacagctcgaggattacttgaaaaggcccctggggtgaagaggctgtcgagcctggatgacaagatcccccataaatcaccttgcccaaggagaacaatctggctttcgcgtagccagagtgacattttttcccgaaagccccctcggaccgttagtgtgcttgacccctactaccgccccagggacggtgccgcacggacacctaaggtcaatccatttagcgctagacaggatctgatgggggggaaaataaaattcttcgacctcccctcgaagtctgtcatttcattggtgtttgatctagatgcccccggccctggtactatgcccttagcagattggcaggagcctctggcgccgcctattcgccgatggagatctctgcctggctccccagaattcctgcatcaagaagcctgccctttcgtcggtagggaggaatctctatccgatggacctccgcccaggctgagtagcctaaaatacagagttaaggaaattcctccatttagggcatccgccttacccgccgcccaagcccacgaggctatggattgtagcatcctgcaggaggaaaacgggttcggatctaggcctcaaggtaccagtccttgtccggcgggagcaagtgaggaaatggaggttgaggagagacctgctggatcgacacccgccactttctcaacctcaggcatcgggctgcagacacaaggtaagcaggatggctag

SEQ ID NO: 17808 - DNA, 1458 bp, synthetic construct
  source 1..1458: mol_type = other DNA; note = Synthetic coding sequence
atgactctgtggatcctgcctaagttcaaagccgtagatttctctccaagtctggccgcctatactcatacgtggctgctgccccgatttcttgagatcctcattcagtgcggacattgcaaacgactggctcccgaatacgaggcagcagcgacccggctgaagggtattgtgcctttggccaaagtcgattgtacagcaaacactaatacatgtaacaagtacggggtgagtggttacccgacactgaagatattccgcgacggagaggaggcgggggcatacgacggtccccgaactgctgacgggattgtgagccacttgaagaagcaagccgggccagcttccgttccactgcggactgaggaggagtttaagaaattcattagcgataaggacgcttcgattgttggtttcttcgacgattctttcagcgaggcacactccgagtttcttaaagcagccagcaaccttcgagacaattaccgcttcgcgcatactaacgtggagtcacttgtaaatgagtatgatgacaacggcgagggcataatactcttcaggccgagtcacctcacaaacaagttcgaggacaaaacggtggcctatactgagcagaagatgactagtggcaagattaagaagtttattcaggaaaatatcttcggcatatgtcctcacatgacagaggacaataaggaccttattcagggcaaggacctcctcattgcgtattacgatgtggactatgagaagaatgccaaaggctctaattactggagaaatcgcgttatgatggtagccaaaaagttcttggatgcaggccataagctgaactttgctgttgcaagtcgcaaaacctttagtcatgaactcagcgacttcggcctggagtccacagctggagagattcccgttgtcgctattagaacggccaagggggagaagttcgtaatgcaagaagagttttcaagagatgggaaagctttggagcgttttctccaggactacttcgacgggaacctgaagcgctatttgaaatctgaaccaatccccgagtctaacgacggccctgtgaaggtggtcgtcgccgagaattttgacgagatcgtgaacaacgagaacaaggatgtcctgatcgagttttatgctccttggtgcggacactgtaagaacctggaaccgaaatataaggagttaggcgagaaactctcaaaggacccaaacatagtcattgccaaaatggatgcaacagcaaatgacgtaccctccccttacgaagtccggggattcccaaccatttacttctcacctgccaataaaaaactaaatccaaagaagtacgaaggcggaagagaattgagtgattttatcagttatctacaacgcgaagccacaaatcctcccgtgatccaggaggagaagccaaaaaagaagaaaaaggcccaggaagacctgtag

SEQ ID NO: 17809 - DNA, 885 bp, synthetic construct
  source 1..885: mol_type = other DNA; note = Synthetic coding sequence
atgtccgcgcaacactttgtgtctacagagcaggttgagttgcctggcccaggccagtgggtagtggcagagtgcccagcccgggtggacttttcaggcggctggtcagacactcctcccctggcctatgagctgggtggagccgtactgggactcgcagtgagagtggacgggcgccggccaatcggcgcacgggccagacgtattcctgagcctgagctttggctggccgtgggccctaggcaggatgagatgacagtcaaaattgtatgccgatgtctggcagaccttcgagactattgtcagccccacgcgcccggcgctctcctaaaggccgcttttatctgtgccggaattgtgcatgtccacagtgaactgcaactgtcagagcagctgctgagaacctttggcggcggtttcgaactccatacctggtcagagctgccacatggaagcggactgggaacaagttccattcttgccggaaccgctctggctgccctgcagagagccgccggccgtgtagtaggaaccgaggcattaattcacgccgtcctgcacctggaacaggtgctgacaacagggggtgggtggcaggaccaggtgggcgggcttatgcccgggatcaaggtaggaaggtcccgggcgcagctgccattgaaggtggaagtcgaggaggtgacagtgcctgaaggcttcgtgcagaagctgaatgatcatctcctgctggtctacactggcaaaactcgactggcgcgcaacctactccaggatgtcctacgaagctggtacgcgaggctgcccgccgtggtgcagaacgctcactccctagtgaggcagaccgaggagtgcgccgaggggtttcggcaaggaagccatatttag

SEQ ID NO: 17810 - DNA, 945 bp, synthetic construct
  source 1..945: mol_type = other DNA; note = Synthetic coding sequence
gtcgggagaatggaaggttgttcatccccaatcgtggtcaaattcgcagacacccagaaggacaaggagcagagacggctccagcagcagttagcccaacaaatgcagcagcttaacactgcaacttggggtaacctaacagggctcggcggccttacaccccagtacttggcgctgctgcagcaggctacctcctcaagcaatctaggtgcgttcagtggcattcagcagatggctggcatgaatgctctccaattgcagaatctcgccacattagcggccgccgctgccgctgctcagacatctgcgactagtacgaatgcaaacccactctcaaccacctcctcagcgttgggtgctctgaccagcccggtggccgcctctacaccgaattctacagctggggctgcaatgaattctttgacgagtctgggaactttgcagggtctcgctggagccacagttggcctgaataatatcaacgcattggcgggaatggctgccctgaatgggggcttgggggccacagggctaaccaatggcacagctggtactatggacgctcttacgcaggcttactccgggatacaacaatacgcagcagcagccctgccaaccctgtacagccagtcacttctccagcagcagtctgccgccggctcacagaaggagggacctgaaggggccaatctcttcatataccacctcccacaggaatttggcgatcaggatatcctgcagatgttcatgccctttggtaacgtcattagcgcaaaagtgttcatcgacaaacagactaatttgtccaaatgctttggttttgtttcttacgacaaccctgtctccgcccaagccgcaatccaagcaatgaacggattccaaattggaatgaaacggctcaaagtccagctaaagcgctctaaaaatgattccaaaccgtattag

SEQ ID NO: 17811 - DNA, 1083 bp, synthetic construct
  source 1..1083: mol_type = other DNA; note = Synthetic coding sequence
tccatggagaaaacttacacatccacatcaaataatagcatatctggcagcctcaagaggttagaggacacaaccgcgcggtttactaacgccaactttcaggaggtcagtgcgcacacctccagcgggaaggacgtctcggagacgcgtggttctgagggaaagggaaaaaaaagctcagctcatagctcgggccagcgaggacgaaaacccggcggcggccgaaatcctggtaccaccgtgtctgccgcatctccgtttcctcaggccggctacaagagagctcagactagtggtatcgaagaggagactgtaaaagaaaaaaagcggaagggaaacaagcagtctaagcacggcccaggccggccaaaggggaataagaaccaggaaaatgtgtcccatctatcagttagcagcgcatcccccacttcctctgtggcaagtgctgctggcagcatcactagctcaagcttacagaaatcccctacgctgctgcgcaacggctccctccaatcattgtccgtaggtagctctcccgtgggtagtgaaatctccatgcagtataggcatgacggagcatgtcccaccactacatttagcgaactgctcaacgcgatccacaatgaccgaggtgacagctctacactcaccaaacaggaactgaagttcattggaatctacaatagtaatgatgtggcagtaagcttccctaatgttgtgagtggctcaggatcatctaccccggtgtcttcttctcaccttcctcagcagagcagcggccatcttcagcaggtgggtgccctctctccatccgccgtaagttcggcagcgcctgcagtcgctactacccaagcaaatacacttagtggctcgtctctgtcccaagcccctagccacatgtatgggaacaggagcaattcgtctatggccgcacttatcgctcagtccgagaataaccagactgaccaggacctcggagacaattccaggaatctggtcggcagagggtcctctccacgcggatccttatctccacggagccccgtgtcttctctgcagatacgctatgatcaaccagggtag

SEQ ID NO: 17812 - DNA, 924 bp, synthetic construct
  source 1..924: mol_type = other DNA; note = Synthetic coding sequence
atgcagtcactgacactcgacttactcgggcccagtgaactcctgcttgctctaaacatggggaatacaagctttaacgaggtgatggaggctcagctcccatcccatggtggacctaagccgtccgcagagagtgacatggggacccgaagagactacataatggctaagtatgtcgagcatcgttttgcaaggcgatgtactcctgaacctcaacgcctatggaccgccatttgcaatcgagatttactctccgtgttggaggccttcgctaacggacaggacttcggccagccattaccgggacccgacgcgcaagctcccgaggagttggtactccacctagcagtgaaagtggcgaaccaagcctcgctgcctttggtggacttcatcattcagaatgggggtcacctggatgccaaagccgcggacggtaacaccgcgcttcactacgccgccctgtacaaccagcccgattgcctgaaactgctgctgaaagggcgggctctcgtgggcacagtcaatgaagcaggggagaccgccctggacatagcccgcaaaaagcaccataaagaatgtgaagagttgctcgaacaggctcaggctggcactttcgccttcccactccatgttgattatagctgggtgatttccactgagcccggatctgatagcgaagaggacgaggaagaaaagcgttgtctcttgaagctgccagcccaggcccactgggccagtgggagactggatatctctaacaagacgtatgaaaccgtggccagtctcggggctgccactccgcagggcgaaagtgaggactgtccgcctcctctgcccgtcaagaattcgtctcgaactctcgtgcagggatgcgcccgacacgcttccggcggtcggcgtgaggagcgcgctcgcagagagtag

SEQ ID NO: 17813 - DNA, 1497 bp, synthetic construct
  source 1..1497: mol_type = other DNA; note = Synthetic coding sequence
atgagcagttgcgtctcttcccagcccagtagcaatcgtgccgcaccccaggatgagctggggggccgcgggtcttctagctctgagtcccaaaaaccttgcgaggcccttcgcggactgagtagtctgagtatccatctcggcatggagtcattcatcgtcgtgacagaatgtgaacctggctgtgccgtagaccttggccttgcacgagaccgacctctggaggctgatgggcaagaggtgcctctcgatacgtccgggagtcaagcacgcccccatttgagcggtagaaagctgtctctgcaggagcgcagccagggaggactggccgccggaggctcgctggacatgaacgggagatgtatctgtccaagtttaccctattctcccgtgtcatccccacaaagttcacccaggctgccgaggaggcccaccgtagagtcccatcatgtgagcattacagggatgcaagactgtgtgcaactcaatcagtacacccttaaagatgagatcggtaagggatcctacggggtggtgaagctggcctataacgaaaacgacaatacctactatgcgatgaaagtgttgtctaagaaaaaactcattagacaggccggctttccacgccgccctcctcccagaggcacaaggcccgcacccggcggctgtatccagcctaggggtcccatcgaacaggtgtatcaagagatagccatactcaagaaacttgatcaccccaacgtggtgaaactggtggaggttctggacgaccccaacgaagaccacctttatatggtattcgaactagtgaatcaaggtcctgtgatggaggtccccaccctcaaacccctctctgaggaccaggcccgtttctactttcaggacctcattaaaggaatcgaatacttacactaccaaaaaattatccatcgggacatcaagcctagtaacctgctagtgggcgaagacggacacattaaaatcgctgacttcggagtgtcaaacgagttcaagggcagcgatgccctgctgtctaataccgtgggtacacccgcgttcatggcccctgagtcactgtccgagacccgaaagatcttcagcggtaaagcccttgacgtgtgggctatgggtgttactctctactgttttgtgtttggccagtgcccctttatggacgaacggattatgtgcctgcattccaaaataaagagtcaggctctggagtttcctgatcagccggatatcgccgaggacttaaaggatctaataaccaggatgttggacaagaatccagagtctaggattgtggtgcccgagattaaaatactcgtcaaaacgatgatccggaagcggagttttggcaatccatttgagggatctagacgggaagagagatccctttccgcccctgggaatctgttgaccaaacagggaagcgaggataatttacaagggaccgatccgcctccagtgggtgaggaagaggtgttgctttag

SEQ ID NO: 17814 - DNA, 600 bp, synthetic construct
  source 1..600: mol_type = other DNA; note = Synthetic coding sequence
atgacacccctggccccctgggatcctaagtacgaggctaaggccggaccacgacctgtttggggggctaattgttcctctggagcctccttctctggccgaacattgtgccacccttccttctggccactgtatgaagcagcgagcggtcgggggctgcgccctgtcgcacccgctaccgggcactggaacggtcagcaggctccgccggatgccggctttccagtggtctgttgcgaggatgtgttcctgagcgatccactgctcccccgcggccagcgcgtgcctttgtacctgtctaaagcgccccagcagatgatgggcagcctcaagctgctgccacccccccctataatgagtgctagggttctcccccggccttcaccatcacggggcccatcaactgcttggctttcaggcccggaattgattgcgctgacgggtctgctgcagatgagccagggggaacctcgaccttcgtcttctgcggttgggccgcccgatcatacatccgaccctcctagcccgtgcgggtcccctagttcatctcaaggggctgatttgagcctgccacagaccccagacacccattgcccttag

SEQ ID NO: 17815 - DNA, 1248 bp, synthetic construct
  source 1..1248: mol_type = other DNA; note = Synthetic coding sequence
atgtggaggaaggtgtacacacctcggtccagcttcgagctctcagcccagccaccaagttgggagcagagaaaattattggagaaatgtgccatgaccgctctgtcaagcaaacttatcagccagcagaaagcattcttcgccaagatggtggtcgacgccgtgatgatgcttgacgacctcctgcagttgaagatgatcggtatcaaaaaagtccagggtggagctctagaagattcccaactggtagcaggagtggcatttaagaaaacattttcctacgcagggtttgagatgcagccaaaaaaataccacaatcccaagatcgccttattaaacgtggagttagagctgaaggccgaaaaggataatgccgagattcgggttcacacagtcgaagactaccaggccatagtggacgctgagtggaacatattatacgataagctggaaaagatccatcactccggtgccaaagtggtgctaagcaaactgcccatcggtgatgttgctacccagtactttgctgaccgcgacatgttttgcgcaggccgcgtgccagaagaagacttgaagcgtacaatgatggcctgcggagggagtatccagacctccgtgaatgcattaagtgcagacgtccttgggcgctgtcaggtgttcgaggaaacgcagatcgggggcgagagatacaatttcttcaccggatgtccaaaggcaaagacctgtacattcatactaagagggggggccgagcaatttatggaggagactgaacggtctctgcatgatgctatcatgatagtgagacgcgcgatcaaaaatgatagcgtggtggcagggggaggcgccatcgaaatggaactgtcaaagtatctgagggattactcaagaacgattcctggaaaacagcagctcctgattggggcatatgcaaaagccctcgaaatcatacctaggcagctctgcgacaatgcgggcttcgatgcaaccaatatcctgaacaaattaagggctcgacacgcacaaggcggcacgtggtacggggtggatatcaataatgaggatatcgcagataatttcgaagctttcgtgtgggagcccgcaatggtcagaattaatgctctcacggccgcctccgaagctgcctgtcttattgttagcgtggacgagactatcaagaacccccgaagcaccgtggacgctcccacggccgctggccggggaaggggtcggggcaggccccattag

SEQ ID NO: 17816 - DNA, 3117 bp, synthetic construct
  source 1..3117: mol_type = other DNA; note = Synthetic coding sequence
atggtgtcctccgcacagatggggttcaatcttcaggccctgctcgaacagctcagccaggacgagctgagtaaattcaagtatctaattacaacgttctcgctggcacatgaactccagaagataccacataaagaagttgataaggccgacggcaaacagctggtggagattttgactacacattgtgatagctattgggtggaaatggcgtccctacaagtgttcgaaaaaatgcatcgcatggacttatctgagcgcgcgaaggatgaggtgagggaagccgcccttaaatcattcaacaaacggaaacctctgagcctggcgtttaccgagacaaaaggtaatgtgatctgtctgggtaaagaagtatttaaaggtaagaaacccgataaagataatcgctgccggtacatcttgaagaccaaattccgcgagatgtggaaatcatggcccggggatagtaaggaagtgcaagtgatggccgagaggtataagatgctgattccgttctctaaccccagagtcttgcccggcccattcagttacactgttgtcctctacggcccagccggcctcgggaagactacactggcccagaagttgatgctggactgggcagaggacaacctgatccacaaatttaagtacgctttttacctatcgtgccgagagctgtctcgactgggcccgtgttcgttcgcagagctagtgttccgggattggccggaactccaggacgatattcctcatatacttgcacaagcacggaagatactgtttgtaattgatgggtttgacgagttaggcgcggcacctggggccctcatcgaagacatatgtggcgactgggagaagaagaagccagttcccgtactgctgggttcattgctgaatagagtgatgttaccgaaggctgccctcttggtgacgacacgaccgcgcgccctacgagacctaaggatactggccgaagagcccatctatattagggttgagggcttcctggaagaagacagaagggcttacttcctgaggcacttcggcgacgaggatcaagctatgagagccttcgagctaatgaggtctaatgcagctctctttcaattagggagcgcgcccgctgtctgttggattgtctgcacgaccttgaaactgcagatggagaaaggcgaagatccggtgccaacgtgcttgacccgaacaggactgtttttgagatttctgtgttctagattccctcagggcgctcagctgcgcggcgcattgagaacactgagcttgctggccgcccaaggcctgtgggctcaaacatccgtgctccaccgagaggacctggagaggttgggcgtgcaggaatccgatctcaggctgttcttggatggagacatccttagacaggacagggtctctaagggatgttacagcttcattcacctgagtttccagcaattccttacggcactcttctatacgctcgagaaggaagaggaggaagatcgtgacggacatacctgggacatcggagatgtgcaaaaacttctgtctggagtcgagaggctgcgcaatcccgacttaattcaggctggatactactcatttggtctggccaacgagaaacgcgcaaaggagcttgaggctacctttggttgtagaatgtccccggatatcaaacaggaactgctgagatgcgatatatcctgcaaggggggacatagcaccgtaactgatcttcaggagctgttgggatgcctctatgagagccaggaagaggagctggtgaaggaagtaatggcccagttcaaggagatatcactgcatctgaacgccgtcgacgtggtgcctagttcattctgcgtcaaacactgccgcaacttgcagaaaatgtctctacaggtcattaaggaaaatcttcccgaaaatgtcactgcctcagagtccgatgccgaagtcgagcgaagtcaggatgaccagcacatgctgccattctggactgacctgtgcagcatcttcggctccaataaagatctgatgggcctcgccatcaatgacagttttctctccgcctccctggtgcgcattttgtgtgagcagatcgctagcgacacgtgtcacctgcagcgagtcgttttcaagaacatcagccccgcagacgcacatagaaatttgtgccttgctctccggggccacaagaccgtcacctacttaaccctgcagggaaatgaccaggacgacatgtttcccgccctttgcgaagtgctacgccatccagagtgtaacctcaggtacctgggactggtttcttgcagcgccacaacacaacaatgggcggatttaagtctggcgctggaggtgaaccaaagtctgacatgtgtcaacttgtccgataatgaactcctggacgagggtgccaagctactgtacacgactctgaggcatcccaagtgcttcctccagagactctcgctggaaaattgtcacctgacggaagcaaattgcaaagacttagctgcggtgctggtcgtatctagagagctgactcacctgtgtctggctaaaaaccctatcggtaacacaggagtaaagttcctgtgcgaggggttgcggtacccagaatgcaagttgcagacgctcgtcctgtggaactgtgacataacatccgacggatgttgcgaccttaccaagctgttgcaggagaagagttccctcctttgtctggacctagggctgaatcacatcggagttaagggcatgaaatttctgtgtgaagctctgcggaagccactgtgtaacctccggtgcctctggttgtggggatgctctattcccccattttcttgtgaggatctgtgcagtgctttgtcatgtaatcagagccttgtgactctcgatttggggcagaatccactgggttcaagcggagttaagatgctcttcgaaaccttgacctgctcaagtggtactttgcgcactttgcgtctcaagattgacgattttaacgatgagctgaacaagttgctcgaggagattgaggaaaagaacccacagctcatcatagatactgaaaaacaccatccctgggccgaacgcccgtctagccacgatttcatgatctag

SEQ ID NO: 17817 - DNA, 1443 bp, synthetic construct
  source 1..1443: mol_type = other DNA; note = Synthetic coding sequence
atgagactgagaaggttggccctttttcccggtgtagccctgttgctcgccgctgcccggctggcagctgcctccgagtttttcgccccctggtgcggccattgcaagcgactagctcccgagtacgaggctgcagctacccggctgaaaggcattgtacctctggcaaaagtcgactgcacagccaatacaaacacgtgcaacaagtatggagtgtccgggtatccgaccctaaaaatattccgcgacggtgaggaagcaggcgcctacgacggccctcgcactgctgacgggatcgtctcacacttgaaaaagcaggcaggtccggccagtgtaccccttcggaccgaggaggagtttaaaaagtttattagtgacaaagatgcgagtatcgtcggattctttgacgattccttttccgaggcacacagcgaattcctgaaggccgcaagtaaccttcgcgacaactataggtttgcgcacacgaacgtggagagcctagtgaatgaatacgatgacaatggcgaggggatcatcctgtttcggccctcacatttaactaataagtttgaggacaaaaccgtcgcctacaccgagcaaaagatgacaagcggcaagataaagaagttcatccaggaaaatatattcgggatctgcccccacatgacggaggataacaaggacctgatccaaggaaaagatctgttgatcgcgtattacgacgtagactatgagaagaatgcaaaagggtcaaactactggaggaaccgggtgatgatggtggcgaaaaaattcctcgacgctggacataagctgaacttcgctgtcgcaagtcgaaaaacgttctcgcacgagctcagtgactttggcctggaatctactgccggcgagattccagtggtagctatccgcaccgccaagggagaaaaattcgtcatgcaggaggagttctccagggacgggaaggccctggagagattccttcaagattattttgacggcaacttgaagcgatatttgaagtccgagccaatccccgaatctaacgatggcccagttaaagtagtggtcgctgaaaatttcgatgagatcgtgaataatgaaaacaaggatgtgctgatcgaattttatgctccatggtgcgggcactgtaagaatttggagcctaagtacaaggagctgggcgaaaagctgagtaaagatcccaatatcgttatcgcgaaaatggacgctacagccaatgatgtaccctccccttacgaagtgaggggcttcccaaccatctacttttcgccggcgaataagaaattgaacccaaaaaagtacgagggtggccgggagctgtcggacttcatatcgtatctgcagagagaagccaccaatccccccgtaatacaagaagagaaaccgaagaaaaagaagaaggcgcaggaagacctctag

SEQ ID NO: 17818 - DNA, 228 bp, synthetic construct
  source 1..228: mol_type = other DNA; note = Synthetic coding sequence
atgggtgtcaaacttgagatctttcggatgattatctacttgaccttccccgttgcaatgttctgggtatccaatcaggctgagtggtttgaagatgatgtaatccaacgaaagagggagctgtggccaccagagaagctacaggagctagaagagtttaaggaacgattgcgcaaacgtaagcgcagagaggaaaagctccttagggacgcgcaacagaattcttag

SEQ ID NO: 17819 - DNA, 807 bp, synthetic construct
  source 1..807: mol_type = other DNA; note = Synthetic coding sequence
atgggtagcgccaaatctgtcccagttacgcccgctcgccctcccccccacaataaacatctagctcgcgtggccgatccgcggtcccctagtgctggcatactgagaacaccgattcaagtcgaatccagcccccaaccagggttaccggccggggaacagcttgaagggctgaaacatgctcaggattccgaccccaggtcccccaccctgggaattgcccggactccaatgaagacctcttcaggggatccaccctccccacttgtcaaacagctgtctgaagtgtttgagacagaggacagcaaatctaacctgccacctgaaccagtgttgccacctgaagccccactgtcatctgaattagaccttcccctgggcacacagctgagcgttgaagaacaaatgcctccttggaaccagacagaattcccttctaaacaggtcttcagcaaagaggaggctcggcaaccaacagagacccccgtggcaagccagtccagtgataagccatcccgggaccccgaaacacccagatcctcagggagcatgaggaataggtggaagcccaattcttcgaaggtgttggggaggagccctcttaccatcctgcaggacgataattcccccggcaccctaactctgcgccagggcaaaaggcctagtcccctgagcgagaatgtgtccgaactcaaggagggagctatactcggcactggcagactcctgaagaccggcggaagggcatgggagcagggccaggatcatgacaaggagaaccagcacttccctctcgtggagtcatag

SEQ ID NO: 17820 - DNA, 351 bp, synthetic construct
  source 1..351: mol_type = other DNA; note = Synthetic coding sequence
atgctgttggagtgcggtatgcaggaggagggcctcttcagggtagctccttccgcttcaaaattaaagaaactgaaggcggcactcgactgttgtgtagttgacgtgcaagaatactccgcagacccccacgcaatcgctggggcactcaagtcatatctacgcgagcttcctgagccgctgatgacgttcgagctctacgacgagtggattcaggcttccaatgttcaggaacaagacaaaaagctccaggcactgtggaatgcatgcgagaaactgccgaaggctaaccacaacaacatccgatatctgattaagttctacccttcttgtcagaatatcaagatgtag

SEQ ID NO: 17821 - DNA, 906 bp, synthetic construct
  source 1..906: mol_type = other DNA; note = Synthetic coding sequence
atggttaggacgaaaacctggactctcaagaagcatttcgtagggtatcccaccaattctgactttgaactgaaaactgccgagcttcctcctctgaagaatggagaggtgctactggaggcattgtttttgaccgtggacccctacatgagggtagcagctaagcggctgaaagagggagacacaatgatgggacagcaggtagcaaaggtggtcgaatctaagaatgttgcactacccaaaggtacgatagtgctggcctcgccaggatggaccacacactcaatctctgacggcaaagaccttgagaaactcctgaccgagtggccagatacgatacctttgtcccttgccttgggtacagtcggaatgcctgggctgacagcctattttggtcttttggaaatatgtggtgtgaaaggaggggagaccgtgatggtcaacgccgccgcaggtgccgtgggctcagtggtgggacagattgctaaacttaagggctgtaaggtggttggggccgtgggcagcgacgaaaaagtggcttacctacagaagttaggcttcgatgtcgtattcaattacaagaccgtggaaagcctggaagaaaccctcaaaaaggcttcccccgacgggtacgattgctacttcgacaatgtgggaggggagttctcgaatactgtcattggtcaaatgaaaaaattcgggcgcatagccatctgtggagccatcagcacctataatcggacgggaccactgccaccaggaccccccccggaaatcgtcatataccaagagctgcgcatggaggctttcgtcgtataccgttggcagggcgatgcccgacagaaagccctcaaggatctgttaaaatgggtgctggagatcaagagggagaatgaagaggattag

SEQ ID NO: 17822 - DNA, 1068 bp, synthetic construct
  source 1..1068: mol_type = other DNA; note = Synthetic coding sequence
atgctggggagtgggtttaaggctgaacgactcagggtgaacctaaggttggtcatcaatcgcctgaaactactggaaaagaagaagaccgagctggcccagaaagctcggaaggaaattgcagattatttagctgccggtaaggacgagagagcccgtatccgtgtggagcacatcattcgtgaggactatcttgtggaggctatggagattttggagctctactgtgacctgctgttagcccgattcggactgattcaatcgatgaaggagttggattctggtctggccgagagcgtgtcaacattggcagaactgaaaatcgtcgcagaccaactgtgtgcaaagtactcaaaggagtatgggaaactgtgtcggaccaaccagatcggtaccgtgaatgatcgactgatgcacaagctgtcagtggaagcccccccaaagatccttgtcgagaggtacttgatagagattgcaaagaactacaatgtgccatacgagcccgattcagtcgttatggcggaagctcccccaggcgtggaaaccgatctgatcgatgtaggcttcaccgacgacgtgaagaagggcggccccggtcgcggcggttctgggggctttacagcgcctgtgggaggaccggatggtaccgttcctatgcctatgcctatgcccatgcccatgccatcggctaacactccttttagctatccactgcccaaaggaccttcagacttcaacgggttgccaatggggacttaccaggcgttcccaaatatccatccaccgcagattcctgccacaccaccctcttatgagagtgtggacgacattaatgccgataagaatatcagctctgcccaaatagtagggccaggccccaaacccgaggccagcgcaaaattgccttccaggcccgctgacaattatgataactttgtgctgccagagctgccctctgtgccagacaccctgccgacagcttccgctggggcttctacctcagccagcgaggacattgatttcgatgatctgagccggcggtttgaagagctcaagaaaaagacctag

SEQ ID NO: 17823 - DNA, 2175 bp, synthetic construct
  source 1..2175: mol_type = other DNA; note = Synthetic coding sequence
atgcaaatgaccatccaggctttgcaggatgagttaaggatccagcgcgaccttaaccagctgtttcaacaagattccagcagtagaactggcgaaccgtgtgttgccgaactgactgaggaaaacttccagcggttacatgccgaacatgagcggcaggcgaaggagctgttcctcctacgtaagaccttagaagaaatggaactgaggattgagacccagaagcagacactgaacgccagggatgagtcaatcaagaagctcctggagatgctacagtcgaagggtctgagtgcaaaagcaactgaagaagatcacgagagaacccgacgtttagcagaggcagagatgcacgtgcatcacctggagagtctgttggagcagaaggagaaagaaaactcaatgctgagagaggaaatgcacagacggtttgagaatgctcctgactcagccaagaccaaagcgctgcagaccgttatcgagatgaaagattctaagatttctagcatggaacgcggcctccgagatctcgaggaggaaatccagatgctgaagagcaacggggccctgagcaccgaggaaagggaggaggagatgaaacaaatggaggtgtatcgttcccatagcaaatttatgaaaaacaagattggtcaggtgaaacaggaactgtctagaaaggatactgagcttctcgccttgcagaccaaactcgaaactctgaccaaccaattcagtgatagcaagcaacatatcgaagtgctgaaggagagcctgactgccaaggagcagagggcagcgattctgcagaccgaggttgatgcactgcgactccgtcttgaagagaaggagactatgctgaataaaaagaccaagcagattcaagatatggcggaagagaaaggcacccaagctggggagatacacgatctgaaggatatgctggacgtaaaagagcgtaaggtcaacgttttgcagaagaagatcgaaaatttgcaagagcagctgagggataaggagaaacagatgtcttctctgaaggaaagagttaaatctctgcaggcagatacaacgaacactgacacagctttaactaccctggaagaagcactggccgagaaggaacggacaatcgagaggctgaaagaacagcgagatcgagacgaacgggaaaaacaggaagagatcgacaattacaagaaagatctgaaagacctcaaggagaaagtgtctctattgcagggtgacttgtcggagaaagaggcatctcttttagaccttaaagaacacgcgagcagcctcgcaagttccgggctgaaaaaggattcgcgtcttaaaaccctggagattgccttagaacaaaaaaaggaggagtgcttaaagatggagagtcagctgaaaaaagcccatgaagcagcccttgaagctagagcgtctcccgaaatgagcgaccggattcagcaccttgaacgtgagattacacggtacaaggacgaatcttctaaagcccaggcggaagtggacaggctactggaaatcttgaaggaagtcgagaacgagaaaaacgataaagacaagaaaatcgctgagctcgaatctctgactagccgacaagtaaaggaccaaaataagaaggtcgctaacctcaagcacaaggaacaggtggagaaaaagaaatccgcccagatgctggaagaggcaaggcgcagagaggacaacctgaatgacagctctcaacagttacaggtggaagagctactgatggcaatggagaaggtaaagcaggagctggaatctatgaaagccaagttgagctcaacacagcagagtttggccgagaaagaaactcacttgactaatttgagggcagagcggaggaagcatctggaggaggtactggaaatgaagcaagaggctctgttggccgcaatttcagaaaaagatgccaatattgccctcctggagctgtcttctagcaagaagaagacccaggaagaagtcgctgccttaaagcgagaaaaggatagattagtccagcaactcaagcaacagacccagaatcgtatgaagcttatggccgacaactatgaggatgaccatttcaaaagcagccactcgaaccagacaaaccataaaccatctccggaccaggacgaagaggaaggaatttgggcctag

SEQ ID NO: 17824 - DNA, 408 bp, synthetic construct
  source 1..408: mol_type = other DNA; note = Synthetic coding sequence
atggcaatcggattcaatgtggaaaccgtcacatacaagaaccttaaatttcaggtgtgggatctcggaggccagactagcatcagaccctattggagatgctactactcaaacacggacgccgtgatttacgttgtcgacagctgtgatcgggaccgcatcggcatctcaaaatcggaactggttgccatgttagaagaggaggaactgaggaaagcaatcttagtggtctttgctaataaacaggatatggagcaggcaatgaccagttccgagatggcgaattccctgggactgcctgcactaaaagatcgcaagtggcagatcttcaagactagcgctaccaaagggacaggattggacgaagccatggaatggttagtcgagaccctaaagagcagacagtag

SEQ ID NO: 17825 - DNA, 684 bp, synthetic construct
  source 1..684: mol_type = other DNA; note = Synthetic coding sequence
cgaaggcaaattttgaaagaattggccctttgccttaggcggcaagagatgtacggtccacgcgctgcttctcggaacaaagagacgtctgccggaccagttgccgtgatgggcaaggattattacaagatcctgggcattccttccggggcaaatgaggacgagatcaaaaaggcctaccgcaagatggcactcaagtaccaccccgataagaacaaagagcctaatgcagaagagaaattcaaggagattgccgaggcctacgatgttctctcagatcccaaaaagaggggattgtacgatcagtatggggaagaagggctgaagacaggcggaggcacgagcgggggctcttccggatccttccattacacctttcacggcgacccccacgcaacctttgcaagtttctttggcggtagtaacccattcgatattttttttgcctccagtcgatcaacgcgccctttcagtggattcgaccccgacgacatggatgtggatgaagacgaggatccttttggggctttcgggcggttcggcttcaatggtctgagtagggggccacggcgagcgcccgaacctctgtaccctcgaaggaaagtgcaggaccctcccgtggtacacgaacttcgcgtctctctagaagagatctatcacggatcgactaagcgcatgaagtag

SEQ ID NO: 17826 - DNA, 252 bp, synthetic construct
  source 1..252: mol_type = other DNA; note = Synthetic coding sequence
atgtcaatgctgaagccttccgggctgaaggcccctacaaaaattctcaaacccggttccaccgctctgaagacccctaccgcagtcgtggccccggtggagaagaccatcagcagtgagaaggcctctagcacgccctcttccgagactcaggaggaattcgtggatgactttcgggttggagaacgcgtctgggtaaacgggaacaagcctggttttatccagtttctcggagaaacccagttcgcctag

SEQ ID NO: 17827 - DNA, 642 bp, synthetic construct
  source 1..642: mol_type = other DNA; note = Synthetic coding sequence
atggacatgttaggtggacctggaatcgagagtcaatgcagaaaagtggacatcatagcagacgccgcttatagcattttccagaagcccaaatccttcaccggcaacttcgtgatcgatgagaacatcctgaaggaggagggtattgagaacttcgacgtgtacgcaattaaaccaggacacccgctgcagcccgacttttttctggatgagtaccccgaagcagtgagcaagaaagttgaatcaacaggcgcagtgcccgaatttaaggaagaaaagcttcaattgcagcccaaaccacgctcgggggccgtcgaggaaactttcagaattgtgaaggattctctgtccgatgacgtcgtcaaggcaacacaggccatttatttattcgaattgtcaggcgaggacggcggaacatggttcttggatcttaagagtaaaggcggcaatgtcggctatggagagccaagcgatcaggcagacgtggtaatgtcaatgaccacggacgattttgtaaagatgttctctggaaaactcaaacccacaatggcttttatgtccggcaagctgaagattaagggcaacatggccctagctatcaaactagagaagttgatgaatcagatgaatgctcggctctag

SEQ ID NO: 17828 - DNA, 1230 bp, synthetic construct
  source 1..1230: mol_type = other DNA; note = Synthetic coding sequence
atgaataggacctggccgagacggatctggggaagttcccaggatgagccggaatttgcttcctctgtgcgtcgaccacacctgacatcagatgctgtcgcacttttgcgcgataacgtaacccctagggagaacgagctgtggaccagtctgggagactcctggaccagaccaggccttgagttgtcccctgaagagggcccaccctatcgtcctgaattcttctccggttgggaacctcccgtgacagacccccagtctcgggcctgggaggatcccgtagaaaaacagctacaacatgagcgaagaagaaggcaggtgactcaggcaacacagcaggggagaggctgggaggtgagaggacgcggaaggtctgcctggccgagactcactcggctgtcttacttcctgcaacagtctgcccctcaggtggccgtaaatgggcatagagatctggaaccagaaagtgagccccagctggaaagtgagactgctggaaaatgggtgttgtgtaactatgattttcaggcacgaaactccagcgagctttccgtgaagcagcgagacgtgttggaagtgctggatgactcgcgcaagtggtggaaggtcagggacccagcgggccaggagggctacgtcccatacaacatcttaaccccttacccgggcccacggttacaccatagccaatcacccgcccgaagtctaaatagtactcctcctccccccccagctccggccccagctcctcctccagccctggcccggcctaggtgggatcgcccaagatgggattcctgtgattcgctgaatggtctggatccatccgaaaaagaaaagttctcgcagatgctgatcgtaaacgaagagctgcaagcacggcttgcccaggggagatccggcccaagccgcgcagtccctggtcccagggctccagaaccccagctctcgcctggaagcgacgcctctgaggtgcgcgcctggctgcaagcaaaggggttcagtagcggaactgtcgacgcactcggtgtgctgaccggagcgcagctcttttccctccagaaggaggaactgcgagctgtgtctcctgaggagggagcccgggtatacagccaggttactgtgcaaagatccctgcttgaggacaaagagaaagttagcgagcttgaggccgttatggagaagcagaaaaagaaggttgagggcgaggtggaaatggaagtgatttag

SEQ ID NO: 17829 - DNA, 1425 bp, synthetic construct
  source 1..1425: mol_type = other DNA; note = Synthetic coding sequence
atggccagtctgtcccgcgctctaagagtggccgctgcacatccacggcagagccccacccggggcatggggccgtgtaacttgtcctcggccgctggacccacggccgagaagagtgtgccgtaccagcgcactttgaaagaaggccagggtacgagcgtggtggcacagggaccgagcagaccactgccttccaccgccaatgttgttgtgatcgggggaggcagcctgggatgccagactctctatcacctggctaaattgggtatgtctggcgctgtcctgttggaaagagagagattgacaagcgggaccacctggcatacagctggtctactctggcagctccgccccagcgatgtcgaggttgaactgctagcccacaccaggagggtggtttccagggaactggaagaagaaacgggcctgcacacagggtggatccaaaatggaggattatttattgccagtaatcgccaacggcttgatgagtataagcgactgatgagccttgggaaagcttacggcgtagaaagccacgtgctgagtcccgccgaaaccaaaacactgtacccacttatgaacgtggacgacctttatgggactctttacgttcctcacgacggaacaatggaccccgcagggacttgtaccaccttggcacgggccgcctccgcccgcggcgcccaggtcattgagaactgtcccgtaactggtataagagtctggacagacgattttggcgtgcgccgcgttgccggggtggagactcagcacggttctatacagacgccctgtgttgtaaactgtgctggagtctgggcgagtgccgtcggccggatggctggcgtgaaagtccctctcgtagccatgcaccacgcctatgtcgtcacagagcggatcgagggcatacagaacatgccaaacgtcagagaccacgatgctagtgtataccttaggctgcaaggtgatgcactctcagtcgggggttatgaggccaatcctatcttttgggaggaagtctccgacaagtttgccttcggcctatttgatctcgactgggaagtgttcacacagcacattgagggcgccataaatcgggtcccagtactggagaagactggtattaagagcacggtctgcggccctgagagtttcacgccggaccataaacctctgatgggagaggctcctgagctgcgggggtttttcttaggatgtggctttaactctgctggaatgatgctgggcggagggtgcggccaagaattagcccactggatcattcatgggagacctgagaaggacatgcacgggtatgatatccggagattccaccacagcttaaccgaccatccaagatggatccgcgagcgaagtcacgagtcttaccaagagctgctgcggcgactgccgcctcgatag

SEQ ID NO: 17830 - DNA, 1893 bp, synthetic construct
  source 1..1893: mol_type = other DNA; note = Synthetic coding sequence
atgtcaatcgaactgcagtcggtctccaacccggtccaccgcaaggacttggtgatccgcctgacagacgacacagaccccttcttcctgtacaacctagtgatttccgaagaagactttcagagtctgaaattccagcagggcttactagtggatttccttgcttttccacagaagttcatcgacctgttgcagcagtgtacgcaagagcacgccaaggaaatccctcgctttctactgcagctggtttccccagccgccatcctggacaatagtcccgcgttcctgaatgttgtggaaactaatccttttaagcatctgactcacctatctcttaagctgttacctggaaatgacgtggaaatcaaaaaatttctagctggctgtctaaagtgttccaaggaagagaagctgtctttgatgcaaagcctagatgatgcaacaaaacagctggacttcacccgcaagaccctagccgaaaagaagcaggagttggataagctgagaaacgagtgggctagccacacagcagccctaactaacaagcattctcaggagctgactaacgagaaagagaaggccctgcaggctcaagtgcagtaccagcagcaacatgagcagcaaaagaaagaccttgaaatcttacaccagcaaaatattcatcagctgcaaaaccgtctgtctgaacttgaggctgccaacaaagatctgaccgaaaggaaatataaaggtgatagcaccataagggagctaaaggccaagctctccggcgtcgaggaagagctccagagaacaaagcaggaagtcctttccctgagacgtgagaacagcacattagacgtagaatgccacgaaaaggaaaagcacgtcaaccagcttcagaccaaagtagccgtgctggagcaggagataaaggataaagaccagctggtgctgcgtactaaggaggcttttgacaccattcaggagcaaaaggtggttctcgaggaaaacggcgaaaagaatcaggtccagcttggaaaattggaagcaactatcaaatcactgtccgccgaacttttgaaagctaacgagattattaaaaagctgcaaggcgacctgaagacgctgatgggaaaactaaagttgaagaacacagtgacgattcagcaagagaagctattggccgaaaaagaagagaagctccagaaggagcagaaggaactccaggatgttggtcagtctctgaggattaaagagcaggaggtgtgtaagctgcaggagcaactggaggctacagtcaagaaactggaggagtcgaaacagctgctaaagaataatgagaagcttatcacttggctcaataaggagcttaatgagaaccagctggtgaggaaacaggatgtgttaggcccatccacaacaccccccgcccattcttccagtaacactatccgttcaggaattagccccaacctgaatgtggtcgacgggagactgacgtatccaacttgcggaatcgggtatcccgtttctagcgctttcgcatttcagaatacattccctcattcaatctcagcaaagaacacttctcaccccggctccggcacgaaagttcaatttaacctacagttcaccaagcctaatgcatctcttggcgatgtgcaaagcggagccaccataagcatgccctgctcaacggataaggaaaatggagagaacgtagggttggagtctaagtacctgaagaaacgggaagactctatcccactgcgcggcttaagccagaatctttttagcaacagcgatcatcagagggatggtaccttgggtgcactgcacaccagttctaagcccactgccctaccttctgcgagctccgcatacttccctggccagttacctaactcctag

SEQ ID NO: 17831 - DNA, 1170 bp, synthetic construct
  source 1..1170: mol_type = other DNA; note = Synthetic coding sequence
atggaccgagagacactgatcgatgtggccaggacctctctgagaactaaagtccacgctgagctggctgatgtcctcaccgaggccgtggttgattctatacttgccatcaaaaaacaggatgaacctattgacttgtttatgatcgagatcatggagatgaaacacaaatcagagactgatacaagtctgattagaggccttgttttggaccacggggctcgccacccagacatgaagaagcgtgtggaggatgcatatatactgacttgcaatgtgtcactagagtacgagaagactgaagtgaacagcggatttttctataagagtgccgaggagagagaaaaactggtaaaagctgaacggaaatttatcgaagacagagtcaaaaagattatcgaactaaaacgcaaggtctgcggcgactcagataaaggatttgtggtgattaaccaaaaagggatagatcccttctccctggacgcgctctccaaggaggggattgtggcactgcgccgagctaaacgcagaaatatggagcgactgacattggcttgtggtggcgtggcattgaactcctttgacgacctgtcgccagactgtctcggccacgcaggactcgtttacgagtatacattgggggaggagaagttcaccttcatcgaaaagtgcaataatcctcgatccgtgaccctgctgatcaaggggcctaataagcacactctaactcagattaaggacgccgtacgcgatggactgcgggccgtgaagaatgcaatcgatgacgggtgcgtggtccccggagccggggctgtcgaagtggccatggccgaggcccttattaaacacaagcccagcgtcaaggggcgggcccaactgggggtccaggcttttgccgacgcattgctgatcattccaaaagtcctcgcccaaaattctggttttgatctccaggaaaccctcgtcaaaatccaagcggaacactctgaatctgggcagcttgttggcgttgatctcaatactggggagccaatggttgccgcagaggtgggcgtttgggacaattattgtgttaaaaagcagctgcttcattcttgtacagtgatagcaactaatattttactggtggacgagataatgagagcaggaatgtcatctctcaagggatag

SEQ ID NO: 17832 - DNA, 441 bp, synthetic construct
  source 1..441: mol_type = other DNA; note = Synthetic coding sequence
atgactgtcaatgaggccaaggaaaagcttaaagaggcacctgaaggtacgttcctgatccgagattcttctcatagtgattacctgttaaccatttccgtcaagacaagcgctggacctacaaatctccgcattgagtaccaggacggaaaattccgactcgacagcatcatctgtgtcaaatccaaattaaagcagtttgactcagtcgttcatttaattgactattacgtccaaatgtgtaaagacaagagaaccggacccgaggcaccacgaaacgggaccgtgcatttgtatctgacaaaacctttatatacatctgcaccctcactgcagcacttatgtcgcctgaccatcaacaaatgtaccggagccatctgggggctgccactgcccacccgattaaaagactacttagaggagtataaattccaagtgtag

SEQ ID NO: 17833 - DNA, 1905 bp, synthetic construct
  source 1..1905: mol_type = other DNA; note = Synthetic coding sequence
atgctagaatatgcgctgaaacaggagcgcgccaagtatcacaagctaaagtttgggaccgatttgaatcaaggcgagaagaaagccgacgtttctgagcaagtctctaacgggccagtggagagtgttactcttgaaaactcccccctcgtgtggaaagaggggagacaactactcagacagtacttggaagaggtgggatacactgataccatcttggatatgcgttcaaaacgcgtgagaagcctgctgggtaggagcttggaactcaacggcgcagtggaaccctcagaaggtgcccctagagcccccccagggcccgctggactgtcggggggagagagcttactagtcaagcagattgaagagcagattaaacggaacgccgcggggaaggacggaaaggagaggctgggagggtcagttctcgggcaaatcccatttttacagaattgcgaggatgaggatagtgatgaagacgatgagttggactcggtacagcataagaagcaaagagtgaaactgccttcaaaggctttggtgccagagatggaggacgaggatgaggaggacgactctgaagacgccatcaacgagttcgacttcctcggatcaggggaggacggagagggtgcacctgatccacgtaggtgtaccgtagacgggagcccacacgaactggaatcgcggagggtgaaactacagggcatacttgccgaccttagagatgtggacggcctaccacccaaagtgacagggccaccacctgggaccccacaaccgcgcccccacgaagatgtctttattatggacaccatcggcggcggcgaagtgtccttgggagatcttgcggatctgacggtcaccaatgataacgatctgtcttgtgacctgagcgatagcaaagatgcctttaagaagacttggaatccaaagttcacactgagaagtcattatgatggtatcaggtctcttgcctttcatcacagccagtctgctctgctcactgcctctgaggacgggaccttgaaattatggaatctgcaaaaagccgtcacagccaagaagaatgccgctctcgatgtcgaacccattcacgccttcagggcccacaggggccccgtgctggctgtcgcgatgggatcaaactccgagtactgctattctggcggggccgacgcatgcattcactcctggaaaatccctgacctttccatggacccgtacgacggttacgatccctcggtgctcagccacgtgctcgagggtcacggggacgctgtgtggggactggccttctcccctaccagtcagaggctcgctagctgcagcgctgacgggacagtccgcatatgggaccctagctctagctctcccgcctgtttgtgtacgttccccacagccagcgagcatggggtgccaactagcgtagccttcacaagtactgagccagctcacatcgtcgcatcatttagatctggtgatactgtgttatacgacatggaggtggggtcagcactgctgacactggagtctagagggtctagcggcccaactcaaattaaccaggtcgtgtctcacccaaatcaacctctgactatcacagcacatgacgaccgcggcatccgattcctcgacaacagaaccgggaaaccagtgcactccatggttgcccacctagacgccgtcacatgtctggctgtcgacccaaatggcgccttcttaatgtcaggctcacacgactgctctctgcgactctggagtctggataataaaacttgtgtacaagaaatcacggctcatagaaaaaagcacgaggaagctatccacgcagtggcttgccacccctccaaagccctcatcgcaagcgctggagccgatgctctcgccaaggtgttcgtctag

SEQ ID NO: 17834 - DNA, 1368 bp, synthetic construct
  source 1..1368: mol_type = other DNA; note = Synthetic coding sequence
atgagttcccttggggcctcctttgtgcagataaagtttgacgaccttcagttcttcgagaactgcgggggaggcagttttggatccgtgtatagagccaaatggatctctcaggataaagaggtcgcagtcaagaaattactcaagatcgaaaaagaagctgaaatcttaagcgtgctatcccacagaaacataattcaattctatggagtgatcctggagccccctaactatggaattgtgaccgagtacgcctcactcggttcattgtacgattacataaactcgaaccgctctgaagaaatggacatggatcacatcatgacttgggcaaccgatgtggcgaagggaatgcattacctacacatggaggccccggtgaaggtcatccatcgcgacctgaagagcagaaatgtcgttatcgcagctgatggagtgctgaaaatttgcgattttggcgccagtaggtttcataatcatacaactcacatgtccctggtcggtacttttccctggatggcacccgaggtgattcaatcactacctgtgtctgagacatgcgatacatattcttatggtgtggttctctgggaaatgctgacacgggaagtcccattcaagggcctggaaggcttgcaagtagcttggctggtggtcgagaagaatgagagattaacaataccttcgtcatgtcctagaagcttcgctgagctgctgcatcagtgttgggaggccgatgctaagaaaagacccagctttaagcagataatctctattctggagagcatgtccaatgacacaagtctgcctgataagtgcaatagcttccttcacaataaagccgagtggagatgtgagattgaggcaacgcttgagagactaaagaagctggagcgtgacttgtctttcaaggagcaggaactgaaagagcgggagaggagattgaagatgtgggagcaaaagctgactgagcaaagcaacacgccgttactgctcccactggctgcgcgtatgagcgaggaaagttatttcgaatcaaagactgaagagtccaatagcgccgaaatgagctgtcagatcactgcgacctccaacggggagggacatggaatgaatccttcgcttcaggccatgatgctaatgggattcggtgacattttctcaatgaacaaggccggtgcggtgatgcactcgggcatgcaaataaacatgcaagctaagcagaatagctccaagaccacctcaaagaggaggggcaagaaggtgaacatggcattgggcttctctgatttcgacctcagtgagggggacgacgacgatgacgacgacggagaggaagaggacaacgacatggataactccgagtag

SEQ ID NO: 17835 - DNA, 474 bp, synthetic construct
  source 1..474: mol_type = other DNA; note = Synthetic coding sequence
atgaagtctatgtctcaactcgccgtcttgtctcgcagatggaagccctcagaaatgaagttggatccatttcaggaggtggttctggagtcatccagtgtggacgagcttagggaaaagctcagtgagatttccggtataccactcgacgatatcgaattcgcaaaaggaaggggcactttcccttgcgacatttcagtgctggatatccatcaagacttggactggaacccaaaggtatcgacattaaatgtatggccactctatatatgcgatgatggtgctgttatcttctacagagataaaaccgaggaattgatggagctgaccgatgaacagaggaacgagttaatgaaaaaggagtcgtcccggcttcaaaaaactggccacagggtgacctattcccctcggaaggaaaaggcacttaaaatctacttggatggggcgccaaacaaagacttgacacaagattag

SEQ ID NO: 17836 - DNA, 1083 bp, synthetic construct
  source 1..1083: mol_type = other DNA; note = Synthetic coding sequence
atgaaggctaccgctatgacgtccgcctggctggctcaaggtacaggagagggggtgaacgacgtaaggaaaggcgcgtgcgccagccatgtgtcaaccatggcctcttttctgaaaggtgcacacgtgacaattaatgcccgagctgaagaagatgtggaaccagagtgtattatggagaaagttgctaaagcctctggcgcaaattattcgtttcataaggagtctgggcgctttcaggacgttgggcctcaggcccctgtcggctccgtttatcagaagacaaacgccgtgtcagagattaagagggtggggaaggactcattttgggcgaaggccgagaaggaagaagagaatcgccggttggaggagaagcgcagagccgaagaagcacagaggcagctcgagcaggagcgtagagagcgcgaactgcgggaggctgcaagacgtgagcagagatatcaggaacaggggggcgaagctagtcctcagaggacttgggagcagcagcaagaggtagtgagcaggaaccgtaacgagcaagagagcgccgtgcacccaagagaaattttcaagcaaaaggagcgggcaatgtccacaactagtattagttccccccagccaggcaagctgcgctccccgtttctgcaaaaacagctgacccaaccagaaacccatttcggccgggagccagccgcagccattagtcgccccagagcggacctgccggccgaagagcccgctccctccacaccaccatgccttgtgcaggctgaagaagaagcagtgtacgaggaaccaccggaacaggaaactttttatgagcagcctcctctagtgcagcagcagggcgccggctcggaacacatcgatcaccacatccagggacagggtctgtccggacagggcttgtgcgccagagccctgtatgactatcaggcagcagatgatactgagatcagtttcgaccccgaaaacctgataacaggaattgaggttatcgatgagggctggtggcgtggttacggaccggacggccattttggcatgttccccgcgaactacgtggaactcattgagtag

SEQ ID NO: 17837 - DNA, 291 bp, synthetic construct
  source 1..291: mol_type = other DNA; note = Synthetic coding sequence
atgtgccacacgtcctgctcaagtggatgccagcccgcctgctgcgcacccagcccatgtcagcccgcatgctgcgtgcccgtctcatgtcagagctccgtatgtgttcctgtcagctgccgtccaatcgtttgcgcggccccctcctgccagtctagtttgtgcgtgccggtgtcttgtcgcccagtcgtgtacgcagcccctagctgtcagtctagtgggtgctgtcagccctcctgtactagcgtcctgtgtagacccatctcgtatagtatatcaagttgctgctag

SEQ ID NO: 17838 - DNA, 27 bp, synthetic construct
  source 1..27: mol_type = other DNA; note = Synthetic coding sequence
atgcccctttccagcccaaatgcctag

SEQ ID NO: 17839 - DNA, 384 bp, synthetic construct
  source 1..384: mol_type = other DNA; note = Synthetic coding sequence
atgtctagcagcatgtggtatattatgcagtcgatccagtcaaaatactcactcagcgagagactcatacgaactatcgccgccatccgttccttcccgcacgataatgtcgaggatctgatcaggggtggggctgacgtgaattgtactcatgggaccctaaaacctctgcattgcgcgtgtatggtcagcgacgctgattgtgttgaattgctgctcgagaagggcgccgaggttaatgctcttgacggatataataggacagctctgcactacgctgccgagaaggatgaggcatgtgtggaagtgctgcttgagtacggcgccaacccaaacgcactcgacggtaatagggatacgcccctccattgggcagcattctag

SEQ ID NO: 17840 - DNA, 318 bp, synthetic construct
  source 1..318: mol_type = other DNA; note = Synthetic coding sequence
caatggaccgccagcactgccacaatcacgaaagaaaaacaggatcaacctaagaaagatattagcaattatcaggtggaacaggcccaggtgttgttaaaaagagaaaaggaaattccccccaccgtgtttccaaatagaagtccctggtgccagaacccctacgtgtctgcccacccctattgccctctgatcgagccgcacaacacatctaccgccggggggcgcctagataggcagccaaggaccaggtctactagaccaaatagagctagtggctccaagaagaagaagacatcagaatcccagaaacagtag

SEQ ID NO: 17841 - DNA, 1116 bp, synthetic construct
  source 1..1116: mol_type = other DNA; note = Synthetic coding sequence
atggaagaagagggactagccgacgaagaggtgcggttggttcaaaaaaaggacactggacacatttacgccatgaaaatcttgaggaaatccgacatgctcgagaaggaacaggtggcccacatccgagcagaaagagatattttggtagaagccgatggtgcttgggtggtgaagatgttctactcttttcaggacaagagaaatttatacctcattatggagttcctgccgggcggagacatgatgacactgttaatgaagaaggacacactgactgaagaagagacccaattctacatcagtgagaccgtgctcgctattgacgcgattcaccagctcggctttattcatcgcgatataaagcccgataacctgctcttagacgccaaagggcatgtaaagctctctgacttcggcttgtgtactgggctcaaaaaagcgcataggactgagttctacaggaatctgacccacaacccacctagtgatttctcctttcagaacatgaactccaaacgcaaagccgagacctggaaaaagaaccggaggcagttggcctattcgactgttggcaccccagattatatagcccccgaggttttcatgcagactggctacaataagttatgcgattggtggtcactgggcgttatcatgtatgagatgctcatcgggtacccacctttctgctcggagacccctcaggaaacctatcggaaggtcatgaattggaaagaaacacttgtgttccctcctgaagtccccatttccgagaaagctaaagacctaatcctgaggttctgtattgatagtgagaataggattgggaattcgggcgttgaagaaattaagggccatcccttttttgaaggtgttgactgggaacatatcagagaacgcccggctgccattcccattgagattaagtctattgatgatacatccaatttcgatgatttccccgaatcagatatcctacagccagttcctaatactacagaaccagattacaagtccaaagattgggttttcttgaattacacgtacaagcgatttgaaggcctgacccagagaggaagcatccctacatatatgaaggccggaaagttgtag

SEQ ID NO: 17842 - DNA, 564 bp, synthetic construct
  source 1..564: mol_type = other DNA; note = Synthetic coding sequence
atgaacaataccctcaggaaagacggaaagaaggattgctgttttgagatcagtgcaccagacaaaagaatatatcagttcacagcggccagtcctaaggacgccgaggaatgggtgcagcagctgaagtttgtcttacaagatatggaaagcgatatcattccagaagactatgacgagcgaggagagctatacgatgatgtagatcaccctctgcccatcagcaacccgctaacttcaagtcaacccatcgatgacgaaatctacgaagagcttccagaggaagaggaggactcagcgcccgtgaaggttgaggaacagcggaaaatgagtcaggacagtgtccaccacacgtccggtgacaagtctaccgactacgcaaacttctatcagggtttgtgggactgcacaggggcatttagcgacgagcttagcttcaaaaggggtgacgttatctatatattatctaaggagtacaataggtacgggtggtgggttggggaaatgaaaggggcaattggccttgtccccaaggcctacatcatggaaatgtatgatatttag

SEQ ID NO: 17843 - DNA, 219 bp, synthetic construct
  source 1..219: mol_type = other DNA; note = Synthetic coding sequence
atggcattgagcctgggctggaaggcacaccgcaaccactgcggactactactacaggcattgagatccagtggtttacttttgtttccttgcggccagtgtccatggcgcggcgctgggtcattcctagacccggaaatcaaggctttcctggaagaaaacacggaggtaacaagtagtggatccctgacacccgagatccagctgcggttgctctag

SEQ ID NO: 17844 - DNA, 2919 bp, synthetic construct
  source 1..2919: mol_type = other DNA; note = Synthetic coding sequence
atggcagccgctgctgcagaacaacagcagttctacctgttgctagggaacttactttcccccgataacgtcgtgcgcaagcaggctgaggagacctatgaaaacatccctgggcaaagtaagataactttcctcctacaggctatacgcaataccacagccgctgaggaagccaggcagatggcagctgttcttttgagacggttactgtcttccgcatttgatgaggtgtacccagcacttccgtccgacgtgcagaccgcgataaagaatctgttgcccgggttcctgcaagccgtgaatgactcttgttaccagaatgatgactcagtcctgaagagccttgtagagatcgctgatacagtgcccaagtatctgaggccccacctggaagccacgctccagctttcgctgaaactatgtggagacacctccctaaacaatatgcaacgccaactggcccttgaggtaatcgtcacactgagcgaaacagcagccgccatgctacgcaagcacaccaacatagttgcgcaaactatcccgcagatgctcgctatgatggttgacttagaagaagatgaggactgggccaacgctgatgaactggaggacgacgactttgatagcaacgcagtagctggtgagtccgctctggataggatggcatgcgggctaggcgggaagctcgtcttacccatgatcaaagagcacattatgcagatgctgcagaatccagattggaaataccgtcacgccggcttgatggctctctccgctatcggtgagggctgtcaccaacaaatggagggtatccttaacgagatagtgaactttgtcctgttatttctacaggacccccaccccagagtgagatatgcagcctgtaacgcagttgggcagatggccaccgattttgctccaggatttcagaagaaatttcacgaaaaggtgattgccgctctgctgcagactatggaggaccagggaaatcagcgggtgcaggcccatgctgccgccgcactcattaatttcacggaagattgcccgaaatcactactcattccctacctcgataatttagtcaaacacctacatagcatcatggtgttgaaactgcaagagcttatccaaaaagggacgaagctggtgctggaacaggttgtaacgtctatcgcatcagtcgcagatactgcagaggaaaaatttgtgccttactatgaccttttcatgccctcactcaagcatatcgtcgagaacgctgttcagaaggagctacggctcctgaggggcaaaaccatcgagtgcatctctctgatcggacttgccgtaggtaaggaaaagtttatgcaggatgcttcggacgtgatgcagctgctgctgaagacgcagactgacttcaacgatatggaggatgacgaccctcagatctcatacatgattagcgcatgggcgagaatgtgcaaaatccttggaaaagagtttcaacagtacttgccggtggtgatgggcccattgatgaagacggcctctatcaagcctgaggtggccctgctggacacgcaggacatggaaaacatgtcagacgacgacggctgggaattcgttaacctgggggaccaacagtcatttggcatcaaaacagccgggctggaggagaagagtaccgcctgtcagatgcttgtgtgttacgccaaggagcttaaagaaggttttgtagagtacacagaacaggttgttaaattgatggttccgctgcttaaattctatttccatgacggagttcgggttgccgccgccgaaagcatgccattactcttggaatgtgcgagagtaagaggacccgaatacctcactcagatgtggcattttatgtgcgatgccctgattaaggctatcgggaccgagcctgattccgacgtcctgagcgagatcatgcactcttttgccaagtgtattgaggtgatgggagacggttgtcttaacaacgagcactttgaggagcttggcggcatcctgaaggccaagcttgaggaacattttaagaatcaagagcttagacaagtcaaacgacaagatgaggactacgatgaacaagttgaggagtcattgcaggatgaggacgacaatgatgtttatattttgacgaaggtgtcagatatcttgcactctatcttcagctcttacaaggagaaggtcctgccgtggttcgaacagctgctgcctttgatagtgaacctgatctgtcctcaccggccttggcctgacagacagtgggggctctgtatatttgacgacgtgatcgagcactgctcacccgcgagcttcaaatatgccgagtattttctgcgccctatgctccaatatgtgtgtgataactccccagaggtacgacaagccgctgcctatgggctgggcgtgatggcgcagtatggtggcgacaattatcgacctttctgtacagaggcccttccactcctggtcagggtgattcaatccgctgatagcaaaacgaaagaaaacgtgaatgccactgaaaattgcataagcgctgtcggcaaaattatgaagtttaagccagactgtgtgaatgtcgaggaagtcttgccacactggctgtcttggctacctttacacgaagacaaggaagaggcggtccagactttcaattacctgtgtgatctcatcgaatccaaccacccgatcgtgctgggtcctaataatacgaatctacctaagattttcagtattatcgctgaaggcgaaatgcacgaagctattaagcacgaagacccatgtgccaaaagactggcaaacgttgtgcggcaagtgcagacatccggcggcctgtggactgaatgcattgcacagctcagcccagaacaacaggcagcaattcaagaactgttgaatagtgcttag

SEQ ID NO: 17845 - DNA, 1428 bp, synthetic construct
  source 1..1428: mol_type = other DNA; note = Synthetic coding sequence
atgcaggtaaccttcatatacgtgtgcctcaagggactgatgcttcaggacttggtaagcgccaagctgatcagcgattacactgtgaccgaaatccctgatacgatcaatgatttgcaggggtctactaaggtcctgcaggccgtgcagtggctagtgtctcactgcccccacagtcttgacctgtgctgtcagactctgattcagtacgtggaagatggaatagggcatgagttctcagggcggtttttccatgatcgtagagagcggagattggggggccttgcgtcccaggaaccaggagcaattatcgaactgttcaacagcgtgctgcaattcctggcgtccgtggtgtccagtgagcagctgtgtgacctgagttggccagtgaccgagtttgccgaggcaggtggatccaggttactgccccacctccattggaacgctcctgaacacctggcttggctgaagcaagccgtgctggggtttcagctgcctcagatggacctgccacccctcggcgctccttggctgcccgtgtgcagcatggtggtgcaatacgccagccagatcccaagctccagacagacgcaacccgtactgcagtcgcaagtggagaatctactgcatcggacatattgtcgctggaagtcgaagagtccctccccagtccatggtgcaggtccctccgtgatggaaattccgtgggatgacctgattgcgctgtgtattaaccataagctgagggattggacccctccacggcttccagtgacaagcgaggcgctgagcgaagatgggcaaatctgtgtttacttttttaaaaatgatcttaagaagtacgacgtccctctgagttgggagcaggcacggctccaaacacagaaagaacttcagttgcgcgaaggccgattggcaattaagccatttcacccctcagcgaataatttccccattcctctccttcatatgcatagaaattggaagcgttctactgagtgtgctcaggagggacgaattccttccaccgaggatctcatgagaggggcaagtgccgaggaactactggcacaatgcctctcgtcttcgctcctgctggagaaggaggagaataagcgcttcgaggatcagctgcagcagtggctctccgaagactcgggcgctttcacagacctcacctccctgccgctgtatctccctcagaccctggtctcactgtcccacacgattgagcctgtgatgaaaacaagtgttaccactagcccccagtccgatatgatgagagaacaactccagctgagcgaagcaactggcacttgcttgggcgaaaggctgaagcatttggaacgcctcatacgaagttctagagaagaggaagtggcttcggagctccatctttctgctttgttagatatggttgatatctag

SEQ ID NO: 17846 - DNA, 333 bp, synthetic construct
  source 1..333: mol_type = other DNA; note = Synthetic coding sequence
atgagcactgcactgacccacaccacggtggcgatgagatgccctatgggcgggggcggcggacccacgtatggtccaccccagccatgggggcatcctgacgtccacatcatgcaacaccacgtgctgcccatccaggcacgcctgggatcaattgccgaaatcgacctgggcgtgcctccgcccgttatgaaaaccttcaaagagttcctcctgagcctggacgactccgtggacgagaccgaggccgtgaagaggtataacgactataaattggacttccgaaggcagcagatgcaggacttttttctggctcacaaagacgaggaatag

SEQ ID NO: 17847 - DNA, 828 bp, synthetic construct
  source 1..828: mol_type = other DNA; note = Synthetic coding sequence
atgagcgccgaagtcaaagtgactgggcaaaatcaggagcagtttttgctgctcgctaagtctgcgaagggggccgccctggctacacttatccatcaggtgttagaggcacctggagtctacgtgttcggggagctcctggatatgcctaacgtcagagaactcgccgagtctgactttgcatccacattccgactattaaccgtgtttgcctatggtacctacgccgattacctggctgaagcgcgcaacctgccacccctgacggaggctcagaagaacaagttgcgacatctgtcagttgtaactttggccgccaaggtgaaatgtatcccctacgcagttcttctagaggcccttgcgctccgaaacgtgcggcagctagaggacctggtcatagaggccgtgtatgccgatgtgttacgcggatcccttgaccagcggaaccagagattggaggtggactatagtattggccgcgacatccagcgccaggacctttctgccattgcccgtacccttcaagaatggtgtgtggggtgtgaggtggtactcagtggcattgaagaacaggtctcccgtgccaatcagcataaagagcaacagttgggcctaaagcagcagatcgagtccgaggttgcaaacctgaaaaagaccatcaaggtgaccacagccgcagccgccgctgccacaagtcaagatcctgaacagcacctcacagaactgcgggaacctgctcctggcactaaccagcggcagccctctaagaaagctagcaagggtaaggggctgcgtggaagcgcaaaaatatggagcaaatcaaattag

SEQ ID NO: 17848 - DNA, 876 bp, synthetic construct
  source 1..876: mol_type = other DNA; note = Synthetic coding sequence
atgatcggagacggagaagattactttctgagtctgttcggagactctaagaaactgaccgctcatagcaactacactcagaagacactaaaatacttctctatgattctggaggaagtgggacaattcacctcatcttcacttggagatgttgagatcgccgaggtcaatgtgaaagggctgttcgtcaaactgataaactcaagtctcgataaggagatggctatcggggatcacattctccagcagaatgtgaacgggcagacgatcagtctgtatcggtttctccctaacattgtcatgcaagccaattctacagtaaccgtctgggccgctgcctcagaagccaagcaccagcccccatctgatttcctctggaaggaacaagacaagtttcgtgcaagtccggactgtatcaccatactctgtaagcccaacgggcaagctattgcctggtacacccctatacattggaaacaagcctgggaaaagctggatgcggatgtagaattcaacagatgctctgttgttagccctacattcagaaagagagtctttcagtggaccgcttccactgctactattactaaggaaaaacaggaccagccgaaaaaggacatttccaactaccaggtggagcaggcacaagtgttgttaaagcgggagaaggagattcctccaaccgtgtttccaaaccggtccccatggtgtcagaacccttacgtcagcgcgcatccttactgtcccctaatagagccccataatacgtcaacggctggcgggaggctagaccgacaaccccgtacccgctccacgcgccctaatcgtgcttccggtagtaaaaaaaagaagacaagcgaatcccaaaagcagtag

SEQ ID NO: 17849 - DNA, 1185 bp, synthetic construct
  source 1..1185: mol_type = other DNA; note = Synthetic coding sequence
atggtcccatcccaagctccatacctagtgcctgcattcccactgcccgccgctacaagccccggccgtgagtatgcagctccaggaacagctcccgaaggattgcatggtttgccgttgagcgaaggtctgcaaccgtacccagcttttccattcccttacctggatacatttatgactgtgtttctgccagacccaccggtctgccctttgctatcacccagcttcctgccttgcccttttctcggcgcaaccgcatcctccgctatctccccttcaatgtcttccgctatgtctcctaccctggatccgcctccctctgtgacatcccagagaagagaggaggagaagtgggaagcccaaagtgagggccacccgttcatcaccagtagatcgtcttccccactccagctgaacttactgcaggaggaaatgccccgcccaagcgaatcaccagaccaaatgcgaaggaatacctgtcctcagacggagtactgcgtgacaggtaacaacgggtccgaatcaagcccagctacaacaggcgcattgtcaaccgggagcccgcctcgtgaaaatccgagccatccaaccgcatccgccctgagtacaggctctccccccatgaagaatccctcccaccctaccgccagcacgctaagtatggggctacccccgtcgagaacaccatcgcaccctactgcgacggtcctgtctacaggcagtcctccaagcgaatcaccaagtcgaactggctcggcggcctctggaagcagcgatagctcaatatacttgacgagttcagtgtattcctctaagatatcacaaaacggtcagcagtctcaagacgtgcagaaaaaagagacctttccaaacgtggctgaagagccgatctggcgaatgatcaggcaaacccccgagcgtatcttaatgacctatcaggttcccgagagggtaaaagaggtggtgctgaaggaagacctggaaaagctagagagtatgaggcagcaacagccacagttctcccacgggcaaaaggaggaactggccaaggtctacaattggatccagtctcagaccgtgacacaggagattgacatccaagcctgcgtaacatgtgagaacgaggactcagccgacggagcagctacctcatgtggacaggttctcgttgaggacagctgctag

SEQ ID NO: 17850 - DNA, 2424 bp, synthetic construct
  source 1..2424: mol_type = other DNA; note = Synthetic coding sequence
cagggggcgtcattcgccttggctgctgctgccgcattgctgtttggctctgatatggaagatggaccgtctaacaacgcttcctgttttcgcagactcacagaatgctttttgtccccgtcgcttacagacgagaaggtgaaggcctacctatccttacaccctcaggtgctggacgagttcgtgtccgaatctgtttctgccgaaactgttgagaagtggctgaagaggaagaataataagtcagaagatgaatccgcgcctaaggaagtttctagataccaggacaccaatatgcaaggagtggtgtatgaactcaacagttatattgagcagcggctggacactggcggtgataaccagttgctcttgtacgagctctcctccatcatcaagatcgcaaccaaggcagacggattcgcactctattttttgggcgaatgtaacaattccctgtgtatcttcaccccgcccgggattaaggagggcaaacctagacttattcccgccggacccatcacccagggcactacagtctccgcatatgtcgcgaaatcccgtaagacactgcttgtggaagatatcctgggagacgaaagatttcccagggggacgggcctcgagagcggaaccaggatccagagcgtgctctgtctccccatcgtgaccgcaattggagatctgatcggaatactggagctgtacagacactggggcaaggaggcattttgtctgtcccatcaagaggtggcgaccgccaatctcgcttgggcttctgtggctatccaccaagtgcaggtgtgtagaggtctagccaagcagacggaactaaatgattttttgctagacgtgagcaagacctacttcgataacatagtggccatcgactcattgttagaacacatcatgatctacgctaagaacctcgtgaacgcagacaggtgcgccctttttcaggtcgaccacaagaacaaggaactatactcagacctgtttgatatcggagaagaaaaagagggcaaaccagtcttcaagaaaaccaaggaaattcgcttctctattgaaaaaggcatagcagggcaggtggcacgtacaggcgaagtgctgaatatcccagacgcctacgctgaccccaggtttaatagggaggtcgacctttataccgggtacactactcgcaatatactgtgtatgcctatcgtgagccgcggcagtgtgatcggggtcgtccagatggtcaataaaatctccgggtccgccttctctaaaactgacgagaataattttaaaatgtttgcagtcttttgtgccctggccctgcattgcgcaaacatgtaccataggattcgacattctgagtgtatttaccgagtcactatggaaaagctttcctatcactcaatctgcactagcgaggagtggcagggcctcatgcagttcaccctccccgttcgcctgtgtaaggaaatagagttgttccacttcgacattggcccattcgagaatatgtggcccggaatcttcgtatatatggttcaccgttcctgcgggacatcatgcttcgaattggagaagctgtgtagattcataatgtcagtgaagaaaaattataggagggtcccctaccataattggaaacacgccgtcaccgtggcccactgtatgtatgccatcctccaaaacaatcacactttgttcacagatcttgagagaaagggtctgctcatcgcatgcctgtgtcacgacctcgatcacagaggattttcaaactcctacctgcagaaatttgaccacccccttgcggccctgtattcaacgtctacaatggagcaacatcacttctcgcagactgtcagcattctccagctggaaggacataacatcttcagcacactgagcagcagcgagtacgaacaagttctggagatcatacgcaaagccatcatagccactgatctcgccctgtatttcggtaatcggaagcaactcgaggagatgtatcagacaggcagtctgaacttgaacaaccagtcccatagggaccgcgtgattggcctgatgatgactgcttgcgacctgtgttctgtcactaaactatggcccgttactaaacttaccgcaaacgatatttatgcagagttctgggccgagggggacgagatgaagaagctcggaatccagcccattcccatgatggatagggataagaaagacgaggtccctcaggggcagttgggcttttacaacgcagtggcgattccttgctacaccacactaacacagatccttccgcccaccgagcctctcttgaaagcctgtcgcgataaccttagtcagtgggagaaggtcatccgcggcgaggaaacagccacgtggatctcctcccctagcgttgctcaaaaggcagccgcctcagaagactag

SEQ ID NO: 17851 - DNA, 1677 bp, synthetic construct
  source 1..1677: mol_type = other DNA; note = Synthetic coding sequence
atggcctcatgtcctgacagcgacaacagttgggtgttggccggcggcgaactgggaatctcgctgaacatgtgcctactgggggcccttgtcttgttaggcctgggcgtgctgctcttctctggcgggttgtcagagagtgagacagggccaatggaggaggtcgaacggcaggttctgcccgacccagaggtgcttgaagctgtgggcgaccggcaggacgggctaagggaacagctccaggctcccgtccctccagactcggttccaagcctgcagaatatgggcctcttactggataagttagccaaggaaaatcaagacattagactgttacaagcccagttgcaggcccagaaggaagaactccagagtctcatgcaccagcccaagggtttggaagaggagaacgcacagttacgcggagccttacagcagggggaggcctttcagagagctttagaatccgagctgcaacaactgcgtgcccgcttgcaggggctcgaggcggactgcgtcagaggacctgatggcgtgtgcctgtccggcgggcgagggccccagggagacaaagccatcagggagcaagggccccgcgagcaagaacccgagctgtcttttctcaagcaaaaggagcagctggaggctgaggcccaggctctgcgtcaggaactggaaaggcagcgccgactgctcggcagtgtgcagcaagatctcgagcggtccttacaggatgcaagcagaggtgatcccgctcacgccgggcttgcggagctcggacacagactggctcagaagttgcagggcctggagaattggggtcaggatcctggagtttcggcaaatgcaagcaaagcctggcaccagaaatcacacttccaaaattctagggagtggtccgggaaggaaaaatggtgggatggacagcgggatcggaaggccgagcactggaagcataagaaggaagaatctggccgcgaacgtaaaaagaactgggggggccaggaagatagagagcccgcagggcgctggaaggagggacggccccgggtggaagagtctggctccaagaaagaggggaagcgacagggccccaaggaaccgccacgcaaatcagggagcttccacagctctggcgagaaacagaagcaacctcggtggcgggaagggaccaaagattcgcacgacccactgccatcttgggcagaactactgcgcccaaagtacagggccccacagggttgcagcggcgtcgacgaatgtgcaagacaagagggtctgacgttcttcgggacagagttggccccggtacgccagcaggagctcgccagtttgctgcgtacttatctcgccagacttccctgggccggccagctgaccaaagagttaccactaagtcccgcctttttcggcgaggatgggatatttcggcatgaccggctgcgttttcgggacttcgtggacgctctggaggattcgctggaggaggtggctgtgcagcagaccggagacgacgacgaagtagatgactttgaagattttatcttctctcactttttcggcgataaggcgctgaaaaagagaagcggaaaaaaggacaagcatagccagagcccgcgagccgcggggccccgcgaaggacacagtcatagtcaccatcaccatcaccggggttag

SEQ ID NO: 17852 - DNA, 1881 bp, synthetic construct
  source 1..1881: mol_type = other DNA; note = Synthetic coding sequence
atgggaaacgccgcaggtagtgcagagcaaccagctggcccagccgctcctcccccaaaacagcaccgctttgagaagctcatggaatatttccgcaatgaggactccaacattgacttcatggttgcttgcatgcagttcattaatatcgtggtgcatagcgtagagaacatgaactttcgtgtcttcttgcagtatgagttcactcacctgggactggacctgtacctggagcggctgagacttacggagagtgacaaacttcaggtccaaattcaagcgtacttagacaatatttttgacgtaggggccttgcttgaggacactgaaaccaagaacgcagtgctggaacacatggaggagctacaagaacaggtcgcactgttgactgaacgcttgagagacgcagaaaatgagagcatggccaagattgctgaactggagaagcagctttcccaggcacgcaaagaattagaaacattgcgagagcgattctctgagtcaactgctatgggacccagcagacggccacctgaaccagagaaggccccacctgcagcccccacccgcccttctgcattggaactcaaggtggaggaactcgaagagaagggattaattagaattctccggggtcccggcgatgccgtgtcaatcgagatcctcccagtggcagtcgctaccccaagcgggggggacgcacctacccccggggtgcccacgggctccccctcccctgatcttgctcccgctgccgagcctgccccgggagccgcaccaccgccacctccgccccctcccggtggcccacctgatgctcttggcaggcgggacagtgaacttgggcccggggtgaaggctaaaaaaccaattcagacaaaatttaggatgcctctgctcaactgggtcgcccttaagccttctcagatcacaggcaccgttttcaccgagctgaatgatgaaaaggtcctccaggagctggacatgtctgatttcgaggagcagttcaagactaagtcgcagggccccagtctcgatctgtccgctctcaagtccaaagctgcacagaaagccccaagcaaagccacactgatcgaggctaaccgggcaaagaatctggcaataaccctcaggaagggcaatctgggggctgagcgaatctgccaggccatagaggcttatgacctacaggccctgggcttagactttttggagttattaatgcgcttcttgccaactgagtatgagcggtcactgataacccgttttgaacgggagcaaagacctatggaggagctcagcgaggaggaccggttcatgctgtgcttcagcagaatcccacggctccctgaacgtatgaccacgctgacgtttctggggaacttccccgatacagcccaactgctgatgcctcaactcaatgccatcatcgctgcctccatgtcgatcaagagtagcgacaagctgagacagatactggaaatcgtgttagccttcggtaactatatgaactcctcaaagcgcggcgccgcgtacggcttcagactgcagtccttagacgctctgctggagatgaagagtaccgaccgcaagcaaaccctccttcattatctggtgaaggtaatcgctgaaaagtacccacagctgactgggttccattctgatttgcattttttggacaaggcaggtagcgtgagtctggatagcgttctggccgatgtccgctcactgcagcgtggactggaactgacgcagcgcgagttcgtccgtcaggatgactgtatggtcctgaaggagttcttgagagccaattcacccaccatggacaaattgctcgccgactcaaaaacagcacaggctgtccccaccgggggcctgtag

SEQ ID NO: 17853 - DNA, 1500 bp, synthetic construct
  source 1..1500: mol_type = other DNA; note = Synthetic coding sequence
atggataaactgatagtggacggacgtggaaaggccaccatcagtaacgacggtgccacaatcctgaagctgcttgacgtcgtgcacccagccgcaaaaaccctagtcgacattgctaagtcccaggatgccgaagtcggcgacggcaccacaagcgttacgctgctcgcagcagaattcctgaaacaggttaagccatatgtggaagagggtctgcatccgcaaataatcattagagcctttcggacagccacccaactggccgtgaataagattaaggaaatcgccgtcacagtaaagaaggccgacaaagtcgaacagagaaagttactggaaaaatgtgccatgaccgccctatcttctaagctgatctctcagcagaaagcgtttttcgctaaaatggtggtagacgccgtcatgatgcttgatgatctcctacagctcaaaatgatcggtatcaagaaggtgcaggggggtgctctggaggacagccagttagtggcgggggttgcgttcaagaagactttttcatatgccggcttcgaaatgcaacctaagaagtaccacaatcctaagatcgctttgctgaatgtagagctggaattgaaggctgagaaggacaatgccgagatcagggttcatacagtcgaggactaccaggctattgtggatgccgagtggaatatcctatatgacaagctggagaagattcaccatagcggagccaaggtggttttgtccaaattgcccataggagacgtcgctactcagtacttcgccgatcgtgacatgttttgcgcaggtcgggtgcccgaggaggacttgaagcgcacaatgatggcctgcgggggcagcatacagacatcagtgaatgcactgagtgcggacgttcttggtcgctgccaggtctttgaggaaacccaaataggcggcgaaagatacaattttttcaccggctgccctaaagccaagacctgtacttttatcctgagaggcggcgcagaacaatttatggaagagactgagaggagcctgcatgatgctatcatgattgtgaggcgagccatcaaaaatgacagcgttgtggccggaggcggcgctatcgaaatggagctgagcaaatatcttcgcgattactcacgcacaattcccgggaaacaacagctacttattggcgcctatgctaaggcactcgagatcatccctcggcagctttgtgacaatgcaggattcgacgcaacgaacattcttaataagctccgggcccggcacgcacaaggcggtacatggtacggtgtcgacattaataatgaggacatcgctgataacttcgaggcattcgtgtgggagccagccatggtccggattaacgcgctgactgccgcttctgaggcagcctgtctgatagtaagcgtcgacgagactattaagaatccgcgttccactgtagacgcaccaacggcggcagggagaggcaggggacgtgggcgaccccactag

SEQ ID NO: 17854 - DNA, 78 bp, synthetic construct
  source 1..78: mol_type = other DNA; note = Synthetic coding sequence
atggcgcacgagatgatcgggactcagatagtaacagaaaggctggtcgctctgctggagtctggtactgagaagtag

SEQ ID NO: 17855 - DNA, 633 bp, synthetic construct
  source 1..633: mol_type = other DNA; note = Synthetic coding sequence
atggagaaaacggagctgattcagaaggcagtggcctacaaaaatgtcgtgggaggtagacggtccgcatggcgagtaatttctagcatcgagcagaaaacagatacctcagataagaagttacagttgatcaaagactacagggagaaagttgagtctgagctgcggtccatctgcaccactgtcctcgaattgctagacaagtatctcatcgcaaacgctacaaaccccgagagtaaggtattctaccttaaaatgaagggagactattttaggtaccttgccgaggtggcttgcggggatgaccgtaaacaaacaatcgataattcacagggagcttatcaggaggcattcgatatctcgaaaaaggaaatgcagccgacacaccccattcgcttgggactggccttgaactttagcgtgttctactacgagatcctgaataatcccgagctggcatgcacactggctaaaacggcctttgatgaggccatcgccgagctcgacaccctcaacgaagatagttacaaagacagcactctgatcatgcaactgctccgagataacctcacgctctggacatccgacagtgcaggggaggagtgtgacgctgcagagggcgcagagaattag

SEQ ID NO: 17856 - DNA, 501 bp, synthetic construct
  source 1..501: mol_type = other DNA; note = Synthetic coding sequence
atggatctgatgccattcattaacaaagcaggctgcgaatgcctcaatgaaagcgatgaacacggatttgacaattgcctgagaaaggataccacatttctggaaagtgattgtgatgaacagctgctcatcactgtggcgtttaaccagcctgtaaagctgtattctatgaagtttcaaggtcccgacaatgggcaaggcccgaaatacgtgaagatctttataaatcttcccagaagcatggatttcgaggaggctgaacggtcggagcctacccaagctctggagctgactgaggatgacataaaagaggatggaattgtgccactgaggtatgtgaaattccagaatgtaaatagcgtgacaattttcgtgcaatcaaatcagggcgaagaagaaaccaccagaatttcctacttcacctttatcggtacacccgtccaggctaccaacatgaacgatttcaaacgtgtggtcgggaagaaaggcgagtctcattag

SEQ ID NO: 17857 - DNA, 639 bp, synthetic construct
  source 1..639: mol_type = other DNA; note = Synthetic coding sequence
atggcagcgccggaggagcgagatttaactcaggagcagactgaaaaactgctgcagtttcaggacttaacaggaatagaaagcatggaccagtgccggcacacactggaacaacataattggaacatcgaagccgccgttcaggatcggcttaacgagcaggaaggagtgccgagcgtgttcaatcctcctccttcgagaccccttcaggtaaatacagctgaccaccgtatctacagctacgttgtatcgcgcccacaaccaagaggactgttgggctggggctattatctgattatgttgccctttcgattcacctattacacaattctggatatctttaggttcgcacttagattcatacgccccgacccacgttcccgggtcacagaccctgtgggagacatcgtaagctttatgcatagttttgaagaaaagtacggtcgtgcccaccccgtcttctaccaaggcacatacagccaggccttgaatgatgccaagcgggagttgagatttcttctcgtctatctccatggcgatgatcatcaggacagcgacgagttttgcaggaataccctttgcgctcccgaggtaatcagtctgataaacacaagttcgcattccttcctgctgctttag

SEQ ID NO: 17858 - DNA, 1371 bp, synthetic construct
  source 1..1371: mol_type = other DNA; note = Synthetic coding sequence
atggcagattccctggaatccacacccttgccatcccccgaggatagactggccaagctccatccaagcaaggagctgctggaatactatcagaagaagatggctgagtgcgaggccgagaacgaggacctgctgaagaagctggagctgtacaaggaggcctgtgaagggcaacacaagctggaatgtgacttgcagcagcgcgaggaggagatagcagagcttcagaaagccctgtcagacatgcaagtatgcctcttccaagagcgagagcacgtactgaggctgtacagcgaaaatgaccgcctcagaatccgagagctggaggacaagaagaagatccagaatctgttggcgttggtcgggacggacgccggagaggtgacctacttctgcaaagagcccccccataaagtgacgattttgcagaagacaattcaggctgtgggagaatgtgaacagtccgaatcctccgccttcaaagcggacccaaaaatttcaaagagacggcccagcagagagcgaaaagagagcagcgaacactatcagagggacatccaaacactgatcctacaggtggaagcccttcaggcccagctcggggaacagacaaaattgagccgagaacagatcgaaggactgatcgaggaccggcgcattcatctggaagagattcaagtgcaacatcagcgcaatcaaaacaagattaaggagttgaccaagaatctccaccacacgcaagaactcttatatgagtctacaaaggattttctgcagttgaggtctgagaatcagaataaagaaaaaagctggatgctggagaaggacaatctgatgtctaagatcaagcagtacagagtgcaatgcaagaaaaaagaggacaagattggcaaagtgttgcccgtcatgcacgagtcacaccacgcacagagtgaatatattaaaagtctaaaagacaagctggtccaagaaaagaagttgtccaatatgtaccaggagcagtgtatatcgttggaagaagagctggcaagaatccgcgaggaagaaggcatgcgacgagagatcttcaaagatcggactaataaaatgggaaagagactccagatcatgacgaaaagatacgaggccctcgagcggcggaggattttagaggtcgagggttttaagacagacatcaaagtgttgcggcagaaacttaaagatctggaacaaatgttatacaaagccactgtgaacgcccgcgcgaatcaggacctggccctcctgtgcgaagtgcgggacagtaataggcgggctcacaaaatccagggagagctgaaaaatctgaagtcaaaggtgtttggattggaaaacgagctgcggttatgttag

SEQ ID NO: 17859 - DNA, 183 bp, synthetic construct
  source 1..183: mol_type = other DNA; note = Synthetic coding sequence
atggacgagcaggccctgctgggcctgaacccgaatgcagattctgattttcggcagcgggcattggcgtactttgaacagctgaagatttcacctgacgcgtggcaggtttgtgcagaagccctggcccagagaacctatagcgatgaccacgtgaagttcttctgcttccaggtgctttag

SEQ ID NO: 17860 - DNA, 339 bp, synthetic construct
  source 1..339: mol_type = other DNA; note = Synthetic coding sequence
atgtcttcctccatgtggtatattatgcagtcaatacagtctaaatacagtttgtccgagcggttaatccgaaccatcgctgccattcgatccttcccccacgataacgtggaggatttgattaggggcggggcggatgtgaactgtacacacggtacacttaagcctctgcattgtgcgtgcatggtgtccgatgcggattgcgtagagttgcttctggagaagggtgcagaggtgaatgccttagacggttacaaccgaaccgccctccattacgccgccgaaaaagatgaggcttgcgtcgaagtgcttctggagtacggcgcaaatccaaattag

SEQ ID NO: 17861 - DNA, 1173 bp, synthetic construct
  source 1..1173: mol_type = other DNA; note = Synthetic coding sequence
atgtcggcagcgaaccctgagactcctaatagtaccatttctcgagaggcctccacacagtcgtcttcagctgctgcttcacagggctgggtgcttcctgaaggaaagattgtacccaacaccgtgtttgtagggggtatcgacgctagaatggatgaaacagaaattgggtcttgtttcgggagatatggcagcgtgaaggaggtaaaaatcattactaatcgtaccggagtgagcaagggttacggcttcgtatccttcgttaatgacgtcgacgtgcagaagatagtaggctcacagatccactttcacggcaagaaactcaaactcgggcctgccattagaaaacagaagctctgcgcacgccacgttcagccgcgtcccttggtggttaaccctcccccgccgcctcagtttcagaacgtgtggaggaaccccaataccgagacatacttgcagccacagatcaccccaaaccctgtcacccaacacgttcaagcctacagcgcataccctcattcaccaggtcaggtcattactggctgccaattgctggtgtataattaccaggagtatcccacttacccagatagcgcattccaggtaaccactggatatcagctgcccgtgtacaattatcagccattcccagcttatcctcgctccccgtttcaggtgaccgccggttatcagctgcccgtgtataattaccaggcattcccagcctacccaaattcccctttccaggtggcaacaggataccagtttcccgtctacaattaccagccttttcctgcatatccctcatcccctttccaagttaccgccggttatcagctgccagtctacaattaccaggcattccccgcctacccaaactccccatttcaggtcgcgaccggctatcaatttcccgtttataattatcaggcgttccccgcataccctaacagtccagtccaggtgaccaccggatatcagcttccagtctacaactatcaggccttcccggcctaccctaactcggcagtccaagtgactacaggctatcagttccacgtatataactatcaaatgcccccacagtgccctgtgggcgagcagaggcgcaatctgtggactgaggcctataagtggtggtacctggtttgcctcatccaacgccgagactag

SEQ ID NO: 17862 - DNA, 1335 bp, synthetic construct
  source 1..1335: mol_type = other DNA; note = Synthetic coding sequence
atgcgtgaaatagtgcacctccaggcaggacaatgcggaaatcagattggcgccaaattttgggaagttatttcagacgaacacgggatcgaccccactggaacttaccacggggactcagacctccagctggaaaggattaatgtttattataacgaggccacaggcggtaattacgtcccacgcgccgtcctggtggacctggaaccaggcaccatggattcggtacggtcaggcccctttggtcagatctttaggccagataacttcgtgttcgggcagagcggagctggtaataattgggctaagggccactataccgagggcgccgaactggtcgacgcagttcttgatgtagtgcgaaaagaggctgagtcatgtgattgcttgcaggggttccaactgacacattccctggggggcggaacagggagcggaatgggcaccctgttgatttcaaagatccgagaagagtttccggataggattatgaataccttttctgtggtgcccagcccgaaagtctccgacaccgtcgtcgagccatataacgctacactgagcgtccatcagctggttgaaaacaccgacgaaacctactgcatcgataacgaggccctgtatgatatatgctttaggaccctcaagctgacaacccccacatatggggacctcaaccacttggtcagtgctaccatgagcggcgtgacaacttgtttgcgctttccaggacagttaaatgccgatcttaggaagttggcagtgaatatggttccattcccacggctacatttctttatgcctggattcgctcctttgaccagccggggatcacaacagtatcgcgctctgacagtcccagagctcacacagcagatgtttgacgccaaaaacatgatggcagcctgcgaccctcggcatggtaggtacctgacagtggcagcggtgtttcgcggaaggatgtctatgaaagaagtggatgagcagatgctctcagttcaatcaaaaaactcatcctatttcgtggagtggattccgaacaacgtcaagaccgcagtttgcgacatcccaccaagagggctgaagatggccgctacctttatcggcaatagcaccgcaatacaggaattattcaagcggatttccgagcaattcacggctatgttcagacggaaggcctttctgcactggtacaccggcgaaggaatggatgaaatggagttcaccgaagcagagtccaacatgaatgaccttgtgagtgaatatcagcagtaccaggacgccacagcagaagagggcgaattcgaagaggaggcggaggaggaggtcgcatag

SEQ ID NO: 17863 - DNA, 495 bp, synthetic construct
  source 1..495: mol_type = other DNA; note = Synthetic coding sequence
atggtcaactccgttgtattcttcgacatcaccgtggatggaaagcctctgggcagaataagcatcaagctgttcgctgacaagatcctgaagacagccgagaacttcagagctttatccactggagagaaaggctttaggtataagggctcctgttttcaccggatcatacccggttttatgtgccagggcggcgacttcacaagacacaatggaacaggagataaaagcatatacggggagaagtttgatgatgaaaacttgataagaaaacacaccggctccgggattctgtctatggctaatgcaggccccaacactaacggatcccaatttttcatatgtgcagccaagaccgagtggctcgacggcaagcacgtggcttttggtaaggtcaaagaacgtgtcaatatcgtggaagccatggagcacttcgggtatcggaatagcaaaaccagcaagaaaattaccatagcggactgcggccagttttag

SEQ ID NO: 17864 - DNA, 3252 bp, synthetic construct
  source 1..3252: mol_type = other DNA; note = Synthetic coding sequence
atgtcccagacacaagattacgaatgtcggagtcacaacgtcgacctgccggagagccggattcctggatcaaacacaaggttggagtgggtcgaaatcatcgagccacgcacccgcgagaggatgtatgccaatctcgttaccggagaatgcgtatgggatccacccgcaggtgtccggatcaagcgcacaagcgagaaccagtggtgggaactgttcgaccctaacaccagccggttttactactacaacgcaagtacgcagcgcaccgtctggcacaggccccaaggatgcgacattattcccctagctaagctccaaaccctgaaacaaaatacggaaagccccagggcctcggccgaatctagccccggcaggggatctagtgtgtcaagggaaggctccacgagttcttctctggagcccgagcctgataccgaaaaggcacaagagctgcccgctcgagctggccggcctgcggcattcggcaccgtgaaggaggactcagggtcttcttccccccctggggtttttttagagaaagattacgagatatatagagactattcagccgacggccagctgttacattatagaaccagctctctccgatggaactccggcgcaaaagaaagaatgcttatcaaggtagccgatcgcgagccttcttttctggccgctcaggggaacgggtatgctccagatggtcctcccggcgtcaggagtcgacgacccagcggctcccagcatagccccagtctgcagacctttgctcctgaggcagatggtacaattttctttccagagaggaggcctagccccttcctgaagcgagctgaactgcctggctccagctctccattgctggcacagcctcggaagcccagcggcgactcccagcccagcagccctcgttacggttatgagcccccactttatgaagagcctcctgtagaatatcaagcacccatttacgatgaaccccccatggacgtccagttcgaggctgggggaggctaccaggctgggtccccacagcggtctccaggcagaaaacctaggcctttcttacagcctaacaaacagggtccaccctctccctgccagcagcttgttctgactaaacagaagtgcccggaaagattcctctctctagaatatagtcccgctggcaaggagtatgttcgtcagctggtgtacgtggaacaagccggaagctccccaaaactcagagctggaccccggcacaagtacgcgccaaaccccggcggcggctcctactcgctccagccctctccctgcttgctccgggaccagcggctgggcgtcaagtcaggagattatagtactatggaggggcccgagctccggcattcgcagcccccgacccctcttcctcaggcacaggaggacgcaatgagctggtcatcacagcaagatacattgtccagcacggggtactcgccgggtacaagaaagcgtaagtcgcgaaaaccttctctgtgccaggctacaagtgcaacaccgactgaagggccaggagacctacttgttgaacagccactagccgaggagcagccgccatgtgggacctccctggcacctgtgaagcgggcggagggggaggctgaaggcgcgcggggggccgccgagcctttcctggctcaggccaggctggcttgggaggcccagcaagcccactttcacatgaagcagcgctcttcttgggacagccagcaagatggatctggttacgagtccgacggcgcattaccgttacccatgccaggaccggttgtgcgtgccttctcagaggatgaggccctggcccagcaggaaaatcggcactggcgtagaggcacctttgagaaactcggcttcccccaaatcctccttgagaaatcagtgagtgtccagacaaatttggcatctcctgagccttacctccacccaagtcagtcagaggatcttgctgcctgcgctcagttcgagtctagtagacagtcaagaagcggcgtgccctcctccagctgcgtgttccctaccttcaccctgcgaaaacctagctcggaaaccgatattgagaactgggccagcaagcactttaacaaacacacccagggcctatttaggagaaaagtgagcattgcaaatatgctggcctggagctccgaatcaattaaaaagccaatgatcgtgacctctgaccgccacgttaagaaagaggcgtgcgagcttttcaaactcatccaaatgtacatgggagaccgtcgcgctaaggccgaccccctgcacgtcgcgctcgaagtagctacgaaagggtggtcagtacagggactgagggatgagctttacatccagctgtgccggcaaaccaccgagaactttcgcctggagagcctggcccgaggttgggagcttatggccatttgcctggctttctttccaccaacgcccaagtttcacagttatctcgaagggtacatctaccgccatatggatcctgtgaatgataccaaaggggtggccatcagtacttatgccaagtactgttatcacaagctgcagaaagccgccctaacgggtgctaagaaaggcctgaagaaacccaacgttgaagagatcagacatgccaaaaatgccgtgttttctccttcgatgttcggcagtgccttgcaagaagtcatgggcatgcaaagggaaagatacccggagcgacagctgccatgggtacaaaccaggttgagcgaagaagtcctggccttgaatggagatcagactgaaggcatttttagggtgccaggcgacatcgacgaggtgaacgctcttaaactgcaggtggaccagtggaaagtgccaaccggactggaggatccccatgtgcccgcttcactgctcaaactgtggtaccgggagctggaggaaccactgatccctcatgagttttatgaacaatgtatagcccattacgattcacctgaagctgccgtggccgtagtccatgcacttccccgtataaacagaatggtgctgtgttatctaattagattcctgcaggtcttcgtccaaccagcaaatgtggcagtgactaagatggacgtaagtaatttagctatggtgatggcacctaattgcctgcggtgccagagtgacgacccccgggtcatatttgaaaatacccgcaaagagatgtccttcctgagagtcctgattcagcacctggatacctcatttatggagggcgttttatag

SEQ ID NO: 17865 - DNA, 1503 bp, synthetic construct
  source 1..1503: mol_type = other DNA; note = Synthetic coding sequence
atggcagccgtgaagaccttgaatcccaaagggactatgaagatgttagtgtcaggagctggtgacatcaagctgacaaaagatgggaatgtgctgctgcacgagatgcaaattcagcaccctaccgcttctctgatcgctaaagtggctactgcgcaggacgacatcaccggggatgggacaacctctaatgttcttattattggggagttattgaagcaggccgatctctacattagcgaagggctccacccccgaataattaccgagggcttcgaggcagccaaggagaaggcacttcaatttctggaagaagtcaaagtcagccgggaaatggacagggaaaccctcattgatgtagccaggacgtccctgcggactaaagtccacgctgagctggccgacgttctcaccgaagctgtagtggactcgatcctggcaatcaagaagcaggacgagccaatcgacctgttcatgattgaaataatggagatgaaacacaaatcagaaaccgacacaagtctgatcagggggctcgtgctagaccacggcgcaagacaccccgatatgaaaaagagggttgaagacgcctacattctaacatgcaatgtcagtttggagtatgaaaaaacagaagtgaactcagggttcttttataagtctgccgaggagcgagagaagctggtgaaggctgaacgcaagttcatcgaggatagggtgaagaaaataatcgagctgaaaagaaaggtgtgcggcgactcagataagggatttgtcgtgataaatcagaagggcatagatcctttctcactcgatgctctgtctaaggagggaatagtggccctgaggcgtgcaaagcggcggaatatggagcggctgacattagcttgcggaggcgtggcgcttaactccttcgacgacctcagccccgactgcctcggacatgctgggcttgtgtacgaatataccttgggtgaagagaaatttaccttcatcgagaagtgtaataatccccgctcggtcaccctcctgattaaagggcctaataagcataccttaacacagattaaagacgcagtacgggatggcctgcgagccgtcaagaacgccattgacgacgggtgcgtagtcccaggcgcaggcgctgtggaagtggctatggcagaagccctgatcaaacacaagccctccgtgaaaggccgggcacaacttggcgtccaagcttttgccgatgctttactcataatccccaaagtgttagctcagaatagtgggtttgacctgcaggagacactcgtgaagattcaagccgagcatagcgagagcgggcagctagtgggagtggacctgaatacaggcgagcctatggtggccgccgaagtcggcgtttgggataattactgcgtgaaaaagcagcttcttcacagctgcacagtgatcgcaacgaacattctgctggtcgacgaaatcatgagggcaggtatgagttcattgaaagggtag

SEQ ID NO: 17866 - DNA, 1542 bp, synthetic construct
  source 1..1542: mol_type = other DNA; note = Synthetic coding sequence
atgtgggatgtctgcatggaacgaggccacagggacctcgagcagtttgaaagggttcacagatacatctctgatcagcttttcacaaactttaaggaacgaaccgagcgtcttgtcattagtcccctcaatcagctgctctccatgtttaccgggccccacaaactggtgcaaaagcggttcgacaagctgttagatttctataattgtacagagcgtgctgaaaagcttaaagacaaaaaaaccttggaagagctgcagagtgcaagaaataattacgaggcccttaatgctcagctcctcgacgaactgccaaagtttcaccagtatgcacagggcctgtttactaattgcgtgcacgggtacgcggaggcacattgtgactttgtccatcaagctctggagcagctgaaaccactgctttctctgctcaaagttgcgggacgcgaaggcaatctgatcgcgatatttcacgaggagcactcgagagttctgcagcagcttcaggtttttaccttttttcccgaatctctgcctgcaacaaaaaaacctttcgagagaaagacaatcgatagacaatctgcgcgcaaacccttgctcggcttaccatcttacatgttgcaatctgaggagttgcgggcgagcctccttgctcggtatcctcccgaaaaattgttccaagctgaacggaacttcaacgccgcacaggacctcgatgtatcattgctagagggggacctagtgggggtgatcaagaagaaggatccaatggggagtcagaatagatggttgattgacaatggggtgacaaaaggtttcgtgtactcttctttcctaaagccttataacccccgccggtcacactccgacgcttcggttggcagtcactcatcgacagaatctgagcatggatcctcaagtccgcggttccctagacagaacagtggctctactttgacattcaacccttcctctatggcagtaagcttcactagcggcagctgtcagaagcagccccaggacgctagcccgcccccaaaagaatgtgatcaaggaacccttagtgccagcctgaatccaagcaatagtgaatcctctccttcgcgatgcccttcagaccctgacagcacctctcagccaagaagcggggactcagctgatgtcgcccgagatgtcaagcagcctacagcgacacctcgatcatatcgcaactttagacacccagaaatcgtggggtacagcgtgcctgggagaaatgggcagtcgcaggatttggttaagggctgtgcccgaaccgcacaggccccagaagaccggagcacagaacctgacggatcagaagccgaaggaaatcaagtttattttgcagtgtatacctttaaggctagaaatcccaatgagctgtcagtgtctgccaatcaaaagctgaagatcctggagtttaaggacgtgacgggcaacactgagtggtggctggcagaagtaaacggtaaaaagggatacgtgccctcaaattatataaggaagactgagtacacgtag

SEQ ID NO: 17867 - DNA, 153 bp, synthetic construct
  source 1..153: mol_type = other DNA; note = Synthetic coding sequence
atgatgcagaatgtccacttggcacctgagaccgatgaggacgatctctactcggggtataatgactataatcctatctacgacattgaggaattagagaacgatgcggctttccagcaggctgtgcgaacatctcacggaaggagaccatag

SEQ ID NO: 17868 - DNA, 4317 bp, synthetic construct
  source 1..4317: mol_type = other DNA; note = Synthetic coding sequence
atgagcatgctgaaacccagtgggcttaaggctcctacaaagatcctgaagcctgggtcaactgccttgaaaactcccacagccgtcgtggcgcctgtcgagaaaacaatttcgagcgaaaaagcttcttcaacccctagttccgaaacccaggaagagttcgtggacgacttcagggttggagaaagagtctgggtgaatggaaacaaaccaggctttatccagttcctgggcgagacgcagtttgctccaggacagtgggctggtatcgtgctcgatgaaccaataggaaagaatgacggttcagtggctggcgtgaggtactttcagtgtgaacctcttaagggaattttcacccgccctagcaagctgacaagaaaggtccaggccgaagacgaggccaacggcctgcagacaactcctgcttctcgcgcaacctcgcctttatgtacaagtactgcttcgatggttagcagctccccctccactccatcaaacattcctcagaagccgagtcaaccagccgcaaaggagccttcggccacaccccctattagcaacctaaccaagaccgccagtgaatccatctccaatctgtccgaggcaggtagtatcaagaaaggcgaacgggagcttaagatcggagacagagttctcgtcggtggcactaaagcgggcgtggtgcgcttcttgggcgagacagacttcgctaagggggagtggtgtggcgtggagttggacgaaccgctcggtaagaatgatggggccgtggccggaactagatatttccaatgccagccaaaatacgggttgttcgcccctgtgcacaaggttacgaaaatcggctttccctccacaacgcccgccaaggcaaaagcaaacgccgtcagacgcgtcatggccacaactagcgcatccctgaaaagatctccctcggctagctctctatcttcgatgtcctcagtggccagctccgtgagttccaggcccagtcggaccgggctgctgacagaaacctcctctcgatacgcgcggaagattagtggcacaacagccctgcaggaggcccttaaggagaaacagcagcatatcgaacagctgctggcggagcgcgacttagagagggcagaagtggcaaaagctacgtctcacgtcggggagattgagcaggaacttgcgttggccagggatgggcacgaccagcatgtactggagctggaggccaagatggatcagcttagaactatggtcgaggcagctgatcgcgaaaaagtagaactgcttaaccagctggaagaggagaaaagaaaagtcgaagatctacagtttcgagtggaggaggaaagcataactaagggcgacctggagcagaagagtcaaatttcagaagaccctgaaaatacccagacaaaacttgagcacgcccggattaaggagttagagcagtcactgttgtttgagaagaccaaggcggataaactgcagcgcgaactggaggatactcgcgtagcgaccgtctccgagaagtcccgcattatggaactcgagaaggatctggcacttagggttcaggaagtggcggagctcaggcggaggctagagtcaaataagccagccggtgacgtcgacatgtctctatctctgctgcaggagatttcttctctacaggaaaaactggaggtaacaagaaccgatcaccaaagagagattacttctttgaaggagcatttcggagcaagggaggaaactcaccagaaagaaatcaaagccctgtacacagcaaccgaaaaactgagcaaagaaaatgaaagtttgaaatccaaactggagcacgccaataaggagaactcagatgtgatcgctctgtggaagagcaaacttgagaccgcaatcgcctctcaccagcaagcgatggaggagctgaaggtttccttcagcaaaggactaggaactgaaacagctgagtttgccgaactcaaaacccaaattgaaaaaatgaggcttgattatcagcacgagatcgagaacctgcagaatcagcaggactccgaacgggcggcccacgcgaaggagatggaagccctccgggcaaagttaatgaaggtgataaaagagaaggagaattcactcgaagctattaggtcaaagttagacaaagcagaggatcagcacctggtggagatggaggatactctcaacaagttgcaggaagcagagatcaaggtgaaagaactcgaagtgttgcaggccaagtgcaatgaacagacaaaggttatcgataactttacctctcagcttaaggcaaccgaggagaagctcttagatctggatgccctgcgtaaagcttctagtgaaggaaagtccgagatgaagaaactgcggcagcagctggaggcagcggagaagcagattaagcatttggagattgagaagaacgctgagagcagtaaagcctcgtctattactcgtgaactccaagggcgcgaactgaagttaactaaccttcaggaaaatttgagcgaggtttcacaggtgaaggagaccttagagaaggaattacagatactcaaggagaagtttgctgaggcctccgaggaagcagtgtccgtgcagaggtcgatgcaggagaccgtgaacaaacttcaccaaaaggaggagcagtttaacatgctatccagtgacctcgaaaagttgagagagaacctggctgacatggaggccaaatttcgcgaaaaagatgaacgtgaggagcagctcattaaggccaaagaaaagctggagaacgacattgccgagattatgaagatgtcaggcgacaattcttctcagctgactaagatgaatgacgagctccgcttgaaagagagagatgtcgaggaactgcaacttaagctaactaaagccaacgagaatgcttcttttttgcaaaaaagcattgaggacatgaccgtaaaagctgagcagtcccagcaggaggcagccaaaaagcatgaagaagaaaagaaagaacttgagaggaagctgagcgacttggagaaaaagatggagacaagccataatcagtgccaagaactcaaggctagatacgaaagagccacgtcagagaccaagacgaagcatgaagagatcctgcagaacctgcagaagaccttgttggatactgaagacaagctcaaaggtgcccgggaggagaatagcggtctgctgcaggaattggaggagttacggaaacaggccgacaaagccaaagccgcccagacagcagaggacgccatgcagatcatggagcagatgacaaaggagaagactgaaacactggcatcactcgaagacaccaaacagactaacgcaaagctccagaatgaattagacaccctgaaggaaaataatctgaaaaacgtggaggaattgaacaagtcaaaggagctgctgactgtagagaaccagaagatggaagaattccggaaagaaattgagacactgaaacaggccgctgcgcagaagtctcagcaattgtctgctcttcaggaagagaatgtaaaattggcagaggaactcggcagaagcagagacgaggtaacttctcaccagaagctggaggaggaacggtctgtgctcaacaatcagctcctcgagatgaagaaacgggaatctaaattcataaaagatgccgacgaggaaaaggcgagcctgcaaaagtccattagcattacatcagcactccttacagagaaggacgccgagctggagaagttgaggaatgaggtgaccgtgctccgcggagagaacgcttctgctaaatccctccatagcgttgtgcagaccctcgaatcagataaagtgaaactggaacttaaggttaagaatttagaactgcagctcaaagagaacaagaggcagctcagcagttcttctggaaacaccgatacccaggctgacgaagatgagcgtgcacaggagagccagatcgatttcttgaattccgtcattgtggatctgcagcgaaaaaatcaggacttaaagatgaaggtggaaatgatgtcagaagcagctctgaacgggaacggggatgatctcaataattacgatagtgatgatcaggaaaagcagagcaaaaagaaacctagactattctgcgatatttgtgactgcttcgatttgcacgatacagaggactgtccgacccaggctcagatgtctgaggatccaccacacagcactcatcatgggagtaggggcgaggagagaccatactgcgaaatttgcgagatgtttggacattgggctaccaactgtaacgacgatgagacattttag

SEQ ID NO: 17869 - DNA, 636 bp, synthetic construct
  source 1..636: mol_type = other DNA; note = Synthetic coding sequence
atggcctttgcggatagccacttgtggaaactcctggaccgtcatgctaacacgatccggctctttgtgctcctgcccgaacagtcccccgtgagctacagtaagcgcaccgcataccaaaaggcgggcggcgactccgggaatgttgacgatgactgcgaaagagtcaagggcccagtgggtagtttgaaatcagtggaggcgattctggaggagagcaccgagaagctgaagagcctaagcttgcaacagcagcaagatggcgacaatggcgattcctccaaaagtactgagaccagcgacttcgaaaatattgagtcaccattgaacgagagagacagctccgcttcggtggacaatcgggagctcgagcagcatatccagacatctgaccccgagaattttcagtctgaagagagaagtgatagtgacgtgaataatgacaggagtaccagcagcgtcgattctgatatcctgtcatcgagtcatagcagcgatacattgtgcaatgccgataatgcccagatccctctggctaatggattggattcccactccatcacctcttctcgcaggactaaagccaacagggaaaagagaaatatgggctactctaggagacgcctctggaattag

SEQ ID NO: 17870 - DNA, 2136 bp, synthetic construct
  source 1..2136: mol_type = other DNA; note = Synthetic coding sequence
atgctcgcctctctcaaagtgaagaaacaagagcttgctaacagctccgacgctacactgccagacagacctctgtcaccccccctgacagcaccaccgacgatgaaaagctccgagttttttgagatgctggagaagatgcaaggaattaagctggaggagcagaagccaggcccgcaaaaaaacaaagatgactacatcccttaccccagcatcgatgaggttgtcgagaaaggaggtccttatccacaagtaattctgccacagttcggcgggtattggatagaggatcctgaaaatgtcggaactccgacttctctggggtcttcaatatgtgaggaggaagaggaagacaacctgtcacctaacacgtttgggtataagctggagtgcaaaggagaggcaagagcctaccggcgccacttcctaggcaaagaccatttaaatttctattgtaccggttcctcgttgggaaacctgatattatctgtcaaatgtgaagaggcggagggcattgaatacttaagagtaattcttcgctctaagctgaaaactgtgcacgaaaggatccccctggctggactgagcaaacttccctctgtccctcagattgccaaggccttctgtgatgatgccgtcggtctgaggtttaaccctgtcctatacccgaaagcatcacaaatgatcgtgtcttatgatgagcacgaagtgaataacaccttcaaattcggtgtgatctaccagaaggcccgccaaactctggaggaggagcttttcgggaacaacgaggaaagtccggcttttaaggagttcctcgacctcctgggagataccattactctgcaggatttcaaaggctttagaggcgggctggacgtcacccatggtcagaccggggtcgagtcagtgtacacaacattccgcgatcgggaaatcatgtttcacgtgagcacaaaactcccgttcaccgacggagatgctcagcagctccagcggaagcgacacattgggaatgatatcgttgccatcatttttcaagaggagaataccccattcgtacctgacatgatcgcatccaattttctccatgcttacattgtcgtgcaggtggaaacccctgggacagagacaccctcctataaggtcagcgtgactgccagggaagacgtcccaacctttggcccacctctgccgtctccgcccgtcttccagaaaggccccgaatttcgagaattcctgctcacgaagctgaccaacgctgaaaacgcttgttgtaaatccgacaagttcgccaagttggaggatcgaaccagagccgctctccttgataatttgcacgatgagctacatgcccatacacaagccatgttgggcctcggcccggaggaggacaagttcgaaaacggtgggcatggcggcttcttggagtcgttcaaacgggcaatccgagttaggtctcacagtatggaaaccatggtgggaggtcaaaaaaagagccactcgggcgggatcccaggatcactttcgggcggaatctcccacaactctatggaggtaacgaaaaccaccttctcccccccagttgtggccgcaactgtgaagaatcagagtaggtctcctatcaagaggagatctggcctgttccctcggttacatacggggagcgaggggcaaggcgactctcgggccagatgtgactctacctcctcaactccgaaaacacctgacgggggacactctagccaggagattaagagcgagactagttctaacccgtcttcgccagaaatatgccctaataaagagaagccattcatgaagttaaaggagaatggacgggctatctctcgttcaagtagctctacatcctctgtatcgagtaccgcaggcgagggagaagctatggaggagggcgacagcggagggagccagccctctaccacaagcccctttaaacaagaggtgtttgtctacagtccaagcccttcgtccgaaagccccagccttggagcggccgccacacccattattatgagcaggtctccaacagatgcgaagtctagaaacagcccaaggtccaatttgaagttccgtttcgacaaactgagccacgccagttcaggcgccggacactag

SEQ ID NO: 17871 - DNA, 1089 bp, synthetic construct
  source 1..1089: mol_type = other DNA; note = Synthetic coding sequence
atggatggcctcgacgacgtggaaaattcaatgctctactataaccaagcagtcatcctttaccacctgagacagtacactgaagccatctctgttggcgagaagctgtatcagtttatcgagcccttcgaggagaaatttgctcaggccgtgtgcttcctattggtcgacctatatattctaacctaccaagccgaaaaagcactgcatctactggcagtgttggagaagatgatatctcaggggaataacaacaaaaatggtaagaacgagacgggaaataataataacaaagatgggtctaaccataaggccgagagtggcgctttgattgaggctgctaaatctaaaatccatcagtataaggtgcgggcttatatacagatgaaaagcctaaaggcttgcaaacgcgagattaaatcggtgatgaatactgcaggcaactccgcaccctccctgtttttgaaatcaaatttcgagtacttacgggggaattataggaaggcagttaagcttctgaattcctccaatatcgcagagcatcccggcttcatgaagaccggcgagtgcctacgctgtatgttctggaataaccttggctgcattcacttcgccatgtcgaaacataacctgggcattttctattttaaaaaggccctccaggagaatgacaacgtgtgtgctcagttatctgctggctccaccgatccaggcaagaaatttagtggcagacctatgtgcacccttctgactaacaagcgctatgagttgctgtacaactgtgggatccaactcctgcatatcggcaggcctctggctgcctttgaatgcttaattgaagctgtacaggtataccatgctaaccctagattatggctgagactggccgagtgctgcatcgccgccaacaagggaacctctgagcaggagacaaagggactcccctccaaaaagggaattgtccagagtattgttggccagggctaccataggaagattgtactagcgagccaaagcattcagaacactgtgtataatgacggccagagcagcgccatcccagtggccaaggccggaaaatgggggtag

SEQ ID NO: 17872 - DNA, 1821 bp, synthetic construct
  source 1..1821: mol_type = other DNA; note = Synthetic coding sequence
atgtgtggagctggattcgggcattttgagtggctggccggcggcggtgctgggcaagacgtaggacgaagctgtattctggtgagcatcgccggaaaaaatgtcatgcttgattgtggaatgcatatgggttttaatgatgatcgaagatttcccgacttcagctatattacacagaatgggaggctgaccgacttcctggattgcgtgatcatctcacattttcacctagatcactgtggcgcccttccttatttcagcgagatggtggggtacgatggccctatctatatgactcacccaacccaggctatctgccctattctcctggaggactacagaaaaatagctgtggataagaaaggtgaagccaacttctttaccagccagatgataaaggactgcatgaaaaaggtcgttgcagtgcacctacaccaaactgtgcaagtagacgacgagttggagataaaggcctactatgctggccatgtactgggggccgccatgtttcagattaaagtcgggagcgagtctgtagtgtataccggtgactataatatgacccccgatcggcaccttggtgccgcgtggatcgacaagtgcaggcctaatctgttgatcaccgaatccacatatgccacaactatccgcgactctaagagatgccgtgaacgcgattttctgaaaaaagtgcacgagaccgttgagcggggcgggaaagtcttaatccctgtgtttgctttaggcagggcccaagaactttgcatcctgctcgaaaccttttgggaacgaatgaatctgaaggttcctatctatttctcaacaggtttgacggaaaaggctaatcattactacaaactcttcattccatggaccaatcagaagatacggaagacgtttgtgcagcgtaacatgttcgagttcaagcatataaaggcttttgatagggcgtttgcagacaaccctgggccaatggtggttttcgctacacccggcatgctgcatgcgggtcagtcactccagatcttccgaaaatgggcagggaacgagaagaacatggtaattatgcctggctactgcgtccaaggcactgtggggcacaagattttgtctggccaaagaaagctggagatggagggaagacaggtgttagaagtcaaaatgcaggtcgaatatatgtctttctccgctcacgccgatgccaaggggatcatgcaacttgtaggacaagcggagcccgaaagtgtcctcctagtccatggtgaggcgaagaagatggagttccttaagcagaaaatcgagcaagagttgagggtgaattgctatatgcccgctaatggggagaccgttactcttcctacctcccctagcatccccgtgggaatctccctgggcctgctgaagcgcgaaatggcccagggtctgcttccagaggctaaaaagccacgcctcttgcatgggacgctgattatgaaagacagcaatttcagattagtatcaagtgagcaggctttgaaggaattaggcctggccgagcatcaactccggttcacctgcagagtgcacttgcacgatactaggaaagaacaagagaccgcccttagggtgtacagccacctgaaaagcgtattgaaagatcattgcgttcaacacctcccggatggtagcgtcacggtggagagcgtactgttgcaagccgcagcaccaagtgaagacccaggcacaaaagttctgttagtctcctggacataccaggacgaagagctaggctctttcctgacctctttgctgaagaaggggcttccgcaggccccctcctag

SEQ ID NO: 17873 - DNA, 399 bp, synthetic construct
  source 1..399: mol_type = other DNA; note = Synthetic coding sequence
atgaaaaaggtccggctcaaagaactggagtcacgactgcagcaggtggacgggttcgagaagccaaagctgttgctggagcagtacccaactcgtccgcatatcgctgcgtgtatgctctacacaattcacaatacttatgatgatatcgaaaataaagtggtagctgacctggggtgtggatgtggcgtattgtcaattgggactgccatgctcggagcaggcctgtgtgttggatttgatatcgatgaggatgccctggagatttttaaccgcaatgccgaagaatttgagctccagatattgacatggtttaacgtgatgtgcgcctattacctgacagaatgcccaagccactccattcagaattatgagagtagcctatgggaccagaagtag

SEQ ID NO: 17874 - DNA, 1371 bp, synthetic construct
  source 1..1371: mol_type = other DNA; note = Synthetic coding sequence
atgatggtaggcgatggcaccactagtgtgactctgctggccgcagagtttcttaagcaggtgaagccctacgtggaggagggccttcatcctcagataataatccgagcttttcgcaccgcgactcagctcgccgttaacaaaatcaaggagatcgccgtcactgtgaagaaggcggacaaggtcgaacagcggaagctccttgagaagtgcgccatgacggcgctgtcctctaagctcatcagccagcagaaggcttttttcgccaagatggtcgttgatgctgtcatgatgctggatgatctgttacagttaaaaatgattggaataaaaaaggtgcagggtggtgctcttgaagattcgcagctggtggccggagtggcctttaagaagactttttcatatgcaggtttcgagatgcagccaaagaagtaccataatcctaaaatcgcgttactgaacgtggagttggaactgaaggccgagaaagataacgcggagatcagggtccatactgtggaggactaccaggctattgtggacgccgagtggaatatcctctatgataagctggaaaaaattcaccatagcggggctaaggtggtactgtctaaattacctatcggcgacgtcgctactcaatattttgcagatcgtgatatgttctgtgcagggcgagtgccagaggaggatctgaaacgaacaatgatggcctgcggtgggagcattcagacaagtgttaacgcgctttctgccgacgtgttgggtcggtgccaggtgttcgaagaaacccagataggcggtgagcgctataatttcttcacaggctgccccaaagctaagacctgtacatttatactgaggggaggagcagagcagtttatggaggaaactgaaaggtctctccacgacgcgataatgatcgtgcgtagagccattaagaacgatagtgtcgtggccgggggaggagccattgaaatggaactgagtaaatatttgcgggactactctcgcaccattcctggaaaacaacagcttctgataggtgcgtatgcgaaggcactcgaaataattcccagacagttgtgtgacaatgcaggcttcgatgcaacgaacatcctgaacaagctcagagcacgccatgctcaaggcggcacatggtacggcgtggatataaataacgaggacattgcggataactttgaggcatttgtgtgggaacccgcgatggtcagaatcaatgccctcactgctgcatccgaggctgcctgcctcattgtctccgtcgacgaaacaatcaaaaatccccggtcgacagttgacgctcctacggcggcaggccgcggaaggggtaggggacgcccccattag

SEQ ID NO: 17875 - DNA, 2520 bp, synthetic construct
  source 1..2520: mol_type = other DNA; note = Synthetic coding sequence
atggacggtaaggctgacgttaagagcctgatggccaaatataacactggagggaatcccacagaggatgtgagcgtgaatagtagaccctttagggtgacgggtccaaatagcagcagcggaatccaggcccggaagaatctgttcaataaccagggcaatgcctcacctccagccgggccatcaaacgtgccgaagttcggctccccaaagccccctgttgcagtgaaaccgagctctgaagagaaaccggataaggagcccaaaccccctttcctgaagccgaccggagcaggccagcgatttggaactccagctagtctaacaaccagagatccagaagccaaagtggggttcttaaagccagtcggccccaagcccataaacttgcctaaagaggatagtaagcctacatttccctggcctcccggcaacaaaccctctctgcatagcgtgaaccaggaccacgatctgaagcctctcggacctaaatctggacctactcctcctacatccgagaacgagcaaaagcaggcatttcccaagcttactggagtcaagggaaagttcatgtcggcatctcaagatctggaaccgaagcctctgtttccaaagcctgcctttgggcagaagccaccgctgagtaccgagaactcacacgaagatgagtccccaatgaagaacgtgtcctcatctaaaggttctccggcacctctgggagtccggagcaaaagcggaccgttaaagccggccagagaagacagcgaaaacaaggatcacgccggagagatctcaagtctacccttccccggggtggtattgaaacctgcagccagccgcggcggacccggcctctcaaagaacggcgaggagaagaaggaggacagaaagatcgatgccgcaaagaacacctttcagagcaaaatcaaccaggaggaattagcgtcgggcactccaccagccagatttcccaaggccccgtccaaattaacggtgggaggaccttggggacaatcacaagaaaaggaaaagggggacaagaacagtgccacaccaaagcaaaaaccactgccacccctgttcactctcggtccgcccccacccaagcccaatagacccccaaacgtcgacctcactaagttccataagacttcaagtggaaatagtaccagcaaaggccagactagttatagcaccactagtttacctccaccccccccatcacaccccgcgtcacagccacccctgccagcatctcatccgtcccaaccaccagtccccagccttccgccccggaacattaaacctccatttgatctgaaatcgcccgtcaacgaggataaccaggacggagtcacgcactccgacggtgcaggtaacctggacgaagagcaagactctgaaggagagacgtatgaggacattgaggcctcaaaggaaagggagaagaaaagggagaaggaagagaaaaaacgtctagagcttgagaaaaaagaacaaaaggagaaggaaaagaaggagcaggagatcaaaaagaagtttaaacttacgggaccaatccaggtcattcacctcgcaaaagcatgttgcgatgtgaagggcggcaagaacgaactttctttcaaacagggcgaacagatcgagatcattcggattacagacaaccccgaaggtaagtggctagggcggactgcccggggtagttatggttacatcaaaacgaccgcagtggaaattgattacgactccttaaaattgaagaaggattctctcggcgccccaagtagacctatagaggacgaccaggaagtgtacgacgatgttgcagagcaggacgatatcagtagccactcgcagagtggctccggaggcattttcccaccaccccctgatgatgacatttatgacggtattgaagaggaggacgccgacgatgggtcaacattgcaagtgcaggagaaaagtaatacttggtcatggggcatcctgaagatgctaaaaggcaaagatgatcggaagaaatctatccgcgagaaaccaaaagtgagtgacagcgacaataatgaagggtcctcttttcccgccccgccaaagcagctcgacatgggcgacgaagtgtacgacgacgtggacacttccgatttccctgtctctagtgccgagatgagtcagggaacaaacgttgggaaagcaaagacggaggagaaggatctaaagaaactgaagaagcaggaaaaagaagaaaaagactttcgaaagaagttcaaatatgatggggagattagggtcctctatagcacgaaagtgacaacaagcatcacctctaagaaatggggaactcgcgatttgcaggtaaaacctggggagtctttggaagttattcagacaacggacgataccaaagtgctatgtcgcaacgaagagggcaagtacggctacgtcctgcggtcttacctggccgataacgatggcgagatttacgacgatatagccgacgggtgcatttatgacaacgactag

SEQ ID NO: 17876 - DNA, 1017 bp, synthetic construct
  source 1..1017: mol_type = other DNA; note = Synthetic coding sequence
atgggtcatcggtacattgaggtatttaaatcacacaggacggaaatggactgggtgctgaagcactccgggcccaactccgcggacagcgccaacgacggatttgtgcgcctcaggggactcccctttggatgtactaaggaagaaatcgtccaattctttagtggtctggaaatcgttcccaacggcataaccctgcctgtcgacccggagggcaagatcaccggagaggcttttgtgcagtttgcatctcaggaacttgcggaaaaagctctgggcaagcacaaggagaggataggacacagatatatcgaggtcttcaagtcatctcaggaggaagttagatcatattccgaccctcccctgaagtttatgagtgtgcagagaccaggaccatacgacaggcccggcaccgcccgtcgttacattggaattgtaaagcaggctggactggaaaggatgcgccccggagcttactctactggatatggcggttacgaggaatacagtgggctgagcgatggctatggcttcactacggacctgttcgggcgcgatttatcttattgcctttctggcatgtacgaccatcgctacggagactcagaattcacagttcagagtaccactggacactgtgtccacatgagaggattgccttataaagccaccgagaatgacatttataacttcttttctcccctgaaccctgttagggtacacatcgaaattggtccggacggacgagttacaggcgaagctgatgtcgagttcgcaacacatgaggaggctgtagcagcaatgtctaaggaccgggcaaacatgcagcatcggtatatcgagctctttctgaacagtacaactggggcctccaacggtgcatattcatcccaagtcatgcaggggatgggagtttccgcggcacaggcaacttatagcgggctcgaaagtcagagtgtttccggctgttatggagcaggctattccggacagaatagcatgggcggctacgattag

SEQ ID NO: 17877 - DNA, 1536 bp, synthetic construct
  source 1..1536: mol_type = other DNA; note = Synthetic coding sequence
atggcctccgtcgttgagtataaggggctgagggccggttatcactgcggctactgtgatagcaaagagggaaaggcatcttgcggcatgtgggcccatagcatgacagttcaggactatcaagacttgattgatcgggggtggagacgttccggtaagtacgtgtataaacccgtgatgaaccagacatgttgtccgcaatataccattagatgtcgaccgttacagttccagcccagtaagagccacaaaaaggttctgaaaaaaatgctaaaatttttagccaagggagaggtcccgaagggcagttgtgaggatgagccaatggattcaacgatggacgacgcagtggccggcgacttcgcattgatcaataaacttgatatccagtgtgatctcaaaactttaagtgacgatataaaagagtctctcgagtccgagggtaaaaacagcaagaaggaggaaccgcaagagttgttgcaatcccaggactttgtaggggaaaaactgggctcaggcgaaccttctcattccgtgaaggtgcatacagtacccaaacccggtaaaggcgcagatctgagtaagcctccatgtagaaaagctaaggaaatccgcaaagagcgcaaacggctcaagttgatgcagcagaaccctgcaggtgagttagaggggtttcaggcacaaggtcatcctccttcgctcttccccccgaaggccaaatccaaccaacccaagtcactggaagatttaattttcgaaagccttccagaaaatgcttctcataaattagaggtccgactcgtgcctgtgtctttcgaagacccagagtttaaaagttcattctcccagagcttctccttgtacgtcaagtatcaggtcgctatacatcaagacccccccgatgagtgcggcaagactgaatttacaagattcctctgctctagcccacttgaagcggagacccctccaaacggccccgattgcggctacgggtccttccaccagcagtattggttggacgggaaaatcatcgcggtgggcgttatcgacattctcccgaactgtgtttcttcagtgtacctctattacgaccccgattactccttcttgtccctcggggtttacagcgcactaagggagattgcttttacaagacagttacacgagaagacctctcagctatcctattattatatgggcttctatatccatagctgtccaaagatgaaatacaaggggcagtatcggccttctgacctcctctgcccagaaacatatgtgtgggtgccgatcgagcagtgtctgccgtctctggaaaacagcaaatactgtcggttcaatcaggatcctgaggcagtggacgaagatcggtccactgaacccgacagacttcaggtattccacaaaagagctatcatgccgtatggggtctataagaagcagcagaaagatccaagcgaagaggccgcagttctccagtatgcctcccttgtgggccagaaatgtagtgaaaggatgctattgttcagaaactag

SEQ ID NO: 17878 - DNA, 3963 bp, synthetic construct
  source 1..3963: mol_type = other DNA; note = Synthetic coding sequence
atgcaggatgactccatagaggcaagtacttcaataagtcagctgcttcgggagagctatctggctgagacccggcatagagggaacaatgaaagatctcgagccgaacccagctcgaacccatgccatttcgggtcaccatctggggccgccgaaggcggcggagggcaggacgacctcccagatctgtccgcctttttgtcccaagaggagctagacgaaagcgtaaatctagcaagacttgcgataaattacgaccctctcgaaaaggctgatgaaactcaggcgcggaagcgtctgtccccagaccagatgaaacattctcccaatctttcatttgagcccaatttttgccaggacaatcctcgcagtccaacatcctcaaaagaatctccccaggaggctaagcgacctcagtattgttcggagacacagtcgaaaaaagtctttctcaacaaggccgccgattttatcgaggaactgagctcgttgtttaagtctcactcgtccaagcgaattcgaccaagagcctgtaaaaaccataaatcgaagctagaatcacagaataaagtgatgcaagagaactctagtagcttttccgacctctcggagagaagagagcggtcatctgtgcctattccaattcccgctgacacacgggacaatgaagttaatcatgcccttgaacaacaggaagcgaaacggagagaggcagagcaggcagccagtgaggccgccggaggcgacacgactccagggtctagcccctcctctctttattacgaggagcccttaggccagcccccccgatttacacagaagctcaggagcagagaagttcctgagggtaccagggtgcagctggattgcattgtagtaggtataccgcccccacaagtgagatggtactgtgaaggtaaagagctggaaaacagccccgacatccacatcgtgcaggctggaaaccttcacagcctaaccatcgcagaggctttcgaagaggacacagggcgttactcctgctttgcctctaatatttatgggacagatagcactagtgctgagatctacatcgaaggggtatcttctagtgatagcgagggagatcctaacaaagaggagatgaacaggatccagaagccgaatgaagtaagcagccctccaacgacaagcgctgtcattcccccagccgtcccgcaggcccagcatctcgtggctcaaccacgggtagctaccatacaacagtgtcagagccccaccaactatctgcagggtctggatggcaagcctattattgctgctcccgtgttcacaaagatgctgcaaaaccttagtgcctccgagggccagctggtggtgtttgagtgtcgcgtgaagggcgcccccagccctaaggtcgaatggtatcgagagggtacccttatagaggacagtccggatttccggattctgcagaaaagacccgtgtgtatggagcacattgaggaaatatgtaccctagtcatagcagaggtgtttgcagaagatagtggctgtttcacatgcaccgcctccaacaagtacggcaccgtttctagtatcgcccagctgcacgtacgtgggaatgaggacctgtccaacaacggttcattacattctgcaaacagtaccaccaaccttgccgccattgaaccccagccaagcccacctcatagtgaaccaccctccgtggaacagccgccgaagcctaaacttgaaggcgtgttagtgaatcataatgagccgaggtccagctcacgaattgggctaagggtccatttcaatctgcctgaagacgataaagggtccgaggcctccagcgaggccggggtcgttactacgaggcagacaaggcccgatagctttcaggagcgtttcaatggtcaggccaccaaaaccccagagcctagctccccagtgaaggagcctccccccgtccttgcgaaacccaagcttgacagcacccagttacagcagctgcacaaccaggtgttgctcgagcagcatcaactgcagaatcctcctccaagctcaccaaaggagttccccttctccatgactgtactcaacagcaacgcaccccctgccgtaacgactagtagtaagcaggtcaaagcacctagttcccaaacgtttagtctggctaggcccaagtacttttttccatctacgaataccacggctgccacagtggctccttcctcctctccagtgttcaccctgtctagcacaccccagacaattcagcggacagtatcaaaagaaagcctgttggttagccacccgagcgtgcaaacaaagtcccccggcggcttgagcattcagaacgagcctctgcccccagggcccacagagccgaccccccctcctttcacattttcaatcccatcgggcaatcagtttcagcctcgatgcgtatcacccatcccagtgagtcccacgagccgtatccagaatcctgttgcctttctgtcctctgttctgccttccttacccgctattccaccaacgaatgccatgggtctcccgcggtcagccccttccatgccctcacaaggcctcgcgaagaagaataccaagtctccccagccagtgaacgacgacaacatcagagagaccaagaatgcggtaatcagggatctgggtaaaaagattaccttttccgatgtgagacctaaccagcaagaatataaaatctcgtcctttgagcagcgcctcatgaacgagatcgagtttagattagaacgcaccccagtagacgagagtgatgacgaaattcagcacgacgagatccccacgggcaagtgcatcgcccccatttttgataaacgcctcaagcacttccgagtgacggaaggctctccagtgactttcacctgcaagatagtaggcatacccgtgcctaaggtttattggttcaaggatggcaagcagattagtaaaagaaacgaacactgtaagatgcggcgggaaggggatggcacttgcagcttacatattgaatctacgacatcggatgacgatggaaattacaccataatggccgccaatcctcaaggcaggataagctgctcaggccacttgatggtgcagagcctcccgatcagatccagactaacaagcgccggtcagtcccacaggggtcgtagtagagttcaggagcgcgacaaggagccattacaagaacgcttcttcaggcctcattttctccaagctccgggcgacatggtggcccatgagggccgcctgtgccggttggactgtaaggtttccggactgccaccaccagaattgacctggctgctgaatggccaacccgttttgccggacgcgtcacacaaaatgctggtccgcgaaacaggggtccactcactgctcatcgatcccctgactcagcgcgatgcaggcacatataagtgtatagctaccaacaagacaggccagaattcctttagtctggagctgtccgtggtagccaaggaggtaaagaaggcccctgtgattctcgaaaaactccaaaattgcggcgttccggaaggccatcccgtacggctagagtgtcgggtgatcggcatgccccctccagtgttctattggaaaaaggacaatgagacgataccatgcactagagagcggatctccatgcaccaggataccaccgggtatgcatgcctgttgatacagcctgcaaagaaatctgacgctggctggtacacactgtcagcaaaaaacgaagctgggatcgtgagctgcactgctcgccttgacatttatgcacagtggcaccaccagatccctccccctatgtctgttagaccatctgggtcacgctacggatcactcacctctaaaggtctcgacatcttctcggccttctcctccatggagagcaccatggtctactcctgttcctcgcgctcagtcgttgagtctgacgagctttag

SEQ ID NO: 17879 - DNA, 2292 bp, synthetic construct
  source 1..2292: mol_type = other DNA; note = Synthetic coding sequence
atgcaggatcttggagataagctgcggatgatcgtgatgggtcatcggcgagtacatatctcacgtcagctcgaggtggagcccgaagagcctgaggccgagaacaagcataaacctcgaaggaagtcgaagagagggaagaaggaggcagaggacgagcttagtgcccgacaccccgcagagctcgccatggaacctacccctgaattgcccgctgaggtgctgatggttgaggtcgagaatgtagtgcacgaagattttcaggttacggaggaagtgaaggccctgacagcagaaatcgtgaagacaattcgcgacatcatcgccctgaatccgttgtacagagaatccgtgctccagatgatgcaagccggccagcgggtggtggacaacccaatttatctctccgacatgggagcagcgttgaccggagccgagagtcatgaattacaggatgtcctcgaagagacgaatatccctaaacgcctgtacaaagcactatcgctgctgaaaaaggagtttgagttaagcaagctgcagcagaggctgggcagggaggtggaggagaagattaagcagacccaccgaaaatacctgttgcaggagcagctgaagattatcaagaaagaactgggtcttgagaaagatgataaggatgccatcgaagagaaattcagggaaagactcaaggaacttgtggtcccaaaacatgtcatggatgtggtcgatgaggagctttctaagctggggctgttggacaatcattcctctgagttcaatgtgacaaggaactacctggattggctaactagtataccctggggcaaatattcaaacgaaaacctggacctcgcccgcgctcaggcagtcttagaggaagaccactatggaatggaggatgtgaaaaagcgtattcttgagttcatagcagtgagccagctgagaggctccacacaaggaaagatcctgtgtttctacggacctcccggggtggggaagactagcatagctcgctccatagcccgcgctctgaaccgagagtattttcgattctccgttggcggcatgactgatgtagctgagattaagggtcacagacgcacctacgttggcgcaatgccagggaagatcatccagtgcctgaagaagacaaaaaccgaaaaccctctgatcctaatcgacgaggttgacaaaattgggcgaggatatcaaggggatccctcatccgcactcctggaactcctcgatccggagcagaacgccaattttctggaccactacctcgacgtgcccgtcgatctatctaaggttctgtttatttgtactgccaacgttacagatacgatcccagagcctctccgcgatcggatggagatgataaatgtctctggctatgtggcccaggaaaagcttgccatcgctgagcgctatctggtacctcaggcacgcgccctttgtggcctcgatgaaagtaaagccaagctatcaagtgatgttctaaccctcttgattaagcaatactgtagagaaagcggcgtgcgaaacctgcagaagcaggtggagaaagtgctcaggaagagcgcctataagatcgtgagcggggaggctgaatccgtggaggtgacacccgagaatctgcaagatttcgtaggcaagccagtctttacagttgagagaatgtatgatgtgacacccccaggggtcgtgatgggcctggcatggaccgcaatgggcgggtcaaccctgtttgtcgaaacttccctgcgtagaccccaagacaaagatgccaagggagacaaagatggaagcctggaggtaactggccagctcggggaagtaatgaaagagtccgcacggatcgcctacaccttcgccagggcattcctgatgcaacacgcaccggccaatgattacttagtgaccagtcatatccatttgcacgtgcctgagggagccacacctaaagatgggccaagtgctggctgcaccatcgtcaccgctctgttgtcactggctatgggccgacctgtaaggcagaatctggcaatgaccggagaggtgtctttgaccggtaaaatcctgccagttggaggtatcaaagagaaaacaatagctgcgaaacgcgcgggagtgacctgcatcgtattgcctgctgagaacaaaaaggacttctatgacctagcagccttcatcaccgaggggttggaagtccacttcgttgagcactatcgggagatcttcgacatagcgttcccagacgaacaggctgaggctctggccgtggaacggtag

SEQ ID NO: 17880 - DNA, 558 bp, synthetic construct
  source 1..558: mol_type = other DNA; note = Synthetic coding sequence
atgaacaataaccagatcgtcgcaaaggatctccaggatgaaaagatactgtatccagaattcaacaagctcaaggaacgcaacagggagctgaaaacactcctcagtattggcggctggaactttggtacaagtcgctttaccacaatgctcagtacttttgctaaccgggaaaaattcatagcttctgtgatttcattgttgaggacccacgacttcgacggcttggatctgttctttctttacccaggactgagagggtctcccatgcacgatcggtggaccttcctgttcctaatcgaggaacttttatttgcatttaggaaagaggctctcctgaccatgagaccccgccttctgctctctgctgccgtttctggcgttccacatattgtgcagacttcatacgatgtacgctttctgggacggttcgttcccttgagcggagagcgcagatctacagggctcataacatcgatgtcgaggatgcccacaagagggaagtccggacttgcaatgaccatgccctcggcaagtgtcactagacacggcctgtag

SEQ ID NO: 17881 - DNA, 1269 bp, synthetic construct
  source 1..1269: mol_type = other DNA; note = Synthetic coding sequence
atgagcggaggcaccccttacatcggcagcaaaatctcactgatttccaaagcggaaatcagatatgagggcatactgtacacaatcgacactgaaaactccacagtggcactcgcaaaggttagatcttttggaaccgaggatcgacccactgaccggccaatccccccccgagacgaggtgttcgagtatattattttccggggctcagacatcaaagatttgaccgtctgcgaacctccaaagccacagtgctccctcccacaggaccctgcgattgttcagtcatcccttgggtcctccacatcttcatttcagagcatgggctcatacgggcccttcggccgaatgccaacctacagtcagttctcaccaagcagcctggttggacagcagttcggagcagtcggagttggaagatcttcccctcaacttgatcctctcaggaaatctccaacaatggaacaggcagtccagaccgcttctgctcacctccctgcccccgcagccgtgggccgtcggtctcctgtgagcacccggccgttgccgagtgcctcccagaaagcgggagagaaccaggagcaccgcagagctgaagtgcataaagtgtcgcggccagagaacgagcagctccgcaacgataataagaggcaggtggcaccaggcgccccaagcgctccaaggcggggccgggggggacatcgcggaggtcgaggccgctttggcattcgtagggacggcccaatgaagtttgagaaggatttcgattttgagtctgccaatgcacagttcaacaaagaggagatagatagagagttccacaacaagctaaagctcaaagaagacaaactggagaagcaggagaagcccgtaaatggggaagacaagggggacagtggagtagacactcagaatagtgagggaaacgcagatgaggaagaccccttgggacctaactgctactatgacaagaccaagtcgttttttgataacatatcctgcgatgataatcgggagaggcgtcctacctgggctgaggagagaaggttaaacgctgagacattcggcattcctctgcggcctaatagagggagaggtggttacagaggaagaggagggcttggattcagaggcggcaggggtcgcggtggtggccgtgggggtactttcacagcaccacggggattcagaggcggattccgggggggaagaggtggccgggaattcgccgatttcgagtacagaaagaccacagcctttgggccttag

SEQ ID NO: 17882 - DNA, 1266 bp, synthetic construct
  source 1..1266: mol_type = other DNA; note = Synthetic coding sequence
atggcgagttcaagtgtgccgccagcaactgtctctgctgcaacagccggtcctggaccaggctttgggtttgcatccaagactaagaagaaacatttcgttcagcagaaagtgaaggtgttccgcgctgctgaccctcttgttggggtatttttatggggcgtggcacatagcatcaatgaactctcccaggtcccaccaccagtgatgttattgcccgatgacttcaaggccagttctaaaataaaagtgaataaccacctctttcatcgggagaatttaccaagccacttcaaatttaaagagtactgtccccaggtatttaggaatcttcgtgataggtttggtatagacgatcaggactacctggtgtctctgacgcgcaatcccccatcagagtccgagggcagtgacggccgcttcctcatttcctatgatcgtacattggtaattaaagaggtgagttccgaagatatcgcggacatgcactctaacctcagcaactaccatcagtacatcgtgaaatgtcacggcaacactctcctgccacagtttctcggtatgtaccgggtgagtgtggacaacgaagattcatacatgctggtcatgaggaatatgttcagtcaccgactgcccgtgcaccggaagtatgacctgaaaggatccttggtaagtcgagaggccagtgacaaggagaaggtgaaggagttgcctaccctgaaagacatggatttccttaacaaaaaccagaaggtgtatattggagaagaagaaaaaaaaatcttcctggagaagcttaaaagagacgtggagtttcttgtacagctaaagatcatggactactccctgcttctgggtattcatgacatcattcgtggatctgagccggaggaggaggcacccgtaagagaggatgaatccgaggttgacggtgattgcagcctgacgggcccccctgccctggtcggctcgtatggcacttcacccgagggaatcgggggctacatccacagtcaccggccccttggtcccggtgaattcgaatcatttattgacgtgtatgcaatccggtcagccgaaggagctccccagaaagaggtatacttcatgggccttattgacatcttgacacagtacgacgcaaagaaaaaagccgcacacgcggccaaaaccgtcaagcatggcgccggggccgagatctccacggttcacccagaacagtacgccaagcgctttctcgacttcattactaatatcttcgcctag

SEQ ID NO: 17883 - DNA, 756 bp, synthetic construct
  source 1..756: mol_type = other DNA; note = Synthetic coding sequence
atggattcagagctgatgcactcaatcgtggggagctaccataaacctccagaacgggtttttgtgccctcattcacacagaatgaaccttcccagaattgccatccagccaacctggaggtcacctcgccaaaaatattacactcccccaactctcaggccctcatcctggctcttaagacgctgcaagagaaaattcatcggctcgagctggagcgcacacaggccgaagacaatctgaatattctctctcgggaagccgctcagtataagaaagctctcgagaatgagaccaacgaaaggaaccttgcacatcaagagttaattaaacagaagaaggatatcagtatccagttaagttcggcccagtcacgatgtacactgctggagaaacagttggagtatacgaagcggatggtcttgaacgtcgagagggaaaaaaacatgatcctcgaacagcaagcccagctccagcgggagaaagaacaggaccagatgaaactttatgccaagctagagaaactcgatgtgctggagaaggaatgtttccgccttactactactcagaaaaccgcggaagataagatcaaacacctggaagaaaagctgaaggaggaggaacaccaaaggaagctattccaggataaggcttccgagctgcagacgggattagagatctcaaaaatcatcatgagctccgtgtcgaatctaaagcatagtaaggagaaaaaaaaatcttctaaagtctgtatttag

SEQ ID NO: 17884 - DNA, 1980 bp, synthetic construct
  source 1..1980: mol_type = other DNA; note = Synthetic coding sequence
atggactcccagggcagagtgtgggctcaagaaatgttgcttcgggtgagccctgaccatgtgacattactggaccctgcaagtaaagaggaactggagtcctatcctttgggagctatcgtacgttgtgatgccgttatgcctcctgggcgcagtagatcccttctgctgctcgtctgccaggagcccgagcgggcccagccagatgttcacttctttcagggcctgagactgggcgccgagctcatacgggaagacatccagggggccctacacaactatcgctccgggcggggtgagcgcagggctgccgctctacgagctacacaggaagaactccaacgtgatcggtcacctgctgcagaaactcctccgttacagaggcggccatccgtacgtgccgtcatcagtacagtcgaacggggcgctggaaggggccggcctcaggctaaaccaattccagaagccgaagaagcacagcgcccggagcccgttgggacaagctccaatgcagactcagcaagtccagatttaggaccgcgagggcccgacctcgctgtcctgcaggcagagagggaagtcgacatactaaaccacgtgttcgatgacgtagagtcgttcgtttctagactccagaagagcgcagaagcagcgagagtcttagagcaccgagaaagaggaaggcgctcgagaaggcgggccgccggggaaggcctgcttactctccgcgccaagcctccttcggaggcggaatatactgacgtcttgcagaagatcaagtacgcttttagcctgctggctaggcttagaggaaacatcgccgacccaagcagccctgagttgctccactttctgttcgggccgctgcaaatgatcgtcaataccagcggaggccccgagtttgccagtagtgtgaggcgtcctcaccttacttctgacgctgtggcgttactgcgtgataacgtgaccccaagggaaaacgaactgtggactagcctaggagattcttggacgcgcccaggattagagctttcaccagaggagggaccaccctatcgccccgagttcttttcagggtgggagccccctgttaccgatccccagagcagggcgtgggaggaccccgtggagaagcagctgcagcacgagcgcaggagacgtcaacagagcgccccccaggtagccgtgaacggccacagggatctggagcccgagagtgagccccaactcgagtccgaaaccgccggtaagtgggtgctgtgtaattacgattttcaagcccggaactcaagcgagttatctgtgaaacagcgcgacgttctggaggtactcgacgacagtcggaaatggtggaaagtaagggacccagcggggcaggagggttatgtgccatataatatccttaccccctacccgggacccagactgcaccacagccaatcaccagcacgaagcctgaactctacacctccccccccccccgctccagccccagccccacccccagccctcgctaggcccaggtgggatcggccacgatgggactcatgtgacagtctgaatgggctcgatcctagcgagaaagagaagttttcccagatgctgatcgtcaatgaggaactgcaggccaggttggcgcagggaaggagtggtccaagcagagccgtgccggggccccgggcgccggagccacaactgtcacctggttctgacgcttcagaggtcagggcgtggttacaggctaaaggttttagctctggcactgtggacgcactcggagtgttgactggggctcagcttttctccttacagaaagaagaactgcgtgccgtgagtccagaggagggagctagggtatacagccaggtgacggtccagcggtctctcctcgaagataaggaaaaggtgtcggagctggaagcggtgatggagaagcagaaaaaaaaagttgaaggggaagtggagatggaggttatctag

SEQ ID NO: 17885 - DNA, 3702 bp, synthetic construct
  source 1..3702: mol_type = other DNA; note = Synthetic coding sequence
atgaatactaaaaaaagaggtagccccgccagaacccatagcatgatgtcattgtcggtgaggcctcaacgcaggttgctaagtgctcgcgtgaaccgcagccaatcttttgctggagtcctcggcagtcacgaaaggggaccacggagctttccagtattctcaccaccaggaccgccaagaaagccgccagccttgtctcgggtgtccaggatgttctccgtagcacaccccgccgcaaaagtcccccagccagaacgcttggacctggtgtacaccgccctgaaacggggcttgacagcatacctagaggtccatcaacaagaacaggagaagctgcagggacagatccgcgagagtaaaaggaattcacggctgggctttctgtacgacctggacaaacaggtaaagtccattgaacggtttctcaggcgcctcgagttccacgcatcaaagatcgacgaattatacgaagcctactgtgtgcagcggaggttaagagatggtgcatataacatggtaagggcctacacaaccggatccccaggatccagggaggctagggattcgctggccgaagctacgcgaggacaccgcgaatacacagaatctatgtgccttctggaatcagaattggaggcacaacttggcgaatttcatcttaggatgaaggggcttgccggtttcgcgagactctgtgttggcgaccagtatgagatttgcatgaagtacggacgccagaggtggaagttgagggggcgaatagaaggcagcggcaagcaagtgtgggactccgaggagactatcttccttccactactcaccgagttcctgagtataaaagtgacagagttgaaggggcttgctaatcatgttgtggtgggttcggtctcctgcgagactaaagatctcttcgctgctcttccccaggtggtggctgtggatattaacgatcttggaaccatcaaattatctctcgaggtgacatggtcgccttttgacaaggatgaccagccctccgctgcctcctcagtcaataaggcttcaacagtcactaagcggttttccacctacagccagtcccctccagacacccctagtctgagagaacaagcattctataacatgctgcgtagacaggaggaactggagaatggcactgcatggagtctctcttctgagagctccgatgactcaagtagtccacagctgagcgggacggcgcgccacagtccagctcccaggcctctggtgcagcagccggagcccttgcctattcaggtggcctttaggcgacccgagacgccttcatcaggacctctcgacgaggaaggggctgttgcaccagtccttgctaacgggcacgccccatactcccgcactctatcacacataagcgaagcatccgtggacgccgctctagcggaggcgtctgtcgaagccgtagggcctgagagcctggcttggggacccagtcccccgacacaccccgccccaactcacggtgagcatccatctccagtgccacccgcattggatcccggacacagcgctacgagcagcacattaggcaccacaggctcggtgcccacgtcaactgatccggcccccagcgcccatctcgattcagtgcataaatcaaccgactccggtccatccgagttacctggacctacccacacaacgactggaagcacgtactcagccatcacgacgacacacagcgccccttcaccactgacacacaccactaccggctccacccacaaacctattatctcgacgctaacaacaactgggcctaccctgaacatcatcggcccggtgcagactaccacttctcccactcacacaatgccatcccctacccacacaaccgcctcccctacccacacatcaactagtcctactcatactcctactagtcccacccacaagacctccatgagcccacccactacaacttctcctacaccctcaggcatggggcttgttcagacagcaacttctccgacccatccaaccacttcacccacacatccaaccactagtcctatactgataaacgtcagtccctcaacgtcactggaactagccactctgtcatcaccgagtaaacatagcgacccaacactgcctgggacggacagtctcccttgttctcccccagtgtccaatagctacacccaggccgaccctatggccccacgcacaccacatccgagcccggcccactcttccaggaaacccttgacaagccctgctcccgatcccagcgaaagcacggtgcagagccttagtccaacgccatccccacctacccctgccccccaacactcagacctgtgcctcgccatggcagtgcagacgcctgtacccactgcagcaggcgggtctggggaccggtctttggaggaagctctcggggctctgatggcggcactggacgactataggggacagttccccgaactccaaggtttggagcaagaagtgacgagactggagagcctgcttatgcaacgccaaggcttaacaaggtccagagccagcagtttatctatcacggtggagcacgctttggagtcgttttcatttctcaacgaagatgaagacgaagataacgatgttcccggggacaggcctcccagttctccggaggccggagcagaggatagtatagattctccctccgcacgccccttgagcaccggctgccctgccctcgacgccgccctcgttaggcacttgtaccattgctcgaggttgttacttaagctaggaacattcgggcccttacggtgccaagaggcttgggcgttggaacgcctgctgagagaggctagagtgttggaagctgtttgcgaattctccagacgatgggagatacccgcatctagcgcccaggaagtggttcagttctctgcctcccggcccggcttccttaccttctgggaccagtgcaccgaacggctctcatgtttcttatgccctgttgagcgggttctgctcacattctgtaaccaatacggcgcacgtctcagtctgcggcagcccgggcttgcagaggcggtttgcgttaagtttctggaagatgcactgggccaaaagttaccacgccggccccagccaggaccaggggagcaactgaccgttttccagttttggagcttcgtcgaaacgctggattcacctaccatggaagcgtatgttacagagacagccgaagaagtcctgctcgtgcgaaatctgaactctgatgatcaggctgtggtcctgaaagccctgaggctggccccagaaggccgacttcgcagagatgggcttcgggccctgtcaagtctccttgtacacggcaataacaaagtcatggccgccgtatccactcagttgaggtcactgtcgctcggaccaacattccgcgagcgtgcattgttatgtttcctggaccagttggaagatgaggacgtgcagactagggtggccggctgccttgccctcggctgtatcaaagcccctgaagggatcgagccactcgtctacctatgtcagactgataccgaggcagttagggaagcagctagacagtcactgcagcagtgcggggaggagggtcagagcgcacatcgtcggctcgaggagtctcttgacgccctgccccgaatttttggccctggatctatggctagcactgcgttctag

SEQ ID NO: 17886 - DNA, 1428 bp, synthetic construct
  source 1..1428: mol_type = other DNA; note = Synthetic coding sequence
atggatcagatggtgcagcaccctgcagcaaagatgatcgtgatggccagtcacatgcaagaacaggaggttggggatgggaccaacttcgttctagtgtttgccggggccctgctggaactcgccgaagagctgttaagaatcggactgtcagtttcagaggtgatcgagggatacgagatagcttgccgcaaagcccacgagatcttgcccaacctggtgtgttgcagcgcaaagaaccttcgtgatatcgatgaggtgagttccctcctgaggacctccatcatgagcaagcaatacggcaacgaagtgtttctagcgaaactcatcgcccaagcttgtgtgagtatttttccagattccgggcacttcaatgtggacaacatccgcgtgtgcaaaattctcggtagcggaatctcctccagttctgtgctacacggcatggtctttaagaaagagaccgaaggtgacgtgacttccgtgaaagatgcgaaaatcgctgtctacagctgtccatttgatggaatgatcaccgagactaaagggaccgtgttgatcaaaacggcagaagagcttatgaacttcagcaagggggaggaaaatttaatggatgcacaggttaaggctattgcagataccggcgctaacgtggtcgttaccggtggtaaagtagcggacatggcgcttcactatgccaataagtacaatattatgctggtgaggcttaatagtaagtgggacctgagaagactgtgcaaaaccgtcggcgcaaccgcgctccccaggttgaccccacctgtactggaagaaatgggacactgtgattccgtgtacctcagcgaagttggggatactcaagtcgtcgtgttcaagcatgaaaaggaagacggagccatctcgaccattgtcttgcgcgggagtaccgataatcttatggacgacattgagcgtgcggtggacgatggcgtgaacacttttaaagtccttacccgtgataaacgcctggttccaggcggaggggccactgagatagagctggccaaacagatcacatcctacggagagacgtgtccaggcctggagcagtatgctattaagaagttcgctgaggcgttcgaggccatcccccgcgcattggcggaaaactctggagtgaaggctaacgaagtgattagtaaactgtacgctgtgcatcaagagggaaataagaacgttgggctcgacatcgaggcagaagtgcccgccgtcaaggatatgctggaagctggcatcttggatacttacctggggaaatactgggctatcaagctggccacaaacgccgccgtgaccgtattgagagtggaccagatcatcatggccaagcccgcaggcggacctaaacccccctcaggaaagaaagattgggacgatgaccagaacgattag

SEQ ID NO: 17887 - DNA, 1626 bp, synthetic construct
  source 1..1626: mol_type = other DNA; note = Synthetic coding sequence
atgagagccctgttgcacaagcctgagatgatcaaacaaattcttccagaacattccgtcttgcagaacattaatttcgtggaagcatttcaggacgagttgctggtgaccgaagtctatgacctgccacagcggccaaatgatgtgcagttattctatggctcaatgtgtaagatcatcctttccgttatcggcgagtttcgcgactgcatttcttcaagggaattccttcagccttcttctaaagcaagcctcgagtctacatcagatcttggcgcgagcggaaagcacggcggaaatgtatctctggacgtactgccagttaagggaccacaaggctcgccattactgagccgagcggctcggccgcccctggaccaacttgcatccgaggaaccctggaccgttctgccggagcatctcatactggtcgcacctagtccttgcgacatggccaagacaggaagattccagatagttaataacagcgtacgcttactgagattcgagctctgttggcctgcccactgtctgaccgtgacgccgcaacacggctgtgtcgctccagagagtaaactgcagattctggtgagtccaaattcatctttgtctaccaagcagtctatgtttccctggtctggtctaatctacatccactgtgacgacgggcaaaagaaaatcgttaaggtacagatccgggaggatctgacccaggttgaactgctgactcggttgacaagtaagcctttcggaattctgagccctgtttcggaaccttctgtcagtcatctggtcaaacctatgaccaagcccccctccacaaaagtggagattagaaataagtcgattactttcccaactaccgagccaggtgagacatccgagagctgtttggagctggagaatcacggaaccacggacgttaagtggcacttatcttctctagcaccaccttacgtcaaaggcgtggatgaatcaggagatgtcttcagagccacatatgccgctttccgctgcagtcccatctccgggttactagagtctcacggcatccagaaggtgtcaatcacattcctgccacggggacggggggactacgcccagttttgggatgtggagtgtcaccctctgaaggagcctcacatgaaacacaccctcagatttcagctatccggtcagtcgattgaggctgaaaacgagcccgaaaacgcctgtctgtctaccgactccctcatcaaaatcgatcacctcgtgaagcctaggcggcaagccgtaagcgaggctagtgcccgcattccagaacaattagacgtgacggcacgaggggtgtacgcccctgaggatgtatacagattccgtcccacctccgtgggcgaaagtaggactctaaaagttaacctgagaaataactccttcatcacccactcgctaaaatttctatcacccagggagcccttctacgtcaagcattctaaatattctctgagggctcagcactacataaacatgcccgtgcagttcaagcccaaaagcgctggcaagttcgaggctctactagttatccagaccgatgagggaaagtccatcgctattcgtctgatcggagaagccttggggaaaaattag

SEQ ID NO: 17888 - DNA, 1737 bp, synthetic construct
  source 1..1737: mol_type = other DNA; note = Synthetic coding sequence
atgagcagcaaggggtcttcaaccgatggaaggacagacctcgccaacggctcgctgagcagttcccccgaggagatgtccggagccgaggagggacgggagacaagttccggcatcgaggtggaggcctccgatctcagtctgagcctcaccggggacgatggcggcccaaacagaacttctatggaggatacaggccactattctataaacgatgaaaatagagtgcacgatcgcagcgaggaagaagaggaggaggaggaagaagaagaagaggaacagccacgacggagagtacagaggaagagagccaaccgagaccaggacagtagcgacgatgagcgcgctttggaagactgggtgagctctgagacttctgccctgccacggccgcggtggcaggctcttcctgccctgcgagagagggaactcggaagtagcgctcgcttcgtgtacgaggcctgtggagcccgggtctttgtccagaggttcaggttgcagcacgggctcgaaggccacaccggttgtgtgaacacccttcattttaaccaaagagggacttggctagcttcgggatctgacgatctaaaagtggtggtctgggattgggtgaggagacagcccgtacttgatttcgaatctggtcataaaagtaatgtgtttcaagctaaattcctacctaactccggagattccacgctggccatgtgcgctagagacggtcaggtccgtgtggcagagctgtctgccactcagtgttgcaagaacactaagcgagtggctcaacacaaaggtgcatctcataaattagccctcgaaccggattccccctgcacgttcctgtccgctggggaggacgcagtggtattcaccatcgatctgcggcaggacaggcccgcctccaagctcgtcgttaccaaggagaaggaaaaaaaggtcggattatacaccatctatgtgaacccagcgaacacacaccaattcgcagtaggcgggcgcgatcaatttgtgcgcatctacgaccaaagaaaaatcgatgagaatgagaataacggcgttctcaagaaattttgcccccaccatttggtgaacagcgagagtaaggcgaacattacctgcctggtgtacagccatgatggcaccgagttgttggcctcctataacgacgaggatatttatttattcaattcaagccactcggatggagcccagtacgtcaaacgatacaaaggccacaggaacaacgccacagtaaaaggggtcaatttctatgggcccaagagcgagttcgttgtgtcaggcagcgactgtggccacatcttcttgtgggaaaagagcagctgccaaataattcagttcatggagggtgacaagggcggcgtcgtaaactgcttggaacctcatccccaccttcctgtgttggccactagtggcctggaccacgacgtcaagatctgggcccccactgcagaggcgagtacagaactaaccggcttgaaggatgttattaaaaaaaacaaacgagagcgggacgaggacagcctacaccagactgatttattcgactcacacatgctctggtttctgatgcatcaccttcgccagcggcggcaccaccggcggtggcgggagccaggtgtgggcgccactgatgccgacagtgacgagtccccatcatcatcagatacctcagacgaggaggaagggcctgacagggtacagtgcatgccttcttag

SEQ ID NO: 17889 - DNA, 426 bp, synthetic construct
  source 1..426: mol_type = other DNA; note = Synthetic coding sequence
atgggaggcaaacccagacattcactttacttcattggctatcaggacgatttcttgttatatctcgacccacactattgtcagccgaccgtcgacgtgtcccaggccgattttccactggagtccttccattgcaccagccccagaaagatggcatttgccaagatggacccatcctgcacagttggcttttacgccggagacaggaaagaatttgagacactctgctccgagctgacccgcgtcctcagctcaagctctgctaccgaaaggtaccctatgttcaccctggcggagggccatgcacaagatcattctctggatgatctgtgcagccaactggcacagccaaccctaaggctcccaaggacaggcaggctgctgcgggccaagagaccgtcctcagaggatttcgttttcctctag

SEQ ID NO: 17890 - DNA, 570 bp, synthetic construct
  source 1..570: mol_type = other DNA; note = Synthetic coding sequence
atggtgttgctgcacgtaaaacgcggagacgagtcacagtttttgctgcaggccccaggttccacagaactggaggaactcacggtccaggtcgccagggtttacaacggccgactaaaagttcagcggctctgctcggcccccaacgagaagatgaaacaagtcctcaagaagactatcgaagaagctaaggcaataatctctaagaagcaggtggaggcaggcgtctgcgtcacaatggagatggtgaaggatgctctggatcagctcaggggggcagtgatgatcgtgtatcccatgggtctccccccatatgatccaatccggatggagtttgaaaacaaagaggatctgtccgggacccaagccggactcaatgtaatcaaggaagccgaggcccagctgtggtgggccgctaaggagctccggcgaacgaagaaactgagtgactatgtcggcaaaaacgagaaaaccaaaataatagccaaaatccagcaggtgtcaacattttgttttaacgtgagcgtggtgttcgtgatcagccttcagaccgataaaaacgttcaatag

SEQ ID NO: 17891 - DNA, 2031 bp, synthetic construct
  source 1..2031: mol_type = other DNA; note = Synthetic coding sequence
atggcagctatccagcacgggcatgaggccgtagtgcgcctattaatggagtggggcgcggatcctaatcacgccgccagaacagtaggatggagccccctgatgttggccgctttgaccggaaggttaggtgtagcccagcagctggttgaaaagggtgctaaccccgatcatttaagtgtgctagagaagaccgctttcgaagtggcactggattgcaagcacagagacctggtggactatctggatccccttaccacagtgaggcccaaaactgacgaagagaagcgccggccggacatatttcacgcgctcaagatgggaaacttccagctggtaaaggaaatcgccgacgaggatccatcgcacgtgaatctcgtaaatggggatggagcaactcctctaatgctggccgctgtcaccgggcagctggccttggtgcaactccttgtggaaaggcatgccgatgtggataaacaggactctgttcacggctggacagccctgatgcaggccacttaccacggcaataaggaaatagtcaagtatttgctgaatcaaggagcggatgtgacacttagggctaaaaatggctataccgcattcgacttagtgatgctgcttaatgatcctgatacagagctcgttagattactggcatctgtgtgtatgcaagtcaacaaagacaaggggcgcccatcccatcagccacctctgccccattccaaggtccgacagccttggagcataccagtactcccagacgacaagggaggattaaaaagttggtggaaccgcatgagcaatcgctttcggaagctgaaactaatgcagacgttgcctcgggggctgtcctctaaccaacccctgcctttcagtgacgaacccgagcctgccctggactctaccatgcgcgcggcgccccaggataaaacttcacgcagtgccttgcctgatgctgccccagtaaccaaggacaatgggcccggtagtaccaggggagagaaggaagacacccttcttacgacaatgctgagaaacggcgcacccctcactagattaccaagcgacaagctgaaagccgtgatcccacccttcctgccaccatccagctttgagctctggtcctccgaccggtccaggacccggcacaatggtaaggctgaccccatgaagaccgcgctgccacaacgcgcttcaagaggccatcctgtgggaggggggggcactgacaccacgcccgtgagaccagttaaattcccatccttgccccggagcccggcctcatctgctaattcaggaaattttaaccattctcctcactcgtcagggggatccagtggggttggcgtgtctcgccacgggggagagctgctgaacaggtcaggtggctctatagacaacgtgttgagccagattgccgcacagagaaagaaagccgcaggactcctggaacaaaagccgagccaccgtagcagtccagtgggcccagcccctgggtcttccccatcagaactgcctgcttcccctgcggggggttcggcccccgtagggaaaaagctagaaaccagcaaacgccctccaagtggcaccagcacaacctccaaatcaacaagccccaccctgaccccaagcccatcaccaaaaggccacacagctgaaagttctgtgagttcgagttcttcccacaggcagtctaaatcttccggggggtcgtcttccggtacaattacggacgaagacgaactgacaggtatacttaagaaattatccctggaaaagtatcagcctattttcgaagagcaggaggtcgatatggaggcattcctcaccctcacagatggtgacctcaaagagctcggcattaaaacagacggatctcgccaacaaatcctcgccgctatttcagaactgaacgcaggcaaaggccgcgaaaggcagatccttcaagagaccatccacaatttccattcatcttttgagagttccgcatcaaacactagggcgccagggaacagcccatgcgcctag

SEQ ID NO: 17892 - DNA, 2319 bp, synthetic construct
  source 1..2319: mol_type = other DNA; note = Synthetic coding sequence
atgaggcaccagaagaggaacgtgtaccactgtaacaaatgtaggcttcaattcttgttcgctaaggacaagatagaacataagttgcaacaccacaagacatttagaaagccaaaacaacttgaggggctaaagcctggaaccaaggtcaccatccgggccagtcgtggacagcctaggactgttccagtgagctccaacgataccccaccaagcgctctccaggaagcagcacctcttacctcctccatggatcctctccccgtgttcctgtacccacctgtgcagagaagtattcagaaaagggcagtccgcaagatgagcgtgatgggtcggcagacttgccttgaatgctcatttgaaataccagacttccctaatcatttccccacctacgtgcactgtagcttatgtaggtactctacctgctgctctagagcctacgcaaaccatatgatcaacaaccacgtacctaggaagagtcccaaatatctggccttattcaagaactccgtcagcggaattaaactggcctgcacaagctgtaccttcgtaacttctgttggtgatgcgatggcaaagcatttggttttcaacccttctcaccggagctcctccattctcccaagggggctcacgtggattgcccattcacggcacgggcaaacccgtgacagggtccatgacaggaatgtgaaaaacatgtacccgccgccctcttttccgacaaacaaggccgccaccgtcaagtctgcaggggcaacccctgctgaacctgaagagcttctcacacctttggcacccgccctgccctcacctgcctctacggctacgccgccaccgacacccactcaccctcaggcactggctctacctccactggccacagagggcgcagagtgccttaatgtcgacgatcaagacgaaggaagccctgtgacccaagagcccgaacttgcaagcggcggaggaggttctggaggagtcgggaaaaaggagcagctaagcgtgaagaagctgagagttgtgctcttcgcgttatgttgcaatactgagcaggctgccgagcacttcagaaacccccaaaggcggatcaggagatggctgagaaggtttcaagctagccagggtgagaacctggagggcaagtacctttcatttgaagccgaggagaaactcgccgaatgggtgctcacacaaagagagcagcagctcccagtgaacgaggagacactcttccaaaaggcgaccaaaatcgggagaagcctggaaggaggtttcaaaatctcctatgagtgggcagtccgattcatgttacgtcatcatctgacgcctcatgcacggagagctgtcgcacacacgctgccaaaggatgtggcagagaatgcaggactgttcattgacttcgttcagcgccagattcacaaccaggatctgccgttgtccatgatcgtggccatcgacgagatatcgctgtttttggacacagaggtgctgtcttctgacgatcgaaaagaaaatgctcttcagaccgtcggcaccggcgaaccatggtgtgacgtagtgttagccatcctggctgacgggactgtgttgccaacacttgtgttttataggggccaaatggatcagcctgccaacatgcccgatagtatcttgctggaagccaaggaatccggatactcagatgatgagatcatggagctttggagtaccagagtttggcaaaagcacacggcatgccagcgatccaaagggatgctggtgatggactgtcacaggacccacctgagcgaggaagttctggctatgttaagcgccagctctacattgcctgccgttgtgccggctggctgtagctcgaaaattcaacccttagacgtttgtataaaacgtactgtgaaaaattttctacacaaaaagtggaaagagcaggctcgggaaatggctgacaccgcttgcgactccgacgtcctcctgcagcttgtgcttgtttggctgggagaggtcctgggagtgatcggcgattgccctgaattagtgcagcggtcatttctggtggcatcagtattacccggacccgatgggaatattaattcgcctaccaggaatgccgatatgcaggaagagctaatcgcttcgctggaggagcagctcaaactatctggggagcacagcgagagcagtacccctagacccaggagcagtcccgaagaaaccatcgaacctgaaagtctccatcagctgtttgagggcgaaagtgaaactgagtctttctacggattcgaggaggcggaccttgacctgatggagatttag

SEQ ID NO: 17893 - DNA, 285 bp, synthetic construct
  source 1..285: mol_type = other DNA; note = Synthetic coding sequence
atggccatgaccgccggaacaacaaccactttccccatgtccaaccacacgcgggaacgtgttacagtggctaagctgacccttgagaatttttattcaaacctaattctgcaacacgaagagcgggagactcgccagaaaaagcttgaagttgcgatggaagaggagggccttgctgacgaggagaagaagctgcgtcggagccagcacgcacggaaggagaccgagttcctgagactgaaaagaactcgcctgggcctggatgactttgagtcactgaagtag

SEQ ID NO: 17894 - DNA, 1047 bp, synthetic construct
  source 1..1047: mol_type = other DNA; note = Synthetic coding sequence
atgggcaaagactactataaaattctgggtatcccttctggtgctaatgaagacgaaattaagaaggcctacaggaaaatggctctcaagtaccacccagacaagaacaaggagcctaacgctgaggagaaatttaaggagatagccgaggcctacgatgtgcttagtgaccccaaaaagaggggtttatacgatcaatatggcgaggagggcttgaaaaccgggggcgggacttcagggggatccagcggatcctttcactacacttttcacggagatcctcacgcaacctttgcgtcgtttttcggaggtagcaatccctttgacatttttttcgcatcctctcgtagcacaaggccatttagtggattcgaccccgatgatatggatgtggacgaggacgaggatccctttggggcttttggccgattcggtttcaatggtctgtcccgggggccgagacgcgctcctgagccactctatccccggcgcaaggtgcaggacccacctgtagtgcatgaattacgggtgtctcttgaggagatctaccacgggagcaccaagagaatgaaaattactcgaagaagattgaatccggatggtcggactgttcgaacagaggacaaaattctgcacattgtaataaagcggggatggaaagaaggaaccaagattacattcccaaaagagggagatgcgaccccggacaacattcccgcagatatagtgttcgtccttaaagataagccccacgcccacttcaggcgtgacggcacaaatgtactgtacagcgccctgatctcattgaaggaggcactgtgtggctgtaccgttaacatcccaaccatcgacggaagggttatacccctaccatgtaacgacgtaatcaagcctggtaccgtgaagcgactacggggtgaaggccttcccttccctaaagtgccgacccagagaggtgacttgattgtggaattcaaggttcggttccctgatcgacttacccctcaaacccgacagattcttaagcaacacctgccgtgctcttag

SEQ ID NO: 17895 - DNA, 888 bp, synthetic construct
  source 1..888: mol_type = other DNA; note = Synthetic coding sequence
atgccggttcatacactgtcacccggcgcaccatcagcgcctgccttaccgtgtaggcttaggaccagagttcctggatacctccttcgcggacccgcggatggcggcgccagaaaaccaagtgccgtcgagcggttagaggccgacaaggctaaatacgtaaaatctctgcacgtggcaaatactagacaggagccagttcagcccctgctcagtaagcagcctttgttctccccagagacccgaaggacagtgctgactcccagccggcgcgctctccccggaccatgccgtcgtccgcagctggatctggatattctgtcctcactcatcgacctttgcgactcgccagtgtctcctgcagaggcgtcccgcacgccaggccgtgcagagggcgctggacgccctcccccagccacaccgccccgaccaccgccaagcacttctgccgtacgaagggtggacgtgcggccccttcccgcatcaccggcccgaccttgtccatcacctggccccgcagcagccagctcaccagctaggccccctggcttgcagaggagcaagagcgatctgagcgaaaggttttcccgggcagccgcagatctcgagaggttctttaacttctgtggactggaccctgaagaggcgagaggcctcggggtggcgcaccttgcacgagcgtccagcgacatcgtcagcttggccggacctagcgcaggaccgggttcttcagaaggcgggtgctccagacgcagtagtgtaactgtggaggaaagagctcgtgaaagggtgccttacggggtgagcgttgttgaaaggaacgcccgcgtaattaagtggttgtatggccttaggcaggcgcgagagtcccccgccgcggaaggttag

SEQ ID NO: 17896 - DNA, 258 bp, synthetic construct
  source 1..258: mol_type = other DNA; note = Synthetic coding sequence
atgccctacaacgaggccgaaaacaaacggtcttaccacctttgtgatctctgtgaccggatcattatcggggacagggagtgggcagcccatattaaaagcaaaagccacctgaaccaactgaagaagaggcggcgcctggatagcgacgcagtcaatactattgaatcccagagcgtgagccccgaccataataaggaaccaaaagaaaaaggatccccagggcagaacgatcaagagttaaaatgttccgtctag

SEQ ID NO: 17897 - DNA, 396 bp, synthetic construct
  source 1..396: mol_type = other DNA; note = Synthetic coding sequence
atggccatgaccgctggaactactacgacttttcccatgtcgaatcacaccagggaaagggtcactgtggccaagctgactctagagaacttttattctaacctgatcctgcagcacgaggagcgcgaaactcgccaaaagaagctggaggtggctatggaggaggaaggactggccgacgaggagaagaagctccgtaggagccagcacgcacgaaaagaaacggaattcctgagactgaaaagaaccaggttagggttggatgacttcgagagtcttaaagtcattggcaggggagcctttggggaggtgcgcctcgttcaaaaaaaggatacaggccatatttacgctatgaaaattctacgaaaaagcgatatgctggaaaaagagcagtag

SEQ ID NO: 17898 - DNA, 21 bp, synthetic construct
  source 1..21: mol_type = other DNA; note = Synthetic coding sequence
atggcacacgagatgatatag

SEQ ID NO: 17899 - DNA, 2199 bp, synthetic construct
  source 1..2199: mol_type = other DNA; note = Synthetic coding sequence
atgggcttccgcgatgaagcagcgggctattttcataaggctgtaaagttgaaccccgacttttctgatgcgaaggaaaacttctatcgagttgccaattggctcgtcgagaggtggcactttattatgttaaatgacactaaaaggaataccatttataatgccgcaatccaaaaagcagtgtgcctcgggtccaaaagcgtattggatattggagccggcactggaatcctgagtatgttcgctaagaaggccggggctcacagcgtctacgcctgtgagttgagcaaaactatgtatgaattagcttgcgatgtcgtggccgctaataagatggaggcgggcatcaaattgttgcacacgaaatcgctcgacatagaaattccgaagcatattcccgaaagggttagtctggtggttactgaaacggtagacgcaggcctattcggtgagggtatagtcgagtcccttatacacgcctgggagcatctcctgctgcagccaaagaccaaaggggaatccgcgaattgtgagaagtatggaaaagtaattccagcatccgccgttatctttggcatggctgtcgagtgcgcagaaatccgcagacatcatagggtggggatcaaagacatcgcaggcattcacctgccaaccaatgtcaagttccagtcccctgcttactcgagtgttgataccgaggagacaatcgaaccctacacaaccgaaaaaatgtctcgggtcccgggaggatacctggctctgacggaatgcttcgaaattatgactgtggatttcaataaccttcaagagctcaagagccttgctactaagaagcccgataagatcggaattcctgtgattaaggaaggcatactggatgctatcatggtttggtttgttctccagctggacgatgaacattctctgtccacatccccctctgaggaaacctgctgggagcaagcagtctatcccgtgcaagatctggccgattactggataaaacctggtgatcatgtaatgatggaggtatcctgccaagactgctacctaaggatccagagcatcagtgtactgggtcttgagtgtgagatggatgtggccaagtccttcacgcagaataaggatctcctttcattggggaatgaggccgaactgtgctcagccctggccaatttacagacctccaagccagacgcggtggagcagacatgtatcctggagtccacagagattgcgctgttgaacaacatcccttaccacgaagggttcaaaatggctatgtcaaaggtacttagctctctgacacccgaaaagctttaccagaccatggatacccattgccaaaacgagatgtcctccggaactggccagagcaatacagtccaaaacattctggaacccttctacgtcctggatgtaagcgagggcttcagcgtcctacccgtaatcgcggggacccttgggcaagtcaaaccttactcgagtgtggaaaaagaccagcatcggattgccctggacctgatttctgaggccaatcacttccctaaggagacgctggaattctggcttcgccacgtggaagatgaaagtgccatgctgcaaagacccaagtcggacaaactctggtccatcataatcttggacgtgatcgagccaagcggcttgatacagcaggagattatggagaaagctgcgatctccagatgtttgctacagagcgggggaaagatattcccccagtacgtactgatgtttggcctgctagttgaaagccaaactttgttagaggaaaacgcggttcaggggaccgagaggacgctgggactcaatatcgctccattcatcaaccagtttcaggtgccaattagggtgttcttggatttatcttcgctcccttgtatcccccttagtaaacctgtggagctgctccgtctggacctgatgacgccatacttgaatacatctaacagagaggtgaaggtgtacgtttgtaaaagcggcaggcttaccgctattcccttttggtaccatatgtatctggacgaagagattaggttagacacctcttctgaggctagccattggaagcaagccgctgtggttcttgacaaccccatccaagtagaaatgggtgaagagctggtactgagcattcagcatcacaaatctaacgtcagcatcaccgtgaaacagtag

SEQ ID NO: 17900 - DNA, 1554 bp, synthetic construct
  source 1..1554: mol_type = other DNA; note = Synthetic coding sequence
atgtgctccttggcctcaggggctactggcgggaggggggccgtggaaaacgaggaggatctcccagaactgtcggatagcggggacgaagcagcttgggaagacgaagacgacgccgacctgcctcatggaaagcaacagacaccctgcctgttttgcaaccggttattcacctcagccgaggagacattttcccactgcaagtccgagcaccagtttaacatcgattctatggtccataagcatggcctagaattctatggctacatcaagcttattaatttcatccgcctgaagaacccaaccgtggagtatatgaactctatctacaatcctgtgccctgggaaaaggaggagtatctgaaaccagtgctggaggacgacctgttgcttcagtttgatgttgaagatttatacgagcccgtgagtgtgccttttagctatccaaacggcttatctgagaacacgagcgtcgtggagaagcttaagcatatggaggcaagagcgctttcagcggaggctgctctggccagagcccgggaagacctgcagaaaatgaagcagttcgcgcaggactttgttatgcataccgacgtacgtacgtgctcctcttctacatcagtgatcgctgacctgcaggaggatgaggacggagtctacttctcctcctatggccattatggcatccacgaggaaatgctgaaggacaagataaggaccgaaagctatcgagattttatctatcagaatcctcatattttcaaggataaagtggttctggacgtgggttgcggaaccgggattctcagtatgttcgccgccaaggcaggggcaaagaaagtcctgggcgtggatcagtcagagatcctctatcaggccatggatattattagactcaacaaactggaggacacgattacactgatcaagggtaagatcgaagaagttcatctgcccgtggagaaggttgacgtgattattagcgaatggatggggtactttctacttttcgaatcgatgctggatagcgtgctctacgcgaagaacaagtacctcgcgaaaggcggatctgtatatccagacatatgtactatcagcttggtcgccgtttccgacgtgaataagcacgcagatcgtatcgcattctgggacgacgtctacgggttcaagatgtcctgtatgaagaaagccgttatccctgaggccgtagtggaggtccttgatcccaagacactgatctctgagccctgtgggataaaacatattgactgccataccacaagtatatcagacctggagttctcctctgacttcacattaaagatcactcgcacatcaatgtgtaccgcaatcgccggttacttcgatatttatttcgaaaaaaattgccataatcgggtagtattctctaccgggccgcagagtactaagacccactggaagcagacagtcttcctgttggagaaacccttcagtgttaaggctggggaagcactgaaggggaaggtgaccgtgcacaaaaataaaagagaggtgctgatcgtgggtatttag

SEQ ID NO: 17901 - DNA, 1560 bp, synthetic construct
  source 1..1560: mol_type = other DNA; note = Synthetic coding sequence
atggaacaagaaaagtttgacttgcaaaaacaacacaccgaaaacattcaggaacttttagaagacacgaacgttcggctgaataaaatggaaagcgagtacatggcccagactcagagtaccaaccacatgatcaaagaattggaggcccgcgttcagcaactgactggagaagctgagaattccaatctacagcgccagaaactaatacaggagaaagctgagttggaaagatgctatcagattacctgttctgagctgcaggaggtgaaggctcgtcgaaacacactgcataaagaaaaagaccaccttgttaatgattatgagcagaatatgaagctacttcagacgaaatatgatgccgatatcaaccttctgaaacaggagcacgccctcagtgcatcgaaggcaagttctatgatagaagaattggagcagaacgtttgccagctaaagcagcagctacaggagtcggaacttcagcgcaagcagcagctgcgggatcaggagaacaaattccaaatggaaaaatctcatctcaaacacatctatgaaaaaaaagcccacgatcttcagtctgagctagacaagggcaaagaggatacacaaaaaaaaattcacaaattcgaagaagcccttaaggaaaaagaagagcagcttacccgcgtgaccgaagtgcagaggttgcaagcacaacaggccgatgccgcactggaggagttcaaaagacaagtggagttaaactccgagaaagtgtacgctgaaatgaaagagcaaatggaaaaggtcgaagctgacttgactcgatccaagtccctgcgcgagaagcagtctaaagaatttctgtggcagctggaggatatccgccagagatatgagcagcagatagttgagctaaagcttgagcacgaacaggaaaagacccatctcttgcagcagcataacgcggaaaaggattcactggtgcgagatcatgagagagagatagaaaatctcgagaagcagctccgagcggctaacatggagcatgagaaccaaattcaggagtttaaaaaacgtgacgctcaagttattgcagatatggaggcgcaggttcacaagctgcgagaagagctcatcaacgtgaactcacagcgcaagcagcagttggtggagctgggcttactccgggaagaggagaaacaacgggcgacgagggagcacgaaattgtggtcaataagctgaaggcagagtccgagaagatgaaaatcgagctcaagaagacccacgccgctgagacggagatgactctcgagaaggtcttgcaggatgagctggagaaccggagcaaccaggtgaggtgtgctgagaagaagctgcagcataaggagctggagtcacaggagcagatcacctacattcgacaggaatacgagaccaagctgaaaggtttgatgcccgcctcactacgccaggaattggaagataccattagttccctcaaatctcaagtgaatttcttacagaagagagcatccatcctgcaagaggaactaacaacttaccaggggaggcggtag

SEQ ID NO: 17902 - DNA, 1743 bp, synthetic construct
  source 1..1743: mol_type = other DNA; note = Synthetic coding sequence
atgaataatatccatgtcgagaacgagtccctcgacaacttcctgaaggaaactaataaggagaacctgctcgatattctgacggagcctgagcgaaaacccgacccaaagctttacacaaggtcgaagccaaagacagactcttacaaccagaccaagaattcactcgttccgaagcaggcactggggaagtcatcggtgaacagtgctgtgctgaaggatcgcgtcaacaaacagttcgtaggcgagacacagagccgcactttccccgtaaagagtcagcaactttccaggggagctgacctggcgcggccaggggtcaagccttctcggaccgtgccgagccacttcattagaacccttagcaaagtgcagtctagtaagaagcctgtggtaaagaatatcaaagatatcaaggttaacaggagtcagtatgaaagaccaaacgagaccaagattcggagctatcctgtgacagaacagcgtgtgaagcataccaagccccggacctatccaagcctcttgcagggagagtacaataataggcatcctaacattaaacaggatcagaaatccagccaggtgtgcatcccacagactagctgtgtgctccaaaagagtaaggcgattagccagaggccaaatctgaccgtgggccgattcaactcggccatcccttcgaccccaagcatccggcccaatggcacgtctggaaataagcacaataacaacggatttcagcagaaagctcagaccctggactcgaaactaaagaaggcggttccccagaatcactttttgaacaaaaccgcaccaaagacgcaggctgacgttacgaccgtcaatgggacccaaacaaatccaaacataaagaaaaaggctaccgccgaagacagacgcaagcagcttgaagagtggcagaagtctaagggcaaaacgtataagcgtcctcctatggagctgaagacaaagcgcaaggtgattaaggagatgaatattagcttctggaaatccatcgagaaagaggaagaagagaaaaaggcccagctggagctctcaagcaaaatcaataacacactgacagagtgcctgaatctaattgaggggggcgttcctagcaacgaaatcctgaacatcctgagcagtatccccgaggctgagaaattcgctaagttttggatttgtaaggcaaagttgttagcttcaaagggcacatttgatgtcatcgggctctacgaagaagccataaagaatggagctacccccattcaggagctgcgtaaagtagtcctgaacattctgcaagattccaaccgaacgactgaaggcattaccagcgattccctggtggctgaaacttctataacctctgtagaggaattagccaagaaaatggagtcggtcaaatcttgcctgtctccaaaagagcgggagcaagtgacagcaacacctcggatcgctaaggccgagcagcacaactaccctggaattaaacttcagattggccccatccccaggattaatggcatgcctgaggttcaggatatgaaattcattactcccgtgaggcgcagctcccgaatcgaacgggcggtgagccgctacccagagatgcttcaggagcacgatctggtggtggcatcgttagacgagttgctcgaggttgaggaaactaagtgcttcattttccgaagaaacgaggccctgcctgtcacgctgggattccaaactccagagagctag

SEQ ID NO: 17903 - DNA, 705 bp, synthetic construct
  source 1..705: mol_type = other DNA; note = Synthetic coding sequence
atgtatatggacttggtagacggcatctttctgaaccaaatcatgctccagatcgatccgaggccgaccaaccagcggatcaacaaacatgtgaacaacgacgtgaaccttagaattcagaatcttacaatactggtacgcaatatcaagacgtattaccaggaagtgctacaacagctgatcgtgatgaacctacccaatgtcttaatgattgggcgggaccctctctccggcaaaagtatggaagagatcaagaaggtgcttcttcttgtgctcggctgtgccgtgcagtgcgaaaggaaagaagaattcatcgaacgtattaaacaactggacattgagacacaggcgggcatcgtagcacacatccaggaagtaacacacaatcaggagaacgttttcgacttacagtggctggagttgcctgacgtcgcccctgaagaattagaagccctgtctcgatcaatggtgttacacttgcggcgactgattgaccagagggatgagtgtactgagctgattgtggacctcacccaggagcgagattacctacaagcacaacaccctccaagccccatcaaaagctccagtgccgactcgacaccatcccctacatcaagcctgagctccgaggacaagcagcacctggccgtagaattggcggatactaaggccagattaaggagagtgcgacaggagctgtag

SEQ ID NO: 17904 - DNA, 1161 bp, synthetic construct
  source 1..1161: mol_type = other DNA; note = Synthetic coding sequence
atgaccgatatccggaaaattaggttgggggagcggttggtagaggtattctcagcggagaaggtctatatggttagactcagaaacccactgggcaggcaggaatggtccgggccatggagcgaaatctccgaggagtggcagcaacttactgcttcggacagaaaaaatcttggcctcgtgatgtctgatgacggcgaattctggatgtctctggaagacttctgcagaaactttcacaaactaaacgtctgccggaacgtgaataaccccatctttggacggaaagagcttgaatccgtgctgggatgttggactgtggacgacgatccattgatgaatcggtctggcggatgctacaataatagggacacatttctgcaaaacccccaatacattttcacggttccagaagatggacacaaagtaattatgagtctccagcaaaaggatctgcggacttaccgtcggatggggcgaccggataactacattataggctttgaactgttcaaagttgaaatgaacaggaagtttaggcttcaccatctgtatatccaggaacgggcaggaacatcgacctacatcgatacaagaacggtgttcttgagcaagtaccttaagaagggtaactatgtactcgttccgaccatgtttcagcatgggaggacatctgagttcctcctgcgcatcttcagtgaagtgccagtgcagctgagggaacttactctcgatatgccaaagatgtcctgctggaacctggcccggggctacccgaaagtggttacccagatcactgttcacagcgctgaggatttagagaaaaaatacgctaacgaaaccgttaatccctatttagtgataaagtgcggcaaggaagaggtgcgctcacctgtgcagaaaaacaccgtgcatgcaatctttgatactcaggccattttttatcgtcgaaccaccgacatcccgattattgtgcaggtgtggaacagtcggaagttctgtgaccagttcctggggcaagtcacactcgatgcagatcccagcgattgtagagatctcaagtccctatatttgcgcaagaaggggggacccacagcgaaagtcaagcagggccacatcagtttcaaggtaatctcctcagatgacctgacggaattgtag

SEQ ID NO: 17905 - DNA, 966 bp, synthetic construct
  source 1..966: mol_type = other DNA; note = Synthetic coding sequence
atgaccgaattatcgctgcagaaggagcagctgcagttgaagatcattgaaattgaggatgaagcagagaagtggcaaaaggaaaaggaccgcatcaaatctttcacaaccaacgaaaaggcaatactggaacagaacttccgggatctggtgcgggacctggagaaacaaaaagaggaggttcgagctgcgctggaacaacgtgagcaagacgctgttgaccaagtcaaagttattatggatgcattggatgagcgcgccaaagtactgcacgaggacaagcaaactagagagcagcttcacagcatatcagattctgtactgtttctccaggagtttggcgccttaatgagcaactattccctcccacccccactgcctacttatcacgtgctgttggagggggagggcctggggcaatccctcggtaatttcaaagatgacctgctgaatgtctgcatgaggcacgttgaaaaaatgtgtaaagcagacctctccagaaatttcatcgaacgcaatcatatggagaatggcggagatcataggtacgttaacaactataccaactcatttggaggtgaatggtctgcgccagacacaatgaagcgctacagtatgtacctgactcctaagggcggagtcagaacatcttaccagcccagtagtcccgggcgcttcaccaaagagactacgcagaaaaatttcaacaacctctatggcactaaaggaaattatacctcacgagtatgggagtactcctcttcaattcagaatagcgacaacgacctccccgtcgttcaggggagctcgagttttagccttaagggatacccatcattgatgagatctcaaagtccaaaggcccagccacagacatggaaatccggcaagcaaacgatgctcagccactatcggcccttctatgtgaacaagggaaatggaatcggcagcaacgaggccccttag

SEQ ID NO: 17906 - DNA, 687 bp, synthetic construct
  source 1..687: mol_type = other DNA; note = Synthetic coding sequence
atgtaccgtcagcggtttctctatagcctgtatcggcacacacattgggtgcgctgtgccaagttcagccccgacggtagactgatcgtctcctgttctgaggacaagacaatcaagatatgggatactacaaataaacaatgtgtgaataatttttcagattctgtgggcttcgcaaacttcgtcgatttcaacccaagcggaacctgtatcgccagcgccggatcagaccagacagtaaaggtttgggacgtgcgcgtgaataagctgctgcagcactatcaagttcatagcggcggggtgaattgcatctcgttccacccctccggcaactacctcattactgcatcgagtgatggaactctgaaaatcctcgatctgctcgaaggaagactgatctacacactacaaggacacactgggcccgtttttaccgtttccttctcaaaaggcggcgaattgttcgccagcggtggcgcggacacgcaggtcctgttatggaggacaaactttgacgagctgcactgcaagggcctcacaaagagaaacttgaaaagactgcatttcgactctccgccccaccttctggatatttatccccgcaccccacatccgcacgaggaaaaggtagaaaccgtggaagattttttcttacacctgctgcgactcatccagtccttgaggtag

SEQ ID NO: 17907 - DNA, 1686 bp, synthetic construct
  source 1..1686: mol_type = other DNA; note = Synthetic coding sequence
atgcgcgccgtacgacggcacttgttcccccagcatagcgccccagggcggggggttgtttgggagtggctgagcgatgacggcagttggaccgcatatgaagcatctgtgtgcgattacctggaacagcaggtggcccgcggaaaccagctggtggacctggctccactgggctacaactataccgtcaactacaccacccacactcagactaataagacgagcagcttctgtagaagcgtgcggagacaggcaggacctccatatccggtgacgaccataatagcacccccaggccatacgggggtggcctgtagttgtcaccaatgccttagtgggagcagaacggggcccgttagtggtcgctacagacactctatgaccaacctaccggcttatcccgtgccacaacatcccccccatcggaccgccagcgtcttcggaactcaccaagcctttgccccttacaacaagccctctcttagcggggctaggagtgcaccacggttgaacaccaccaacgcgtggggagccgcaccaccgtccctggggagccagccgctgtacaggtctagcctatctcacctcggaccccagcatctccccccaggttcatcaacatctggcgccgtgtccgcatccctccccagcggaccgtcctcatcacctgggtccgtgcccgcgacggtgccaatgcaaatgccaaagccatccagggtgcagcaagccttggccgggatgactagtgtgctcatgtctgctattggattgcccgtgtgcctctcccgggctcctcagccgactagtcctcccgcttcaaggctggcaagtaagagtcatggctctgtgaagaggttgaggaagatgagtgtcaagggcgcaacacccaagcctgagcctgagcctgagcaagttattaaaaattatacagaggaactcaaggtgcctccggacgaggattgcattatctgtatggaaaagcttagcacagcctcaggatactcagacgttaccgacagtaaggcaatcgggagcctggcggtgggtcatctgaccaaatgcagccatgccttccacctcctgtgcctactagctatgtactgcaacggaaacaaggacggctcactacagtgcccgagctgcaaaaccatctatggggagaaaacgggcactcagccccagggcaagatggaagtgttgaggttccagatgtctctgccgggtcatgaagattgtggcacaattctaattgtgtactcaataccccacggtatccaggggccagagcatccaaatcccgggaagcccttcactgcccgcggatttccgaggcaatgttatttgcccgacaatgcccagggacgcaaggtgctggagcttctcaaggttgcatggaaacggcgcttaattttcacagttgggacgtcctctaccacgggggaaacagatacagtcgtatggaacgagattcatcacaaaacagaaatggatcgcaacatcacagggcacggctaccccgaccccaactatttgcagaacgtacttgccgagctggcggctcagggcgtgaccgaagactgcctggaacagcagcatgcccgcctgtggtggccaccccgctgtcctatggctggctgggtggcccgtcaggaagtcccctcacctcgaggatgggaagtgtgttag

SEQ ID NO: 17908 - DNA, 2565 bp, synthetic construct
  source 1..2565: mol_type = other DNA; note = Synthetic coding sequence
atgaaagtggaggcatgtacatgggctggatatagtggcctatatgaggctatcgaatcttgggacttcaaaaaaatcgagaaactcgaggaataccggttgttgctgaagagactgcaaccagaattcaaaacaagaataatcccaaccgacattatttctgacctgtcggagtgcttgattaatcaggaatgcgaagagatactgcaaatctgttccaccaagggtatgatggctggtgcggagaaactggtagagtgcctgttaagatcagataaagaaaactggcctaagaccctcaaactggcgcttgaaaaggaaagaaataagttctctgagctgtggattgtcgagaagggtatcaaggacgtggaaaccgaagacttggaagataaaatggaaactagtgatattcagatcttttaccaagaagatccagaatgccaaaatcttagtgaaaattcatgccctccctccgaggtgagtgatacaaacttgtactccccctttaaacctaggaattaccagcttgagctggccctgcccgctatgaaaggcaagaatacaataatttgcgccccgaccgggtgcgggaagaccttcgtgtctctgttgatttgcgagcaccacctcaaaaagttcccacagggacagaaagggaaggttgtcttttttgccaatcagataccggtgtacgagcagcagaagagcgtgttttcaaaatacttcgagagacatggctaccgcgttaccggcatctctggcgccacggccgagaacgtccctgtggagcagatcgttgaaaacaacgatatcatcatcttgacccctcagattctggtaaataatttaaaaaagggaacgattccaagcctgtcaatattcaccttgatgattttcgacgagtgccacaatacaagtaagcagcacccttacaacatgatcatgttcaactatttggaccagaagctgggaggtagcagcggaccactgccacaggtgatagggctgaccgcttccgtcggcgtgggcgacgcaaagaatacagacgaggctctggactacatctgtaagctctgcgcttctctagatgctagcgtgattgctactgtcaaacataacctcgaggagctcgagcaggttgtatacaaacctcagaagttcttccgcaaggttgagagcaggatcagcgataaatttaagtacattatcgcccagctgatgcgcgatacagagtccttggccaagcggatatgcaaagaccttgagaatctgagtcagatacagaaccgggaatttgggacacagaaatatgaacagtggatagtgaccgtccaaaaggcgtgcatggtttttcagatgccagataaagatgaggaaagtcggatatgtaaggcactgtttctttatacctcgcacctgaggaaatataacgacgcactcatcatttctgagcacgctcgaatgaaggacgcacttgattacttaaaagacttcttttccaacgtaagggccgcgggctttgatgagatcgaacaggacctgacccagcgtttcgaggaaaaacttcaggagctagaaagtgtctctcgggacccctccaacgagaaccccaaactggaggacctctgttttatactacaggaggaataccacctgaatccagaaactattaccattctgtttgtgaagacacgagcactcgttgatgcactgaaaaactggatcgaggggaaccccaagttatcctttctcaaaccaggtatcttaacgggtagaggaaagactaatcaaaacactggcatgactctgcccgctcagaagtgtatcctggatgccttcaaggcatctggcgaccataatatcctgatcgcaactagtgtagcagatgaagggattgatatagcacagtgtaatttggtaattctctacgagtacgtcggcaacgtcattaagatgattcagactcgcgggcggggccgagcccgaggttccaaatgttttcttctgacaagtaacgctggagtgatagagaaggagcagattaatatgtacaaagaaaaaatgatgaacgactcgatcctccggttgcagacatgggacgaagctgttttcagagagaagatactccacatccagacgcacgaaaagtttattcgcgattcccaggaaaaacctaagcccgtgccggacaaggagaataagaagttattgtgccggaaatgtaaggccttggcctgctatacagcagatgttagggtcatagaggaatgtcactacaccgtgcttggagacgcgttcaaagagtgctttgttagtagaccccatcctaagcctaaacaatttagctccttcgagaagcgggccaagatattctgcgctaggcagaactgcagccacgactgggggatacatgtcaagtataaaactttcgagatcccggtgataaagatcgagagcttcgttgtggaggacatcgccaccggggttcagaccctgtactccaaatggaaagatttccacttcgagaaaatcccattcgatccggcagaaatgtccaaatag

SEQ ID NO: 17909 - DNA, 813 bp, synthetic construct
  source 1..813: mol_type = other DNA; note = Synthetic coding sequence
atgcaaatagagcacatcattgaaaacattgtggcagtgaccaaagggctgtcagaaaaactgccagaaaagtgggagagtgtcaagctgctgttcgtgaagacagaaaagtccgccgcactgcccattttttctagtttcgtctcaaactgggacgaggctaccaagcggtctttgctcaacaagaagaaaaaggaggcacgtagaaagcgccgagaaaggaacttcgaaaagcagaaggagagaaaaaagaagcggcaacaagcaagaaagactgcaagtgtgttgagcaaggacgatgtggcccccgaaagcggcgacacaactgtgaagaaacccgagtctaagaaggagcagactcccgaacatggaaaaaagaaacgtggccggggcaaggcccaggtgaaagcaactaatgaaagcgaagacgagattccgcagttggtgccgatcggaaagaagacaccagctaatgagaaggtagaaatccagaaacatgcaacggggaagaagtcccctgcgaaaagcccaaatccttccacaccccgtggcaaaaagcggaaggcgctccctgctagtgaaacgccaaaggctgcagaatcagaaaccccgggtaagtctccggaaaagaaaccgaagataaaggaggaagccgtgaaggagaaaagtcctagtctggggaagaaagatgcccggcagaccccaaagaagcctgaggctaaattcttcacgacaccttccaagtcagtccgtaaggctagccacacgcctaaaaagtggccaaagaagcccaaagtcccccaaagtacttag

SEQ ID NO: 17910 - DNA, 1059 bp, synthetic construct
  source 1..1059: mol_type = other DNA; note = Synthetic coding sequence
atgagctcacgtaaactcagcggccctaagggaagacggctctccatccacgtggtcacatggaatgtagcttctgctgctccacccctagatctgtctgatctcctgcagctgaacaatcgaaatctgaatcttgacatttacgttatcggcctccaagaactcaatagcggaatcatctctcttctaagcgatgctgcatttaacgacagctggtcaagcttcctgatggacgtgctgtccccactttctttcatcaaggtgtcccatgtacggatgcagggaatcttattgctggtatttgcgaagtatcagcatctaccctacatacagatcttgagcaccaaatcaacgcccacaggactcttcgggtattggttgagcatagccaagaaacatgacccactgcttagagaatttcaggagggccgcctactgttccccccaacctacaaatttgacagaaattccaatgattacgataccagcgagaaaaagcgcaagcccgcatggaccgaccgtattctttggcgcctgaagagacaaccatgtgcagggcccgacactcccatcccacctgcctctcatttctccctgtcgttgaggggctattcttcacacatgacatacgggattagtgaccacaagcccgtgagcggtacctttgatctggaattaaaaccgctcgtgagcgctcctttaatagtgttaatgccagaagacctttggactgttgagaacgacatgatggtgtcttactcgtccacgtccgacttcccttcctctccttgggattggatcggtctgtacaaggtagggctaagggatgtcaacgactatgtgagctacgcctgggtgggcgattctaaagtgagttgctcggacaacctcaatcaggtctacatcgatatcagtaatatcccgacaaccgaggacgagttcttgctgtgctattatagtaatagtttgaggtcagttgtgggaatctctcggccatttcagataccccccggatccctgagggaggatcctcttggagaagctcaaccacagatctag

SEQ ID NO: 17911 - DNA, 375 bp, synthetic construct
  source 1..375: mol_type = other DNA; note = Synthetic coding sequence
atgactggctcttgttgcgggagcactttttcctcattatcctacggtggcgggtgctgccaaccctgttgctgccgcgatccatgttgttgtcgacccgtaacatgccagaccacggtgtgccgtcccgtgacttgtgtccccagatgtaccagaccaatttgcgaaccctgtcggagacccgtttgctgcgatccgtgctccctgcaggaggggtgctgccgtcccattacttgttgcccatcctcatgcactgctgttgtgtgtcgcccatgttgctgggcgaccacctgttgccagcctcctgtgtccgttcagtctccttgcgggcaacctactccttgtagtacaacatgtcggacctcatcctgttag

SEQ ID NO: 17912 - DNA, 927 bp, synthetic construct
  source 1..927: mol_type = other DNA; note = Synthetic coding sequence
atgaaacgggcacaccctgagtattcttcatccgactcggagctcgatgaaaccatagaggtggagaaagagtccgctgacgaaaatggaaatctcagcagtgccctaggatctatgtccccgaccacttctagccagatactggctagaaaaaggcggagaggcatcattgagaagagaaggcgagatcgcataaacaatagtctctcagagctccggcgcctggttccatccgctttcgagaagcaggttatggaacagggaagcgctaagctggagaaagcagaaattctccagatgacggtggaccatctgaagatgcttcacactgccgggggaaagggctattttgatgcacatgcgttagccatggactatagaagtctgggttttcgcgagtgtctggccgaggtggctcgttacttgagcattatcgaagggctggacgcttctgacccgctgagggtcagactggtgagtcacctgaataactatgcttcccagagagaggcagcatccggcgcacatgcaggccttggccacatcccttggggaactgtgtttggtcaccacccgcatatcgctcaccctttactgttgccgcaaaacgggcacggtaacgctgggacaactgccagtcctaccgagcctcaccatcaaggacgattaggctcagcccacccggaagccccagcgttgcgtgcacctccttccggctccctcggtcctgtcctacctgtggttactagtgcttccaaactgtcacctcccctgctgagctcagtcgcatccctcagtgcctttccattttcgttcggaagctttcatctgctgagcccgaacgctctctctccttctgcacccacacaggcagccaacctgggaaaaccatatagaccgtgggggacagagattggggcattctag

SEQ ID NO: 17913 - DNA, 2943 bp, synthetic construct
  source 1..2943: mol_type = other DNA; note = Synthetic coding sequence
atgaccgagggtaggcactgtcaggtgcacctccttgacgacaggaggctggagctgctggtgcaacctaagctgctggctcgggaactgctggacctcgtcgcttcacattttaacctgaaggaaaaggagtatttcggaatcacatttatcgacgataccggccagcagaactggttacagctggaccatcgggtgttggaccatgatctccccaagaaacctggtccaacaatactgcatttcgccgttcggttttacatcgaatcgatctccttccttaaagataagacgaccgtagaactcttcttcctgaatgccaaagcatgtgtacacaaagggcagatcgaagtggagagcgaaactatcttcaagctcgccgcttttattctccagtctccgaaggtaagcctcacccatgatgagaacgcaagaaaggatctcaagactctccctgcctttcctactaaaaccctccaggaacatccgtctttggcatactgcgaggatcgggtgatcgaacactacctgaaaatcaaaggtttgactcgcgggcaggcagtggttcaatacatgaaaatcgtggaagctctgccaacctacggcgtccattattacgcagtcaaggataaacagggacttccatggtggctcgggatcagctacaagggtattggccaatatgacatccaggataaagtcaagccgagaaagctatttcagtggaagcagcttgaaaatctatattttcgtgagaagaagttcgcggtcgaggttcacgacccccgcaggatcagtgtgtcaagaagaaccttcggccagtcaggcttgtttgtgcagacatggtatgcaaatagcagtctcatcaaatccatctgggtcatggccatcagccagcaccagttttatctagaccgaaagcagtccaaggctaagattccctcagcgcgatccctggatgaaattgccatggacctcactgaaactggcactcaacgggccagcaagttggtgacacttgagacaaaaagccagttcataatggcctctaatggctctctgatttcctccggttctcaggattccgaggtgagcgaagagcagaagcgcgaaaagattttagaactgaagaagaaggagaagctgctccaggagaaactgctcaaaaaggtggaggagcttaaaaaaatctgccttagagaggctgaactgactgggaaaatgcccaaggaatacccactgaacatcggcgaaaagccccctcaggtaagaaggcgggttgggaccgccttcaaacttgatgataacctgctaccctccgaagaggaccctgctctgcaggagctggagagcaactttttgatacaacagaaactcgttgaagctgctaagaagcttgccaacgagcctgacttgtgcaaaaccgtgaagaaaaagagaaagcaagactataccgatgcaatgaagaaattgcaggagatcgaaaacgctattaatgagtacagaatccgatgtggaaaaaaacctagccagaaagccactgttctcccagaagatataattccttcggagagctcatctttgtccgacaccacaacttacgacgaccctagtgacgcctttacattccctggccagcggtcatcgagcgtgccgcatagccccagaattttgcctccgaaatccctgggcattgaaaggatccattttcgcaagtcgagcatcaatgagcagttcgtagatacccggcagagtagagagatgctctctacccacagttccccctataaaacactggagcgccggcctcagggaggcaggtccatgcctacaacgcccgttctcacccgcaatgcatactccagttctcacttagaacctgaaagtagttctcagcactgtcgacaaaggagcgggtccttggagagtcagtcccatctgttgagcgaaatggactcagataagccgttctttagtctgagtaagtctcagagaagcagtagcaccgagatactcgatgacggctccagctacacctcacagtctagtactgagtattactgtgttactccggtgactggcccttattatactactcagactttagacacccgcactcggggtcggcgccggtccaagaagcaaaacgtgtctacctctaactcaggaagcatgcccaatttggcacagaaagatagcctacgtaatggcgtctattcaaagagccaggagcctcctagctcatcatattacatcgcagggtatacaccctacgctgagtgtgatttctactactcagggggctacgtgtacgagaacgataccgagggccaatacagtgtgaatccatcatatagatcttcggctcattacggttatgaacgccagagagattattctagatcatttcatgaagacgaagtggatcgcgtccctcacaacccatacgctactttgcggttgcctcggaaggccgctgcgaagtccgagcatatcaccaagaacattcataaagccctggtcgcagagcatctaagagggtggtaccagcgggctagtgggcaaaaagaccaggggcactcacctcagacctcatttgattcagaccgaggctcccagcgctgtcttggttttgctggactgcaggtaccttgttccccatcatcacgcgcatcatcctactcttccgtttctagtactaacgcctcgggcaactggcgaacccagctgacgatagggctgtctgattacgaaacacccgcgcattcttcttacactagctgctatggaaacgtatacaacccattgccctcgccttccaggcagtatacggagatctcacagctggacggtacagacggaaaccagctcgaagacaacttggaaagttcagaacagcgactgttctggcacgaggactccaagccaggtaccttagtgtag

SEQ ID NO: 17914 - DNA, 2979 bp, synthetic construct
  source 1..2979: mol_type = other DNA; note = Synthetic coding sequence
atgtacggctctgctcggtctgtgggaaaagtggaacctagctctcagagcccaggcaggagcccgagactgccaagaagccctcgcctgggtcaccggagaactaacagcaccggtggttcatctggcagctccgtcggcggaggcagtggcaagacactctcaatggaaaacatccaatcacttaacgctgcttacgccacatctgggcccatgtacttgtccgaccatgagaacgtgggctccgaaacgcccaaaagtacgatgactcttggtcgaagcggaggcaggctcccttacggggttcgcatgaccgccatggggagtagtccaaatatagcgtcaagcggcgtggcgtctgatacaattgcttttggcgagcaccatctcccaccagttagcatggcatccactgtgccgcacagcctgcgtcaggcaagagacaataccatcatggatttgcagacacagctgaaggaggtgctgcgagaaaatgaccttctccgtaaggacgtagaggtgaaggaatccaaattatcctctagtatgaactcgataaaaaccttctggtctccagaactgaaaaaagaaagagccctcaggaaagatgaggcatctaagatcacaatctggaaagagcagtatagagtggtgcaggaggagaatcagcacatgcagatgacaattcaggccctacaggacgaactcaggatccaacgcgatctgaaccaattgtttcagcaggatagctcatctagaacaggggagccatgtgtcgcggaactaactgaagaaaactttcagcggctccacgccgaacacgagaggcaggccaaagagttgtttctcctccgaaagacgctggaggagatggagcttaggattgagacgcagaagcaaacactcaacgcaagggatgaatcaattaaaaagcttctcgagatgcttcagagcaagggactctcagctaaggccaccgaggaagatcatgaacgcacaagaagattggcagaggccgagatgcacgtccatcacctcgagtcactcctggaacagaaggagaaggagaattccatgttacgcgaagagatgcacagaagattcgagaatgcccccgactctgcgaagaccaaggctctgcagacagtcatcgagatgaaagacagcaaaattagtagcatggagcgtggattgcgggatttggaagaggaaatccagatgctcaagagcaatggcgctctgtctaccgaagagcgtgaagaggagatgaaacagatggaagtgtaccgctcacatagcaaattcatgaagaataagatcggccaggtcaaacaagaactgagcaggaaggacactgaactgctagcactccaaaccaagttggagactttgacaaatcagttttctgattccaaacaacacattgaagtattgaaggagtcactgacagcaaaggaacagcgggccgccattcttcagacagaagttgatgctctgaggcttcgactggaggaaaaagagactatgctgaacaaaaagactaagcagattcaggatatggcggaggaaaagggaacacaggccggcgagatccacgacctgaaagacatgctcgacgtgaaagaacggaaggtcaacgtgttacagaaaaaaattgagaacctgcaggaacaactgcgagacaaggagaagcaaatgtcctcattaaaagagcgcgtcaagtcccttcaggccgataccaccaataccgacacggctctgaccacacttgaagaagcccttgcagagaaggaacgaaccattgagcggctgaaagagcagagggacagggatgagagagaaaagcaagaggaaattgacaactacaaaaaggacctgaaggatttgaaagagaaggtgtcccttcttcagggcgacctatccgagaaagaagctagcctcttagacctgaaggagcacgccagcagccttgccagttccggcctgaaaaaggattcccgcctgaagacgctggagatcgcattagaacaaaagaaagaggagtgcctaaagatggaaagccagctgaaaaaggcccacgaagcagccctagaagcccgtgcatcccccgagatgtcagatagaatccagcacctggagcgagagatcacccgttataaggacgagagctctaaagcccaggccgaggtggacaggctcctggagatacttaaggaagtcgagaacgagaaaaacgataaagacaagaaaatcgccgagctcgagagcctgactagtagacaggttaaagaccagaacaagaaagtggccaacctcaaacataaagagcaggttgagaagaagaagagcgcccagatgctggaggaggctcgtagacgagaggataacctcaatgacagcagccagcagctgcaagattccctgcgcaagaaagatgaccggatcgaagagctggaggaggccctcagggagagcgttcagataaccgcagaacgtgaaatggtgcttgcgcaagaagaatcggccaggaccaacgccgagaagcaggtggaagagctgctaatggcaatggagaaggtgaaacaagaactcgagagcatgaaggctaagttaagctccactcagcagtctctggccgagaaggaaacacacctgacgaacctcagggcagagcgtcgcaaacaccttgaagaagtgttggagatgaagcaggaagccctgctggcagccatatccgagaaggatgcaaatattgcattgttggagttatcctcttccaagaagaagacccaggaagaggttgccgcacttaagcgggagaaagaccggctcgtccagcagctgaagcaacagacacagaatcgcatgaagctaatggcggacaactatgaggatgatcactttaaaagctcccactccaatcagacaaaccacaagccgagccccgaccaggacgaggaggaaggtatctgggcctag

SEQ ID NO: 17915 - DNA, 3138 bp, synthetic construct
  source 1..3138: mol_type = other DNA; note = Synthetic coding sequence
atgctcactgtgcaagtaaagacttcgtccgcaattgagctacctgattctttagccttcctgtggattattccaatgtggtactgcgaggggaaagagctggagaatagcccagacattcacattgtgcaggcagggaatctgcacagtctcactatcgcagaggcgtttgaagaggacaccggcaggtacagctgctttgcctccaacatatatggaaccgattcaacgagcgctgagatctatatcgagggagtttctagtagcgatagtgagggtgaccccaacaaagaggagatgaaccggatccaaaagccaaatgaggtgagctcgcctcccaccacctccgcggtgatcccaccagctgtgcctcaagcgcagcatctggtggctcagcctagagtggcaactattcagcagtgtcagtcccccaccaactaccttcaaggcctcgacggtaagccaatcattgctgccccagtcttcacaaagatgctgcagaatttatctgcttctgagggtcaacttgttgtgttcgaatgcagagtcaaaggggcgccttcccccaaggttgaatggtatcgtgagggtaccctcatcgaagactcaccggacttccgcattctccagaaacgaccggtttgcatggaacatattgaagagatttgcacactggtgatagctgaagtgtttgcggaggatagcggctgctttacatgtacggcttctaacaaatacgggactgtgtccagcattgcacagctgcatgtacggggcaacgaagatctgtcgaacaatggcagcctccattctgcaaactccaccactaacctagccgctatcgagcctcagccgagccctccacattccgagccaccttccgtggaacaacccccgaagccgaagctcgaaggggtgctggtcaaccataacgagcctcgatctagcagtcgtattgggctgcgcgtgcacttcaacctaccagaagacgataagggctcggaggcgtcctctgaagcaggagttgtgacgacaaggcagacgaggccggattccttccaggaaaggttcaacgggcaggctacaaagaccccagagccaagctctcccgtaaaggagcctccccccgtgctggccaagcccaaattggacagcacccaactgcagcagctgcacaaccaggttctgctggagcaacatcagttgcagaatccccctccaagctcccccaaggaatttccatttagcatgacagtgctcaacagcaatgcccccccagctgtaacgacctcctcaaagcaggtgaaggcaccgtcatcccagactttttccttggccagacccaaatatttcttcccgtccacaaacaccacagccgctacggtcgccccaagcagtagtcccgtgtttaccctctcctcaactcctcagactatccagcggacagtctcgaaggaaagccttcttgtatcacatccttctgtacagactaagtcacccgggggactgagtattcagaacgaacctctgcctccgggtcccactgaacccacccctccaccattcaccttttcaatcccttctggaaaccagttccagcctaggtgtgtgagcccaattcccgtctcgccaacctccaggattcagaatccggtcgccttcttaagctccgtcctccctagtttgcccgcaatacctccaactaatgccatgggcctgccccgttctgccccatctatgccttcacagggtttggctaagaaaaacactaaaagtccgcagcccgttaatgacgacaacatccgcgaaaccaagaatgctgtcattcgcgacttggggaagaagatcacattcagtgatgtaagaccgaatcagcaggaatacaaaatttccagttttgagcaacgcctcatgaacgagatcgaatttcgcctcgagcgtactcccgtagacgagagcgatgatgagatccagcacgacgagatccccaccgggaagtgtattgctcctatttttgataaacggctgaagcatttcagggtgaccgagggttccccagtcacatttacctgtaaaatcgtggggatcccggtgcctaaggtttactggttcaaggatggcaaacaaatcagtaagaggaatgagcattgtaagatgaggcgagagggtgacggaacgtgttcactgcatatagagagcaccaccagcgatgatgatggcaactatactatcatggcagcgaatcctcagggtaggatctcctgcagcggccaccttatggttcagtctctccccattcgctcaaggctgaccagcgccggccagtcgcaccggggcaggtcacgcgtccaggaacgtgataaagaacctctgcaggaaaggtttttccgaccacacttcttgcaggcccccggagatatggtcgcccatgagggtagactatgccgactcgactgcaaggtgagcggtctacctcctcccgaacttacctggctgctcaatggacagcctgtgctccctgatgcttcccataagatgctggtcagggagaccggcgtccactcactattgattgaccccctgacccagagggacgcggggacatataagtgcatagcaaccaataaaacagggcagaacagtttcagcttagagttgtcggtggtggctaaagaggtgaagaaagcaccggtcatcctggagaagctccagaactgcggcgttcccgagggtcatccggtgcgcttagaatgcagagtaattggaatgccccccccggtattctactggaaaaaggacaacgagaccattccatgcactcgggaacgaattagcatgcatcaggataccaccggttacgcatgtctccttatccagccagccaaaaagagtgatgctggctggtacacattgtccgccaagaatgaggccggtatagtttcctgcaccgcaaggctagatatctatgcccagtggcatcaccagatccctccccccatgagtgttcggccctccggcagccgctatgggagccttaccagtaagggccttgacatctttagtgctttttctagcatggagtccaccatggtctacagctgcagctctcggagtgttgtcgaaagcgacgagctttag

SEQ ID NO: 17916 - DNA, 72 bp, synthetic construct
  source 1..72: mol_type = other DNA; note = Synthetic coding sequence
gtgcgtctcgcttgggggttcgtttcagccctagggtctttccataccgccgacccagaaggtgcagcatag

SEQ ID NO: 17917 - DNA, 1608 bp, synthetic construct
  source 1..1608: mol_type = other DNA; note = Synthetic coding sequence
atggaggctcctacagtcgaaactccaccagatccctcaccaccatcagcccctgcccctgcactggtgccattgcgcgcacccgacgtggcaaggttgcgtgaggaacaagagaaagtcgtgaccaactgccaggaacgcatacaacactggaaaaaagtggacaatgattataatgccctaagggagagactgtcgacattgccggacaagttatcatataatattatggtcccctttggaccctttgccttcatgcccggaaaattagtccataccaacgaagtgactgtcctactcggggacaactggtttgccaagtgctctgcgaagcaggcagtggggttggtggaacatagaaaagagcatgtgcgcaagactattgacgatctgaaaaaagttatgaaaaattttgagagccgggtagagtttacagaggaccttcagaaaatgtccgatgcggctggggatattgtagacatccgtgaggaaataaagtgcgatttcgagtttaaggccaaacaccgaatcgcccacaaacctcactccaaacccaagaccagcgacatttttgaagccgacattgcgaacgacgtcaagtccaaagacctccttgccgacaaggaactctgggcacgcctcgaggagctggagcgacaagaagagctcctgggcgagctcgattctaagccggatacagtaatcgcaaacggtgaagatacaacgagtagtgaggaggagaaagaggataggaacaccaatgtgaacgccatgcaccaggtgacggactcccacaccccctgccacaaagacgtggcctccagtgaaccattcagtggacaggtgaattcacagctgaactgcagtgtgaatgggtcctccagttatcacagcgacgacgatgatgacgacgacgatgatgatgacgacgataatatcgacgatgatgatggtgacaacgatcatgaagcactgggtgtgggggataattccatccccacgatttatttctcacataccgtagagcccaaaagagtgcgcattaacactggaaaaaatactacgctgaagttctccgagaaaaaagaggaggccaaacgaaaacgcaagaacagcaccgggagtggccactccgcccaggaactgcctaccattcggacacctgccgatatctatcgtgccttcgtggatgtcgtaaacggcgaatatgtgccgaggaagagcattcttaagtccaggtcccgtgagaattccgtgtgtagtgatacttcggagagctctgcagctgaatttgacgacagacggggtgtgctacggtcaatatcttgtgaggaggccacatgctctgacacgagcgagtctatattagaggaggaacctcaggagaaccagaaaaaactgctgcctctttctgtgacacctgaagctttttccggaaccgtgattgagaaagaattcgtctcaccctccttgacaccaccaccggctatagcacatcccgccctcccaactattccagaacggaaagaggttctgcttgaagcttctgaggaaacaggcaagagggtttccaagtttaaggccgcgcggctgcagcagaaagattag

SEQ ID NO: 17918 - DNA, 1731 bp, synthetic construct
  source 1..1731: mol_type = other DNA; note = Synthetic coding sequence
atggaaggactgagaagaaggcgcggccgagaggcaggccctccgcagcccatggtaccactggccgtagaaaaccaggccggaggcgagggagccggcggagagctcggtatctcacttaacatgtgcttgcttggcgctctagttctgttgggcctcggcgtgctgttgttcagtggtggcctgtcagaatctgagacaggtcccatggaggaagtagagcggcaggtcctccccgatcccgaggtgttggaggcagtgggggacaggcaggacggcttacgggagcagctgcaggcaccagtgccacctgattccgtgccctctctccagaacatgggactgttgctggataaactcgccaaagagaaccaagacatcaggctcttgcaggcccagctccaagcacagaaagaggagctgcaatcgctcatgcaccagcctaagggcctggaggaagaaaatgctcagctccggggggctctccagcagggagaggcatttcagagggccttagagtcggaattacagcaactaagggctaggctgcagggcctagaggcagactgcgtcagaggaccggatggcgtgtgtcttagcggcggccgaggtccacagggcgataaggcgatccgggagcaagggcccagggagcaggagccagagctttcttttctgaagcagaaggaacagctggaggcagaggcacaggccctgaggcaggagcttgagcgccagcgacgactgctgggctccgtacaacaagacctggagcggtctctgcaagacgcttccaggggggacccagctcacgccggactggccgagctgggacaccggcttgcacaaaagctccagggactagaaaactggggtcaagacccaggcgtcagcgccaacgcatcaaaggcctggcatcaaaaaagccactttcagaatagcagggaatggtctggaaaggagaagtggtgggacggccaaagagatagaaaggccgagcattggaagcacaagaaagaagagagtgggcgcgagcggaagaaaaactggggtggacaagaagatcgggaacctgctggacggtggaaagagggtcgcccaagagtggaggagtctggctcaaagaaggagggcaaaagacagggtcccaaggaaccgcccagaaaatccggcagctttcatagttccggggagaagcagaagcagcctcgctggagggaaggtacaaaagatagtcatgacccactcccaagctgggccgagctattgagacctaaataccgtgccccacagggatgtagtggtgtcgatgaatgcgccagacaggaggggctcaccttctttggcactgagctggcccccgtacgccagcaagagctggccagcctgctgcgtacttacctcgcgcgactcccctgggccgggcaattgaccaaagagctgccacttagtcctgcgtttttcggtgaggatggcatttttaggcatgatcggctgcggtttcgggattttgtggacgccctcgaggacagcctggaggaggtcgctgtgcagcagactggtgacgacgatgaggtagacgacttcgaagactttatcttttctcattttttcggagataaggcgcttaagaaacgaagtggcaaaaaggataagcacagtcagagcccaagagccgcgggcccacgggaggggcatagccacagccatcaccaccatcatagggggtag

SEQ ID NO: 17919 - DNA, 2244 bp, synthetic construct
  source 1..2244: mol_type = other DNA; note = Synthetic coding sequence
atggccaagtataacacgggtggtaaccctactgaagatgtatccgtcaattctagaccattccgcgtgactggacctaactcaagttctggtatccaggctaggaagaacctctttaataaccagggtaacgcctcgcctccagctgggccatccaacgtcccaaaatttggttctccgaagccgcccgtggcggtcaagccatcttcagaggagaagccagataaggagcccaagccccccttcttgaagcccaccggagccggccaaagattcgggacacctgcgtctctgacaactagagaccccgaagctaaggtgggtttcctgaagcctgtaggacctaagccgatcaacctgccaaaggaggactcaaaacctacatttccatggccccccgggaacaagccctctttacactccgtaaaccaggatcatgacttgaaacccttaggcccaaagagtggaccaactcctccgacaagcgagaatgaacagaagcaagcctttccaaaactgaccggcgttaaagggaagtttatgtctgcatctcaggacctggaaccgaaacctttattccctaaaccagcctttggccaaaagccacctcttagtaccgagaacagtcatgaggatgagtcccctatgaagaatgtgagctcctccaagggaagcccagccccactgggtgtccgctcaaagtctggcccgctcaagcccgccagagaggactcagaaaacaaagaccacgctggcgaaatctcatcacttcccttccctggtgtagtcctcaaacctgccgcgagccggggaggtcctggtctctccaaaaacggcgaagagaagaaagaggaccgcaagatagatgctgccaagaacaccttccagtccaagataaatcaagaagaactggcctcaggaaccccccccgctcgcttcccaaaggctccttctaaactgaccgttggggggccctggggccaatcacaggagaaggagaaaggcgacaaaaattctgccaccccaaaacagaagcctctgcccccactgttcaccttagggccccctcctcctaagccaaatcgccctcctaacgtggatctgaccaaatttcacaaaaccagctccgggaacagcacgtccaagggacagacaagttacagtacgacttcactgccaccgcctccaccttctcacccagcaagccagcctccgctaccagcatcacatcctagtcagccccccgtaccctccttaccccctagaaatatcaagcctcctttcgatcttaagagccccgtgaatgaggacaaccaggacggcgtgacacactccgatgtagtgattccactggaccatgagcaggatagcgagggcgagacttatgaagacatcgaggcttccaaggaaagggagaaaaaacgagagaaagaggagaagaagcggttggagctcgaaaaaaaggagcaaaaggagaaggaaaaaaaagaacaagagataaaaaagaaatttaagttgacgggacctatacaggtaatccacctcgcaaaagcttgctgcgacgtaaaaggcggaaaaaatgaactgtccttcaaacagggcgaacagatcgagataattagaatcaccgacaatcctgagggcaagtggctcggccggaccgctagaggctcgtatggctatatcaagaccaccgccgtcgaaattgattacgattcactgaaactgaagaaagacagtcttggagccccaagccgtccaatagaggatgaccaggaagtatatgatgatgtcgctgagcaggacgacataagcagccattctcagtccggctcgggggggattttccccccccctcccgacgatgatatctacgacggcatcgaggaggaggatgccgatgatggcagcacactgcaggtccaggagaaatccaacacctggtcatggggtatccttaagatgttaaaaggcaaggacgataggaaaaaaagcatcagggagaagcccaaagtttcagattcagataataatgaagggagctccttccccgctcccccgaagcagctcgatatgggcgatgaggtttatgatgacgtcgacacgtctgactttcccgtctcttccgctgagatgtcacaagggacaaacgtgggtaaagctaagacggaagaaaaggacctgaagaagctcaaaaaacaggagaaagaggaaaaggacttcagaaagaagttcaaaaagtag

SEQ ID NO: 17920 - DNA, 1566 bp, synthetic construct
  source 1..1566: mol_type = other DNA; note = Synthetic coding sequence
atgacgagtgccttcaagcttgactttctgccagatatgatggttgaaggaagactgctggtgccagaccgaatcaatggcaccgcaaataagatgaacggcgcactggaccattccgatcagccggaccctgacgcaataaagatgtttgttggacaaatccctcgatcttggtcggagaaagaactgaaagagctgtttgaaccgtatggagcggtgtaccagatcaacgtgctccgagatcgatcacagaatcccccacagtccaaaggctgctgttttgtcactttttatacccggaaagcagctctagaggcccaaaatgccctccataatattaaaacccttccagggatgcaccaccctattcaaatgaagcccgcagactctgagaaatctaatgccgtagaggatcgtaagctgttcatcggaatggtgagtaagaagtgtaatgaaaatgatattcgtgtaatgttttccccatttgggcagatcgaggagtgcaggattctgcgcggtcccgatgggttgagcaggggatgcgccttcgtgacgttctctaccagagccatggctcagaatgccatcaaagcgatgcaccaatcacagactatggaggggtgctcaagccctatcgtggtcaaattcgctgacactcagaaggacaaggagcaacggcgcctgcagcagcaactggcacagcaaatgcaacagcttaatactgccacttgggggaacctgaccggacttggggggctgaccccacaatacctcgctttgctgcagcaggcaacctcctctagcaacctcggcgccttttccggtatccagcagatggcaggaatgaacgcattacagttgcagaatttggctactctcgccgcagccgccgcagccgcccaaacatctgccacaagtacaaacgcaaaccctttgtcaaccaccagctctgccctcggcgctctaacctcccctgttgctgcttctacccctaactcaacagcgggggccgccatgaactcgcttaccagcctgggtactcttcagggattggcgggagcaactgttggcctgaacaacatcaatgcgttggctgtggcacagatgctcagcggcatggctgcactgaacggcggtctgggagctactggactaacaaatggtacagccggcacaatggacgccctgacacaggcatacagcggtatacagcagtacgccgcagcagcacttccaactctctacagccagtcccttcttcagcaacagagcgcggccgggtcccagaaggagggccctgaaggcgctaatctcttcatctatcatctgccacaggaatttggtgatcaggatatcctgcagatgttcatgccatttggtaacgtgatttcagcgaaagtatttattgataaacagactaacctaagtaagtgtttcggatttgtgtcgtatgacaacccagtcagtgcacaggccgctattcaagccatgaacggattccagatcggtatgaaacgtctgaaggttcaactgaagaggagtaaaaacgacagcaaaccttactag

SEQ ID NO: 17921 - DNA, 1710 bp, synthetic construct
  source 1..1710: mol_type = other DNA; note = Synthetic coding sequence
atgcttcgggacatgactggacttccccacaaccggaaatgtttcgactgcgatcaacggggacccacgtacgtcaatatgacagtcggctccttcgtgtgcaccagttgtagcgggtccctccgcggattaaatcccccgcatagggtgaaaagcatcagcatgaccacgtttacccagcaggagatcgagttcctccagaagcacgggaatgaggtttgcaagcagatatggctggggctctttgatgatcggtcgagcgccatccccgatttccgagacccacaaaaagtgaaagagtttttacaggaaaaatatgagaagaagagatggtacgtcccgcctgagcaggcaaaagtcgtggctagcgtgcacgcaagcatatcaggatcctcagcatcctcaacaagctctacccccgaagttaaacccttgaagagtctcctcggcgatagcgccccgaccctgcatttgaataagggcacccctagccagtcacctgttgtgggtcggtctcagggccagcagcaagaaaagaagcaatttgaccttttatcagatctagggtcagatatttttgctgcacctgcaccgcagagcacagccaccgccaattttgccaattttgcccacttcaacagtcatgctgcacaaaatagcgccaacgctgattttgccaacttcgatgctttcggccagtcctctggatcgagcaattttggtgggttccccacagcttcacacagtcctttccagccgcagaccacagccttccggatgctgtcctccagttgtagctttggggagtttactagtgcttttccgttgcaagcgactcattctggatccgcagcaagcgtgaacgccaacttcgctcacttcgataatttcccaaagtcaagctccgcagactttgggaccttcaacacttcacagagtcatcagaccgcgtctgcagtgtccaaagtgtctactaataaggctggactacagacagctgacaaatacgccgcattggccaacttggataacatcttttccgccggacagggtggcgatcagggatctgggttcggcaccaccggtaaggccccggttggctctgttgtgagcgtaccttcacagagctctgcgtcaagtgataagtacgctgccctcgccgaattagatagcgtattcagtagtgctgcaaccagcagcaatgcctacacctctacctctaacgcctctagcaatgtgtttggaacagtgccagtagttgcaagcgcacaaacgcaaccagcatcgtcctcagtccctgctccatttggagctacaccgagcaccaacccttttgtggccgcagcaggtcccagcgtggccagctccactaacccattccagacaaacgcacggggagcaactgccgctacatttggaacagcttctatgtccatgccaaccggtttcggtactcctgccccctattctcttcccaccagcttttctgggtccttccaacagcccgcctttcccgcgcaggccgcttttccccagcagactgcattttctcagcagcccaatggattcgctgcctttgggcagaccaagcccgttgtgacgcccttcgggcaggtggccgcggcaggcgtaagtagcaatccgtttatgaccggggctccaaccggccagtttccaaccgggtcttcgagcactaaccccttcctgtag

SEQ ID NO: 17922 - DNA, 2007 bp, synthetic construct
  source 1..2007: mol_type = other DNA; note = Synthetic coding sequence
atgagtaaactggccgcggctcacaggggagcaatccgggctctgcagatgtttgttacccagttcaccgatagaggagagcaccctctgccagctcgctgtaaagagttaggatcactaatccgacaactgtctctatgctccgttaagcttgatgccgatccatcagtgccagacgtggtcatcgatatattgcagcaaattgaagctcttgagagcttactcgaaaagaaactgtcaccaaagaaagtcaaaaagtgtttttccgaaatacgctcacgattccccataggcagccagaaggctcttgagaggtggcctagtacatctccaaaaggggaacggagacctctgaccgccaaggacaccttccctcaagaaacttcacgaccatccgtggccaagcagctgctcgctgacaaataccagcctgatacagaactcccagaaacccagagacttcagagtgagctggatgtcctggacgctgacattgtcctggaagagggtccttttatactggatcaaagtgctagttttaaggatgaagttctggctgttgcaaaaacaaaggccggaaaaaagaaaccggtgaccgaaaatgtgcccttccggaaaaaggacacgcttgcccccgcaaggcagcagggcctcagaaaggccgagcggggccgccagagccaaccacacagtaagtccagggtacaacaaactacggtgtctagccggttgaaaatgaataggcagccggtcaaagaccggaaggccccttggatcccccccaacccaaccagccctccagcaagccctaagtgtgctgcatggcttaaggttaagaccagtccccgggacgccaccaaggagcccctacagcaggaggatccacaggaagagagccacctgaccggggccgtagaacacgaggcagctagactcgcttggctggacgccgaaaccagcaaacgccttaaagaattggaggagttgaaggccaaggagatcgatagcatgcagaagcaaaggttagattggttggacgcggagaccagtaggaggaccaaggagttaaacgagctgaaagccgaggagatgtatagactgcagcagctgtcagtgagcgccacccatctagcagacaaggtcgaagaggcggtgctagatcgactgaagcccctactggttaaagcccagagggtgaattccacaaccgaggctaatatacatcttaaagatgggagttctgtgaacactgccaaggcccaacccgcccaagaggtggccgctgtggactttgagtctaacaacatccgccaactggacgactttctggaagactgtgcatcagaattgtgggcagtgacgcatgccaagattctggggagcgagactttagccactgtggaggactctaaggactctcctgacctagagatcatgatgcgcaggatggaagagatggagaagtatcaggagtccgtcaggcagaggtacaataaaatagcctacgctgaccccaggctgtggatgcaggaggagaacaatgaccagaaaatcagtgcaatcagcgaaaaaccgctctcacctcatccaatcagaataaccaagaccgtggaccgaaaggaccccgccgttaacattatgctcgagcggccatgtaacggaaactccttagacgagtctgttggcacagaggagggcagcgagaaacgtgaggctcctcttctgtccctggccgaggattcccaacagaaggaggggcgcgctcccctgttcgtacctcctgggatgcagcactccatcggcgactactgtagcaggttcgaacaatatctgcgaattatctctcacgaagccgttgggtcttttaacccatggctgatcgccgagtctttttctgaggaattggtggacgaggctttgggggcagtggccgctgaactgcaagatatgtgcgaggactatgcagaagccgtcttcactagtgaattcctcgaggctgctacttag

SEQ ID NO: 17923 - DNA, 3612 bp, synthetic construct
  source 1..3612: mol_type = other DNA; note = Synthetic coding sequence
atgcccgcaaggatcggctattatgagatcgatcgtacaattggcaagggaaatttcgccgttgttaagcgcgctacacatctggtcacaaaagccaaagtcgccataaagattatcgacaagacacagctggatgaggagaatctgaaaaagatttttagggaggtccagattatgaagatgctgtgtcaccctcatatcattaggctgtatcaggtaatggagactgaaagaatgatctatctcgttactgaatatgcctccggcggagaaatttttgatcacctcgtggcacacggccgcatggctgagaaggaggcccgaagaaagttcaagcaaatcgtcaccgccgtctatttctgccactgcaggaacatcgtgcatagagatctgaaggcagaaaatctgctactggatgctaatctcaacattaagattgccgattttgggttctccaacctgttcacacctggccagctcctcaaaacttggtgtggaagcccgccctacgccgctccggaactctttgagggtaaagagtacgatggtccaaaggtggacatctggagcctcggggtcgtactgtacgtgctggtctgcggagcattgccattcgacggttccacactgcaaaatttacgggctcgggtcttaagcggcaagttccgcattcctttctttatgtccaccgaatgcgagcatctgatccgccatatgcttgtgttggaccccaataagcggttgagcatggagcagatctgtaagcataagtggatgaagctgggagatgctgatcctaattttgataggctgatagccgagtgtcagcaactcaaggaggagcgtcaggtggatccacttaatgaagacgtcctgttagccatggaggatatgggactggacaaagagcagacactgcaggccgaacaggcaggcacagcaatgaatatctccgtcccacaggtgcagctgattaatcctgagaaccagattgtagagccggatggcacgctcaacctagacagcgacgagggtgaggagcctagcccagaggcccttgttcggtatttatctatgcgccggcacacagtgggagtggccgatcctcgaacagaggtcatggaggacctgcagaaactgctgcctgggttccctggcgtaaacccacaggctcctttcctgcaagttgccccaaatgtgaatttcatgcataaccttctccctatgcaaaacttgcagcctactggacagcttgagtataaggagcagtctctgctgcagccccccaccttacagttattaaacggaatggggcccctaggaagaagagcctcagatggaggtgcaaacatccaactccacgctcagcaactcttaaaaagaccaaggggacccagccccctggtcaccatgaccccggcggtgccggctgttacaccggtggacgaagagtcttccgacggtgaacctgaccaagaagctgtgcaacggtatctggcaaaccggtccaagagacacacgctggcaatgactaaccctacggccgagatccccccagaccttcagcgccaattgggacaacagccgttccgctcacgggtgtggcctccccaccttgttccagatcagcaccgcagcacgtataaggattctaatactctgcacttacctactgaacgcttttccccggtgcgtcggttctcagacggcgcggccagtatacaagcctttaaggcccaccttgagaagatgggtaacaattcatccataaagcagctccaacaggagtgtgagcagctccagaaaatgtacggaggccagattgacgaacgcaccctggagaagactcagcagcagcacatgctgtatcagcaggagcaacatcaccagattttgcagcagcaaatccaggactctatttgccccccgcagccttccccacccctccaggcggcctgtgagaaccagcctgcactgctcacccaccagcttcagaggctgcgtatccaaccgtcatcacccccaccaaaccatcccaacaaccatttgttccggcagccttcaaatagcccaccgccaatgtcctcggccatgatacagccacatggagctgcatccagttcccagttccagggattgccctcccggtcagccatcttccaacaacaaccggagaactgcagctctcctcctaacgtcgccctgacatgtctggggatgcaacaacctgctcagtcccagcaggttaccatccaggtccaggagcccgtcgatatgctttcaaatatgcctgggacggcagctggcagctccggtagggggataagtatcagcccgagcgccggccagatgcagatgcagcatagaaccaacctgatggctaccctgtcctacgggcaccgccccctcagcaagcagctgagtgcggactctgcagaagcgcacagtgcgcaccagcagccaccacactatacaacttctgcactgcagcaggccttactgtcgccaaccccccccgattacacgagacatcaacaggtcccacacattctgcaaggactgcttagcccaagacactcactgaccgggcatagtgatattagactgccccccaccgaattcgcccagctgatcaagcgccagcagcagcagcggcagcaacaacagcagcagcagcagcagcaggagtaccaggaactgtttcggcatatgaaccagggcgacgccgggagcttagctccctctttaggaggacagagtatgactgaacgacaagcgctgtcttaccaaaacgccgattcttaccatcaccacacttcccctcagcatctgttgcagatccgggcacaggagtgtgtatcccaggcaagtagtcctacgcccccccatggctacgcgcatcagcccgccctgatgcattcagagtcaatggaggaggattgttcttgcgagggagccaaggatggtttccaggattccaagtctagcagtacacttacaaaaggatgtcatgactctccactactgctgagcaccggtggtcctggcgacccggagtctctcctgggcaccgtgtcccatgcacaggaactgggaattcacccttacggtcatcagcccacggcagcctttagtaagaacaaggtgcccagcagagaacccgtgataggaaattgtatggatcggagcagcccagggcaggctgtggagctccctgatcataatggtttgggctatcccgctcgtccctcggtgcatgaacaccaccgcccgcgagctctgcagaggcaccacacgatacaaaatagcgatgatgcatacgtgcagctggacaatctgcccgggatgagcctcgtggctggaaaggccctttcttcagctagaatgagcgacgcggtcttaagccagtcctctcttatgggtagtcagcagttccaggatggagagaatgaggaatgcggcgcctctttagggggtcacgagcaccctgacctcagcgatggttctcagcatctgaactcaagttgttatccaagcacatgtattactgacatactgctgtcgtataaacacccagaggtctctttttcaatggaacaagccggagtgtag

SEQ ID NO: 17924 - DNA, 2046 bp, synthetic construct
  source 1..2046: mol_type = other DNA; note = Synthetic coding sequence
atgatcgaaaaaatgcagggaagcagaatggatgagcaaaggtgctcattccctcctcctctgaagaccgaagaagactacatcccttacccttcggtacatgaggtgttaggcagagagggcccctttcccttaattctcttaccgcagttcgggggatattggatcgagggaaccaatcacgaaatcacatcgatcccagaaactgagccattgcagagccccactactaaggtaaaactcgaatgcaatcccacagcacgaatttaccggaaacatttcctggggaaagagcactttaactactactccctggatgcggctctggggcatctcgtattctccctgaaatacgatgtgattggtgatcaggagcacttacggttgctgctgaggaccaagtgtcgaacttaccatgacgtcattcccatctcctgtctgaccgagtttcccaatgtggtccagatggcgaagcttgtgtgtgaggacgtgaacgtggatcggttttaccctgtcctgtacccaaaggctagcagactgattgttacctttgatgagcacgtgatatcgaacaactttaagtttggtgtgatctatcaaaagctgggccagacatccgaggaggagctgttttcgacaaatgaagagtcacccgcttttgtggagtttctggagttcctcggccagaaagtcaagttgcaggacttcaagggatttaggggcggactagatgtcacccatggccagacaggcactgaatctgtgtactgtaactttagaaataaggagatcatgttccacgtgagcaccaagctcccatacaccgagggggatgctcaacagctgcagaggaaaagacacatcggtaatgatattgtggcagtcgtcttccaggacgaaaatacgccgttcgtgcccgatatgattgctagcaatttcctgcatgcgtatgtggtggttcaggctgaaggcggcggacctgacggtcccctgtacaaggttagcgtcacagccagagacgatgttcccttcttcgggcccccccttcccgaccctgcggtgttccgaaaggggccggagtttcaagaattcctgctgacaaagctgattaacgccgagtacgcatgctataaagctgagaaatttgcaaaactagaagagaggacgagagcagcccttctggaaactctgtacgaggaattacacattcacagtcagagcatgatgggactgggtggcgacgaggacaaaatggagaacggatctggaggcggcgggttttttgaaagttttaaacgggtgatcagatctcgttctcagtctatggacgccatgggtttatcgaacaagaagcccaatacagtgtcaacttcccattctgggagttttgcccccaacaaccccgatcttgctaaggcagcggggataagcctcctcatccctgggaagtccgctagccggtttggcagaagaggctctgctatagggattggtactgtggaagagtcgctcattgtgcccggaaagagccccacgaggaagaaatctggtccatttgggagtcggcgctcctcggcaataggaattgaaaacattcaggaggtgcaagaaaaaagggaatctcctcctgccggacagaagacccctgactctggccatgtgtcccaagagcccaagtctgaaaacagctctacacagtcctcaccagaaatgccaaccaccaagaatcgggccgagactgctgctcaaagagcggaggccctcaaggacttctcgaggtcgtcatcatctgcctcttcctttgctagtgtggtggaggaaactgagggagtggatggagaggacaccggacttgagagcgtgagtagtagcgggactcctcacaagcgagattcctttatctacagcacatggctggaggatagtgtgtctaccacttccggagggtcttcacccgacgctgggaaactcggcgaccctgcttgcccggaaattaagatccagctcgaagccagcgaacagcatatgccacagctgggttgttag

SEQ ID NO: 17925 - DNA, 675 bp, synthetic construct
  source 1..675: mol_type = other DNA; note = Synthetic coding sequence
atgtccgtgggctacgcgaatggaattcgggtgatgtccatgacccacacaggagaaccaggtttcatgttgtacattcctatcgagtacgcgctgcatgtgtacaatgaggttatgtccgtggggcaaaagtatggtatccggaatgcaggctactatgctctgaggtctctgcggatcgaaaaattctttgcattttggggtcaagatattaataacctcactacaccactggagtgcggccgagaaagccgagttaaactcgaaaagggtatggacttcatcggccgagacgcattgctccagcaaaagcaaaatggtgtttacaagagacttactatgttcatcctagatgaccatgactcggacctggacctctggccctggtggggagagcctatctatcgaaatgggcagtacgtggggaaaacaactagtagcgcctacagttacagtctggaaagacatgtctgtctcggcttcgtccacaacttttcagaagatactggcgaggagcaggtggtgacagcagacttcatcaaccgcggcgaatatgagattgatatcgctggttatagatttcaggccaaagcgaagctctacccagtcgcttctttatttactcagaagcggaggaaggatgatatggagcttagcgatctgcacgggaagtag

SEQ ID NO: 17926 - DNA, 1590 bp, synthetic construct
  source 1..1590: mol_type = other DNA; note = Synthetic coding sequence
atgcatttcagtggcctcgaggaagccgtgtatcggaatattcaggcctgcaaggaattagcacagacaacccggaccgcctatggcccaaatggaatgaacaagatggtgattaatcacttagagaaactttttgttaccaatgatgcagctaccatccttagagaactggaggttcagcaccccgccgctaaaatgattgtcatggccagccatatgcaggaacaggaggttggcgacgggaccaacttcgttctggtgtttgccggagcgctcttggagctcgccgaggagctgctgcgtatcgggctcagcgtgtcggaggttattgaaggttatgagatcgcttgccgcaaggctcacgagatcttgcctaacctagtatgttgcagtgccaaaaatctgcgggacatcgacgaagttagttctcttctgcggactagcatcatgtcgaaacagtacggtaacgaggtttttttggctaagttaattgcccaggcctgcgttagcatctttccagattccggacactttaacgtggacaatatcagagtctgcaagatcctgggtagtggcatctctagctcttccgtgctccatggaatggtgtttaaaaaagagaccgagggtgatgtgacctctgtcaaggacgccaaaatcgccgtgtattcttgtccttttgacggaatgattaccgagactaagggcacggtgctgataaaaactgccgaagagctcatgaacttctccaagggagaggagaacctgatggatgcacaggtcaaagctatcgccgacactggagccaacgtagtcgtgacgggtggcaaagtcgctgatatggcactgcactatgcaaataagtataatatcatgttggtgcggctgaattccaagtgggacttaaggaggctgtgcaaaaccgtcggggctaccgcactaccccgactgactccgccggtcctggaggaaatgggccactgtgactctgtatatctaagtgaggtgggagatacccaagtggtggtgtttaagcacgagaaagaggatggcgccattagtacaattgtgctgagaggcagcaccgacaatctcatggacgacatcgagcgcgctgtggacgatggagtaaacaccttcaaggttttgacccgagacaaacggctggttcccggtggaggcgcaaccgaaatcgagttggcgaaacagattacttcctacggagaaacatgccctggcctggaacaatacgctatcaaaaaattcgcagaagccttcgaagctattcctagagccctagccgaaaactcgggggtcaaggcaaacgaggttatcagcaagttgtatgcagtccatcaggaaggaaacaaaaatgtgggcttggacattgaagcggaggtccctgcggtgaaggatatgcttgaggccggcattcttgacacttacctgggcaagtattgggccatcaagctggccactaacgctgccgtgacagtactgcgggtggaccagatcatcatggctaaacctgccggcggtccaaaaccgccctccggcaagaaagattgggacgacgaccaaaatgattag

SEQ ID NO: 17927 - DNA, 2193 bp, synthetic construct
  source 1..2193: mol_type = other DNA; note = Synthetic coding sequence
atgttcggacggaagaggagcgtctctttcggtggcttcgggtggatcgataaaactatgctcgctagccttaaggtgaagaagcaggagctggcgaattcgagcgacgccacactgccagaccgccctctatcaccaccactgaccgcccctcctactatgaaatctagtgaatttttcgaaatgctggagaagatgcagggaatcaagctggaggagcaaaaacctggcccccagaagaacaaggacgattacatcccctacccaagcatagatgaggtggtagagaagggcggaccttatcctcaggtcatactcccgcagttcggcggatattggatcgaagatccagagaacgtgggaacaccaacaagcctggggtcaagtatctgcgaggaagaagaagaggataatctgtctcctaacaccttcggatacaagctggaatgtaagggtgaagcccgcgcctaccggagacactttctgggtaaagaccacctaaacttttattgtacagggagctccttgggcaacctgatcctgtctgtcaaatgtgaggaggcagaaggcatcgaataccttcgtgtgatcttgaggtcaaagctgaagacagtccacgaaaggattcccctggccggcctttccaaactgccatcagtgccccagatcgcgaaggcattctgtgacgacgctgtggggctaaggtttaatcccgtcctctacccaaaggcttcacagatgatagtctcctacgatgagcatgaggtcaataataccttcaagtttggtgtgatttatcaaaaagcacggcagacactggaggaggaactgttcggtaataacgaagaaagtcccgccttcaaggagttcttggatctccttggggatactattaccctgcaagacttcaaagggtttagaggcgggctggacgtgacgcacggccagaccggtgttgaatccgtttatacaacgttcagagacagagaaattatgttccatgtgtctacgaaactgcctttcacagacggcgatgcccagcagctgcagagaaagcggcacattggaaacgatattgttgccatcatatttcaggaagaaaatactccgtttgtgccggacatgattgcatcaaatttccttcacgcatacatagtggtgcaggtggagaccccaggtactgagacaccctcttacaaggtgtccgtcaccgcgagggaggatgttcctacctttggccccccactgccgtcaccacctgtctttcagaaaggtcccgagttccgagagtttctacttaccaagctgacaaatgccgagaatgcatgctgcaaaagcgacaagttcgctaagcttgaggacagaacccgggccgccctactggataacctgcacgacgaactgcatgcccacacccaggcaatgttagggctggggcctgaggaggacaagttcgagaatggaggccacggtggattcctcgagtcattcaagcgggctattcgcgttcgctcacactctatggaaaccatggtgggtggacagaaaaaatcccacagtggcggaatacccgggagtctgtccgggggaatctctcataattccatggaagttacaaagaccaccttctcgccaccagtggtcgctgctacggtgaaaaatcagtcgaggagtcctatcaaaagacggtcaggcctattcccaagactgcatacaggatctgagggccaaggagattctagggcccgctgtgatagcacgagttccacacctaaaacacctgacggtgggcacagttcgcaggaaataaagagtgagacctcgagcaatccctcaagtccagagatctgtcctaacaaggaaaagcccttcatgaagctgaaggagaacggccgcgccatttcccggagcagctcctctacctccagtgttagctccaccgctggtgagggggaggccatggaagagggcgatagcggaggttctcaaccgtcaacaactagtcctttcaagcaggaggtttttgtttactcacctagcccgagttcagagagcccaagccttggcgctgcggctacacccattatcatgagcaggagccccaccgacgccaagagcaggaattccccgagatcaaacttgaagttcaggtttgacaagctgagccatgcttcatcaggcgccggccattag

SEQ ID NO: 17928 - DNA, 2271 bp, synthetic construct
  source 1..2271: mol_type = other DNA; note = Synthetic coding sequence
atggtcgcccccgtcctggagacgtcacacgtgttctgttgccccaatagagtgagaggggtactaaattggagctctggacctcgtgggttactggcgttcggcaccagctgctccgttgttctttatgacccccttaagagggtagtggttacaaacctaaacggacacacagctcgggtcaattgtatccagtggatctgcaaacaggacggctcaccatccacggaactggttagtggtgggtcagacaaccaggtcattcactgggagatcgaagataaccagcttctcaaggccgtccacctgcaggggcatgagggcccagtgtacgctgttcatgccgtgtatcagagaagaacctccgaccctgcactgtgcaccctcatcgtcagcgccgccgcggattctgctgtccgattatggagtaagaaagggcccgaagtccccattttagcttgcggcaatgacgactgtagaatccacatctttgctcagcagaacgatcagttccagaaagtgcttagcttgtgcggccatgaagattggatacgaggggtggaatgggccgcgtttggccgggatctattcctggcctcatgttctcaagactgcctgatccgaatttggaaactgtatatcaagagtacctctctggagactcaggatgacgacaacatacggctgaaagagaacacattcaccatagaaaacgaaagcgtgaagattgccttcgccgtgacactggagacagttctggcagggcatgagaactgggtcaacgccgtgcactggcaaccagtgttctataaggacggggtgttgcagcaaccggtgcgcctgctgtctgcctcaatggataagactatgatcctttgggcacctgatgaagaaagcggggtgtggcttgagcagagggagtggacccccgaaattgtcatatcgggccattttgacggagttcaggacctggtgtgggaccccgagggggagttcatcattacggtgggaactgaccaaactaccagactatttgctccctggaaaaggaaggatcagagccaagtgacctggcacgagatcgcacggccacaaatccacgggtacgacctgaaatgtctcgcgatgatcaatagatttcagtttgtgagtggtgccgacgagaaggtgctgcgcgtgttcagcgccccaaggaacttcgtggaaaacttctgtgcaataacaggtcagtccctgaaccacgtcctctgcaaccaggactccgacctgcccgagggcgcgactgtgcctgcattagggctctcaaataaagccgttttccagggcgacatcgctagccagcctagcgacgaggaagagctgcttaccagtaccggcttcgagtatcaacaggtggcatttcagccttcaattttaactgaaccacctacagaggatcatctgctgcagaatacgctgtggcccgaggtgcaaaaactgtatggccacggctacgaaattttttgcgtaacctgtaactcctccaaaaccctgttggcatctgcttgcaaggccgccaaaaaggagcatgctgcaatcatcctgtggaataccacaagctggaagcaggttcaaaatctcgtgtttcacagtctcaccgtgacacagatggcattttcccccaacgagaagtttcttcttgccgtttctcgcgataggacatggagtctttggaagaaacaggacactataagcccagagtttgagcctgtgttctctcttttcgcatttacaaacaaaattaccagcgtccattctcgaataatctggagttgtgattggtcccctgactctaaatacttctttaccggaagccgtgataaaaaggtggtggtttggggggagtgcgatagcacagatgattgcatcgagcacaacatcggtccttgcagttcggtcctggatgtgggcggggccgtgactgctgtgagcgtctgccctgtgctgcacccctctcagcgctatgtagttgcagtggggctggagtgcggaaagatctgcttgtatacatggaagaagactgatcaggtgcctgaaatcaatgactggacccactgcgtcgagactagtcagagccagagtcataccctagcaatacggaagctgtgctggaagaactgtagtggaaagacagagcaaaaggaggccgagggagcagaatggctacactttgcttcttgtggagaggaccacaccgtaaaaattcatagggttaacaaatgcgctctgtag

SEQ ID NO: 17929 - DNA, 1272 bp, synthetic construct
  source 1..1272: mol_type = other DNA; note = Synthetic coding sequence
atgaatcgccagccagtaaaagataggaaggctccttggatccccccaaatccgaccagccctcccgcctctcccaaatgcgcagcctggttgaaagtaaaaacctctccccgcgacgcaactaaagagcccctgcagcaggaagacccccaggaagagtctcaccttacgggcgccgttgagcacgaggccgcacggttggcctggctagacgccgagacgtcgaaacgactgaaagagctcgaggaattaaaggccaaggagattgattcaatgcagaaacaacgcctcgattggcttgatgccgaaacgtcacgacgtacaaaggaacttaatgagctaaaagctgaagagatgtataggttgcagcagctgtcagtctccgcgacacatctggccgacaaagtagaggaggctgtgctggacaggctgaaacctttgctcgtaaaagcccagagagttaatagcactaccgaagctaacatacatttgaaagacggcagcagcgtgaatactgctaaagcgcagcccgctcaagaggtggctgctgtggattttgaatctaataacattcggcaactggacgacttcttggaagattgcgcgtccgagctgtgggccgtgacacacgctaaaatcctggggtccgaaacattggccaccgtggaagatagtaaggattcacccgatctggagattatgatgcggagaatggaggagatggaaaagtaccaagagtccgtgcggcagaggtacaacaagattgcttatgcagacccacgcttatggatgcaagaggagaataatgaccagaaaatctccgccatcagtgaaaagcccctgtcccctcaccccatccgcatcacgaaaacagtggaccgtaaggatccggctgtgaatatcatgctagagcgcccatgcaacgggaactccctcgacgaaagtgtgggcaccgaagaggggtctgagaaaagagaggctccactgttaagtcttgcagaagattcacagcagaaggagggcagagcccctctgtttgtgccacccggaatgcagcactctataggcgactattgttcaagattcgaacagtatcttcggatcatttcccacgaagctgtaggcagctttaacccttggctgattgccgaatcattctctgaggaactcgttgacgaggctcttggggccgttgcagccgaactgcaagacatgtgcgaagactatgcggaggctgtctttacctctgaattcctggaggctgccacatag

SEQ ID NO: 17930 - DNA, 777 bp, synthetic construct
  source 1..777: mol_type = other DNA; note = Synthetic coding sequence
atggcccggctgcaggaggaacacggcgatcagctgctctctatccgctgccagcaccaagaacaggttgaggatctgactgcgtcccacgatgccgctctgcttgaaatggaaaacaaccacactgtggcgataacaatacttcaagatgatcatgatcataaggtgcaggagcttatgagtactcatgagttggaaaagaaggaattggaggagaattttgagaaattaagactgtcgctgcaggaccaggttgatactctgacatttcagtcccaatcgctgcgagaccgcgccaggcgctttgaagaggctctgcgaaagaacacagaagagcaattggagattgcgctagcgccataccagcacttggaagaggacatgaagagcctgaaacaggtattggaaatgaagaaccaacagatccacgagcaggagaagaagatcctcgagttggagaaacttgccgagaagaacattatcctcgaagaaaagatacaagttctccagcaacagaatgaagatctgaaagcgagaatcgaccagaataccgtggtcactaggcagctgtcagaagaaaacgccaacctccaggaatacgttgaaaaggagactcaggaaaagaagcggctcagccgaaccaatgaggagttgctctggaaactccagacgggggatcctacaagcccaattaagctatctccgacaagtccagtctaccgtgggtccagcagcggccccagtagtcctgcaagagtgagcaccacccccagatag

SEQ ID NO: 17931 - DNA, 1053 bp, synthetic construct
  source 1..1053: mol_type = other DNA; note = Synthetic coding sequence
atgtgtcccactaccacttggccacgcgggcgccgatggtctcgaaatctgcgcgatactcaggcagtgcgccactataagatctggcgcagggcaggcgggcggctgcacctcaatgaagccgtctcattcctttccctgccggagctagtaaactaccacagggctcagagtctgtcccacggcctacgtctggccgccccgtgcaggaaacatgagcccgagcccctgccacactgggacgattgggagagacctcgtgaggagtttacgctctgtaggaaactgggatctggttatttcggcgaggtgtttgagggcctgtggaaagacagggtgcaagttgccatcaaggttatcagccgggataatttactgcaccaacaaatgttacaatcagaaatccaagctatgaagaagctgcggcacaagcacatcctagccttgtacgcagtcgtgtctgtgggagaccccgtttatatcatcaccgagctcatggctaaggggagcctgctcgaactgctccgggattcagatgaaaaagtcctgcccgtgtcggaactgctagatatagcttggcaggtcgcggaggggatgtgctatctcgagtcacagaactatatacatcgcgacttggccgctaggaatatcctggtgggagaaaacaccttatgtaaggtgggcgactttgggttagctcggctgataaaagaggacgtgtacctgtcccacgaccacaatatcccctacaagtggacagcccctgaagctttaagccggggccactactcgacaaaatctgatgtctggtcctttgggatattactccatgagatgttttcgcgtggccaggtaccgtatccggggatgtctaatcatgaagcttttctccgagtggacgcaggatacagaatgccatgtcctctagaatgccccccgtctgtgcacaagctcatgctgacgtgctggtgtcgagatccggagcaacggccgtgtttcaaagcgctgcgcgagcgcttgtcatcttttacctcgtacgaaaatcctacctag

SEQ ID NO: 17932 - DNA, 3480 bp, synthetic construct
  source 1..3480: mol_type = other DNA; note = Synthetic coding sequence
atggtatcgtcttctccctccacaccctccaatattcctcagaaaccctcacaaccagctgccaaggaacccagtgctacgccacccatttccaacctaacaaaaaccgcaagtgaatccatcagtaatctcagcgaggctggttcaattaagaagggggaacgagagctcaaaattggagacagagtgctggtgggcggcaccaaggccggcgtagtgagattcctgggagagaccgacttcgccaaaggtgagtggtgcggggtcgaactcgatgagcctctaggtaagaacgacggcgccgtagctggaaccagatatttccagtgccagccaaagtatggtttgtttgcccccgtccataaagtcacaaagattggcttcccatcgacaacaccagcaaaggctaaggctaatgcagttcgacgggtcatggcgacaacgtctgcaagcttgaagcgctctccgtctgcatcatctctgagttctatgagctccgtggcctctagcgtgtcatctaggcctagcagaactgggttgctgacggaaacttccagccgctacgcaagaaaaatttccggtaccacagccctgcaggaagccctcaaggagaaacagcagcacattgagcaactgctggctgaacgcgatttggagagagccgaggtggccaaggcgacctcacatgttggggagatagaacaagaattagccctggcccgggacggccatgaccagcacgtgcttgaacttgaagccaagatggatcagctgcgcacgatggtcgaagccgcagatcgcgaaaaggtggagctgctcaatcaactcgaggaggagaagaggaaagtcgaggacttgcagtttagggtcgaagaggaaagtattaccaagggggacctcgagactcagaccaagttagagcatgctcgcatcaaggagctggaacagtcccttctgttcgagaagacaaaagccgataagttacagagggaacttgaggacacgagagtcgctaccgtgagtgaaaaatctaggattatggaattagaaaaggacttagccctcagggtgcaagaggttgcagaactgaggagaagactcgagtctaataagccagctggagatgtggatatgagccttagtcttctgcaggagatctcatctcttcaggagaaattagaggtgaccaggaccgatcaccagagagaaatcacgtccctgaaagagcacttcggcgcccgggaagagacccaccagaaggagatcaaagctttatacacggccacagagaaacttagcaaggagaatgagtcactcaagtcaaagctggaacatgccaataaggagaacagcgacgtgattgctctctggaagtctaagctggagactgcgattgcttcacatcaacaggctatggaagaactgaaagtaagcttttcaaagggcctgggtactgagaccgcagagtttgccgagctgaaaacacagatagaaaagatgagacttgattaccagcacgaaatagagaacctccaaaatcagcaggactctgagagggcagcacatgcaaaagagatggaagctttgcgagcaaagttgatgaaggttatcaaggagaaggagaattccttggaggctatccggagcaagctcgataaggcggaggatcagcatttggttgagatggaggacaccctcaacaagttacaggaagctgaaattaaaaaggaaaagttcgctgaagcctctgaagaggcggtgtctgtccaacgttctatgcaggagaccgttaataagctacaccaaaaggaggagcaattcaacatgctgtcctccgatctcgagaagctccgagagaacttggccgacatggaagcaaaatttcgcgaaaaggatgagcgggaagagcaactaataaaagcaaaggagaagctcgagaatgacatcgccgagatcatgaaaatgtccggtgacaactcttcacaattgaccaaaatgaacgacgaactgcgactgaaagagagagacgttgaggagctgcagctcaaattgacaaaggccaacgaaaacgccagcttcctacagaagagcatcgaggacatgaccgtcaaagcggaacagtctcagcaggaggccgcaaagaaacatgaggaggagaagaaggaattagagcgtaagctctccgatctggagaaaaagatggagacgagccataaccagtgtcaggagctgaaggccaggtatgaacgggcgacttccgagactaagactaagcatgaggaaatcttgcagaatctgcagaagacacttctggacactgaggacaaactcaagggcgctagggaggagaacagtggcctactgcaggaactggaagagttacggaaacaggccgacaaggctaaggctgcccagacggcggaagacgcaatgcagataatggagcagatgacaaaagaaaagacggaaacccttgcatccctggaggacacgaagcagacgaacgctaaacttcaaaatgaactagacaccttgaaagagaacaatctaaagaacgtagaggagctgaataagagcaaggaacttctgacggtagagaaccagaagatggaggaatttaggaaagaaatcgagacattgaaacaggccgctgcacagaagtctcaacagttatcggcactgcaggaggagaatgtcaaactggccgaggagctgggccgctcccgggatgaagtgaccagtcatcaaaagctcgaggaggagagatccgtccttaacaatcagctccttgaaatgaaaaagagagaatctaaattcatcaaggacgccgatgaggagaaagccagtttacagaaaagcatttcaatcacctccgccctgttaacggaaaaagacgcagagcttgagaagcttaggaacgaagtaactgtgctgagaggagaaaatgcatccgcgaagtcgctccatagcgtggttcagactctggaatctgacaaggttaagctagagttgaaagtcaaaaatctagaactgcagctgaaagaaaataagcgccagctgtccagttcctcaggcaacaccgatactcaggcggatgaagacgagagagctcaggaatcacaaaaccagatcgattttttaaactctgtgattgtggatctccagcgaaagaatcaagacctcaagatgaaagtcgaaatgatgtccgaggccgccttgaatggaaatggcgacgacttaaataactatgacagtgatgaccaggagaagcagtccaagaagaaaccccgtttattttgcgacatttgcgattgttttgacctgcacgatactgaggactgcccaacacaggcccagatgtccgaagatccaccccacagtacacatcacgggtccaggggcgaagagaggccctactgcgagatctgcgagatgttcggccattgggctaccaactgcaatgatgatgagactttttag

SEQ ID NO: 17933 - DNA, 756 bp, synthetic construct
  source 1..756: mol_type = other DNA; note = Synthetic coding sequence
atgactacagagcagcggcgcagtctgcaggcgttccaagactatataagaaaaacattagatccaacttacatcctgtcatacatggcaccatggttccgagaggaggaggtacagtacattcaggctgagaagaacaacaagggccctatggaagcagccacactctttctgaagttcctgctggagctgcaggaggagggctggttccggggctttcttgatgccctggatcacgccgggtatagtgggttgtacgaagcaatagaatcttgggattttaagaagattgagaagctggaagagtatagactgctccttaagcgtctgcagcctgagtttaaaactagaattatcccgaccgacattatcagcgatctgagcgagtgtttaatcaatcaggagtgtgaggagatactccaaatctgctctacaaagggaatgatggccggtgcagagaagctcgttgaatgtctcttacggtcagataaagaaaattggccaaaaacgttgaaactcgctctggaaaaggaacgtaacaagttctctgagctttggattgtagagaaagggataaaagacgtcgagaccgaggatcttgaggataagatggagacttctgatattcagatcttctaccaggaggaccccgagtgccagaatctgtccgagaatagttgcccacccagcgaagtctccgacaccaatctatactctccttttaaaccaattaaaaaaaagaagaagaagaagtag

SEQ ID NO: 17934 - DNA, 3189 bp, synthetic construct
  source 1..3189: mol_type = other DNA; note = Synthetic coding sequence
atggtcagttctgcacaaatggggtttaatcttcaggccctgcttgagcagttaagtcaggatgagctgtcaaagtttaaatatctcattactaccttctccttggcccacgagctgcaaaaaattccacataaagaagtagataaagcagatggcaagcaactggtcgagattctgactacgcattgcgacagttactgggtggaaatggcatctctgcaggtgttcgaaaagatgcataggatggacctttcggagcgggcaaaagatgaggttcgggaagcagctttgaagagtttcaacaaacgcaagccacttagcctagggataactagaaaagaacgtcctcctctggatgttgatgaaatgctggaaaggttcaaaactgaggcacaggccttcacggaaacaaaaggcaatgtgatttgcctcgggaaagaggtattcaaggggaaaaaacccgacaaggataatcgatgccgctatatcctgaagactaaattccgagagatgtggaagtcttggccaggtgatagcaaggaagtgcaagtcatggctgaacgctacaagatgctcatcccatttagcaatccccgagtattgcccggccctttttcatacaccgttgtcctttatgggcccgctggtttgggcaagacaactctcgctcaaaaattgatgctggactgggcagaagataatctaatccacaaattcaaatacgctttctatctctcttgtcgcgagctgagtcgcttaggtccctgctcttttgcagagcttgttttccgcgattggccggagctgcaggacgacatcccccatattctggcccaggcccgcaagatcctgttcgtcatagatggctttgatgaattaggcgcagctccaggggccctgatcgaggacatttgtggggactgggaaaaaaaaaagcccgtgccagtattgctcggcagtttactgaatcgcgtcatgttgcctaaggcggcactgctggttactacccggcctagggccctgcgggacttacgaattctcgccgaggaacctatatacattcgcgtagagggctttctggaggaggatcggagggcgtattttctaaggcactttggcgatgaagatcaggccatgcgcgcttttgagctgatgcggtcaaatgccgccctgttccagctcggatctgcccccgccgtgtgctggatcgtctgcaccactctgaagttgcagatggagaaaggggaagacccagtccctacatgcctcacccgaaccggcctattccttagatttctatgtagcagattcccgcagggggcccagctacgaggcgcccttagaaccctctcactgcttgccgcccagggactgtgggcccagacctctgtgctgcacagggaggatctggaaaggctgggcgtgcaggaatccgacctcaggctgtttctagacggcgatatcctcaggcaggacagagtctcaaagggatgctacagctttatccacctttccttccagcagtttctgacggccctgttctacacgctggagaaagaagaggaggaggaccgggacggccacacctgggacatcggtgacgttcagaagcttctgtctggcgtggaaaggctgagaaacccagatttaatccaggctggatactatagttttggtctggcgaatgaaaaacgcgcaaaagaactggaggccaccttcggttgccgcatgagccctgacataaaacaggagttactgagatgtgatataagctgcaaggggggacatagtaccgtgactgacctccaggagctgctcggttgtctgtacgagtcccaggaagaagagcttgtgaaagaggtgatggctcagttcaaagaaatatcacttcatctgaatgcagtcgatgtagtaccgtcttccttctgtgttaagcactgccgcaatctccagaagatgtcacttcaagtaatcaaggagaatttgcctgaaaacgtaaccgcatctgagtcagacgcagaggtggaaaggtctcaagatgatcaacacatgctgcctttctggaccgatctgtgcagtattttcggctctaataaggacttaatgggccttgccatcaacgattctttcctctcagcctcattggtgaggattctctgcgagcagatagcgagtgatacctgccaccttcagcgagtagtgtttaaaaacatcagcccggccgatgcacaccgtaacctgtgtctggctttgcgcggccataagacagtgacatacctcaccctacagggcaatgatcaggacgatatgtttcctgctctgtgtgaggtgctgaggcacccggaatgcaacctgagatacctaggcctcgtgagttgttctgccactacccagcagtgggctgacctctcccttgccttggaggtgaaccagtcgttgacctgtgtaaacctgtcagacaatgagctcctcgatgaaggagccaagcttctctacaccacccttagacacccaaaatgcttcctacagcgactcagcctggaaaactgccacttaacagaggcaaactgcaaagaccttgccgccgtcctggtcgtcagtagagaactcacccatctgtgcctggccaaaaacccaattgggaatacaggggtgaagttcttgtgtgaaggcctaaggtaccctgaatgtaagcttcagactctcgtgttatggaactgcgacattacttcggatgggtgttgtgacctaacaaaactgttgcaggaaaagtcaagtttgctctgcctcgatctcgggctcaatcacatcggggttaagggcatgaaattcctctgtgaagcgctccggaagcccctttgtaacctgaggtgcctgtggctgtgggggtgcagtattcccccattctcctgtgaagatctctgctcagcactcagctgtaaccagagcttggttactctcgacctggggcagaacccgctgggttcatcaggggttaaaatgctttttgagaccctcacttgcagcagtggcacacttagaactctccgattaaaaatagatgacttcaacgacgaactaaataaattattagaggagatcgaagagaagaacccacagctgataatcgatactgagaaacaccacccctgggcggaacgcccctcctctcatgatttcatgatctag

SEQ ID NO: 17935 - DNA, 363 bp, synthetic construct
  source 1..363: mol_type = other DNA; note = Synthetic coding sequence
atgtggagcatagaaaacattgcctttggcagtggcggaggtcttttgcaaaagttgacacgggacctgctcaactgttcttttaaatgttcctatgtggtgacaaatggactcggcattaacgtgtttaaagaccctgtggccgacccaaacaagcgatctaaaaaggggaggctctcattgcatcgcactccggccggcaacttcgtgaccctggaagagggcaaaggggatctggaggagtacgggcaggacctactccacacggtctttaagaacggaaaggtgaccaagagctattcgtttgatgaaatccgaaagaacgctcaactgaacattgagctggaagccgcccatcattag

SEQ ID NO: 17936 - DNA, 936 bp, synthetic construct
  source 1..936: mol_type = other DNA; note = Synthetic coding sequence
atgtaccatctcgataatcaccccgaaaaacagttttccaccgatgtcctcaaacaggctatagaactctcaccagacaatcagtacgttaaggtcttgctggggctgaaactgcaaaagatgaataaggaagccgagggcgagcagtttgtagaggaggccctggagaagagtccttgccaaactgacgtattgagatccgcagcgaagttttatcgtaggaaaggggatctagataaggcaattgagctattccaacgtgtgctcgaatccacccccaataatggatatctgtatcaccagattgggtgctgctataaggctaaggtgcgccaaatgcagaatacaggagaatctgaggccagtggcaataaggagatgatcgaggccttgaaacaatatgcaatggactattctaataaagcactagaaaaaggtctgaatcccttgaacgcctacagcgaccttgctgaattcctggagacggaatgctaccagaccccatttaataaggaggtgcctgatgctgaaaaacagcagtcccaccagcggtactgcaatctgcagaagtacaatggcaaaagcgaagatacggccgtacaacacggcctcgaggggctgagtatctccaaaaagtccacagacaaggaggagatcaaggaccaacctcagaatgtgtccgagaatctgcttccacaaaacgcacccaattactggtatctacagggactgatccataagcagaacggcgatctactccaagctgccaaatgttacgaaaaggagttggggaggctactaagggacgcaccgagcggtatcggaagcatcttcctgtcagcttccgagctagaggatggcagcgaggagatgggacagggagctgtgtcttcttcaccacgggagctgttgtccaatagcgagcaactgaattag

SEQ ID NO: 17937 - DNA, 3267 bp, synthetic construct
  source 1..3267: mol_type = other DNA; note = Synthetic coding sequence
atgtatgggtccgcccggtccgttggcaaggtcgagccctcatcacagtctcctgggagatcgcctcgattgccccggagcccaagactcggccacagacgaaccaactcaacagggggatcaagtggatccagcgttgggggcggttcaggcaaaactctttcaatggaaaacattcaaagcctgaacgccgcatacgcaacatccggacctatgtaccttagcgaccacgagaatgttggcagcgagacgcccaagagcacgatgacattgggtagatccggggggcgtttgccatacggggtgcgtatgactgctatgggctcctctcccaatattgcatccagtggggtcgcatctgacacaattgctttcggggagcaccacctgccccccgtgtcaatggcctccaccgtgcctcacagcctgcgccaggcccgggataataccatcatggatctgcagacacagctgaaagaggtcctgcgtgaaaacgacttgctgcgcaaggatgtcgaagtaaaagaatccaaactgtccagcagcatgaacagcattaaaacattctggtctcccgagttgaagaaggaaagagccctgcgtaaggacgaggcttcaaaaatcaccatctggaaggagcagtacagagtggttcaggaggagaatcagcacatgcaaatgacgattcaggctctgcaggacgagctacgcatacagcgggatttgaaccagctgttccagcaggactcatcgagccgcacgggggagccgtgcgttgctgaactcacagaagaaaatttccagagattacatgccgaacatgagcgccaggcgaaggagctcttccttcttcgcaagaccctggaagaaatggaattacggatcgagacccaaaagcagacgttgaacgcaagagacgaatctatcaagaaactgttagaaatgttgcagagcaaagggctgtcagcaaaggcaacagaggaagaccacgagaggaccagaagacttgccgaagccgagatgcacgtccatcatcttgaatctctgctggagcagaaagagaaggagaacagcatgcttcgtgaagaaatgcaccgaagattcgaaaacgcccccgatagcgccaaaaccaaagccctgcagaccgtgatagagatgaaagactcaaagatctctagcatggagcgagggcttagggatctggaggaggaaattcagatgctgaagtctaatggcgccctgagcactgaagaacgggaagaggagatgaaacagatggaagtgtacaggagccactctaagttcatgaagaacaagatcggccaggtcaaacaagagctctcgcggaaagatacggagcttttagccctgcagaccaaactcgaaaccctcacaaatcaattcagtgacagcaagcagcacattgaggttctgaaagagagcctcactgcaaaggaacagcgcgccgcaattttgcagacagaggtggacgcgttgaggctgcgcttggaagaaaaagaaaccatgctcaataaaaaaaccaagcagatccaggatatggcagaagagaaaggcactcaggctggcgaaattcatgacctgaaagatatgttggacgtgaaagaacgtaaggtgaacgtcttgcagaaaaaaatcgagaacctgcaggagcaactgagggacaaagaaaagcaaatgtctagccttaaggagagagtcaagtccctgcaagccgacactaccaacacagacaccgctttgaccaccctcgaagaggctcttgctgaaaaagagaggaccattgaaagactgaaggagcagcgcgaccgggatgaacgcgaaaagcaggaagaaatcgacaactacaaaaaagatctcaaggatttgaaagaaaaagtatccctgctccaaggggacttatccgagaaggaagcttctctgctggacctcaaagagcacgcctccagcctcgcgtcctctggtctgaagaaggattcccggttgaagaccctggagattgcccttgagcaaaagaaggaggagtgcctgaagatggagagtcagttgaagaaggcgcacgaagctgccctggaagcacgtgcctctcccgagatgtctgatagaatccagcatctcgagagagaaataaccagatacaaagacgaatcgagcaaggcccaggccgaggttgaccgcctcctggaaatactcaaggaggtggagaatgagaagaacgataaggacaagaaaatcgccgagctggagcgccaagtgaaagaccagaacaaaaaggtcgctaacctgaaacataaagagcaggtggagaaaaaaaagtctgcccagatgcttgaggaggcaagaagacgtgaggacaacctcaacgacagctcacagcagctccaggactccctgaggaaaaaggacgacaggatcgaagaactcgaggaagccctgagagagtctgtgcagattaccgccgagagagagatggtgctggcccaggaggagagcgcgcgcaccaacgcggaaaagcaagtggaggaactcttgatggcaatggagaaggtgaagcaagaactcgagtccatgaaggccaaactatcgtctactcagcaaagcctggccgaaaaggagacccacctgaccaatctcagagctgagcggcgtaagcacctcgaggaggtgttagaaatgaaacaggaggccctcctggccgcaatcagtgagaaagatgccaatatcgctttactcgaactgtctagttccaaaaaaaagacacaggaggaggtggcagctctgaaaagggagaaagatcgcctggttcaacagctgaagcagcagacacaaaaccgaatgaaactcatggcagacaactacgaggacgatcactttaaaagcagtcacagcaaccaaaccaatcacaagccttcccccgaccagattattcagcccttgttggaactagaccaaaatcgcagcaaactgaagctctacattggccatctcactaccttatgccacgaccgcgacccactcatcttgagaggattaactccgccggcctcctacaatcttgacgatgaccaggccgcatgggaaaacgagctgcagaaaatgactcgtggacagctccaggatgaactagaaaagggcgaaagggacaatgccgagctgcaggaatttgccaatgcgatccttcagcagattgcggaccactgtcctgatatactggagcaggtcgtcaatgctctcgaagaatcttcctag

SEQ ID NO: 17938 - DNA, 1485 bp, synthetic construct
  source 1..1485: mol_type = other DNA; note = Synthetic coding sequence
atgaaactggttaatctgtataagggagccgtcctgtacctcctccggggcagaaaaacatttcttattcctgtgctgtttaataattatattactgctgcattgaaacttcttgagaagttgtataaggtcaacctaaaggttaaacatgtggagtacgacactttctatattccagaaatttctaatctggtggatattcaggaagactacctcatgtggtttttgcaccaggccggaatgaaagcgcggccaagtataattcaggatactgtcacactgtgctcttatcctttcatctttgacgcacaggctaagacgaagatgctccagactgacgccgaacttcaaatgcaggtcgcagtgaacggggccaacctccagaatgtattcatgctcctcaccctggaaccgctgctagccaggagcccatttctggtgcttcatgttaggcgaaacaacctggttggcgatgctttgcgggagctctctatccacagcgacatagacttaaaaaaacccctgaaggttatcttcgacggcgaagaggccgtggacgcgggcggggtcacgaaggagttttttctgttgctgcttaaagaactcttaaatcccatttacgggatgtttacctactaccaggactctaacctactgtggtttagcgacacctgttttgtggagcataactggttccacctcattggcatcacttgtgggctggctatctacaatagtacagtggtagatctccacttcccactggcactctacaaaaagctgcttaacgtcaaacccgggctggaagaccttaaggagctgtctcccaccgagggccgctcactccaggagttgttggattatcccggcgaagatgtggaggaaaccttttgcctgaatttcactatttgtagagagtcttatggagtgattgagcagaaaaagttgattccagggggagacaatgttactgtttgcaaagacaacaggcaggaatttgtcgacgcctacgtaaactatgtgttccaaatctcagttcacgaatggtataccgcattctcatcgggatttctgaaggtgtgtggaggcaaagtgttggaactatttcaaccatctgaactaagggccatgatggtaggcaacagtaattacaactgggaagaactggaggagacggccatttataaaggggactatagcgccacacatccgactgtaaagctcttctgggaaacttttcatgaatttcccttggagaagaaaaagaaattcctcctttttcttaccgggagtgaccgcatcccaatttacggcatggcctccctgcaaatcgtcatccaaagtactgcgagtggggaagagtaccttccagtggcccatacttgctacaatctcttagatcttcccaaatactccagcaaggagattttaagtgcgaggcttactcaagcactcgataactacgagggtttctcactggcttag

SEQ ID NO: 17939 - DNA, 2370 bp, synthetic construct
  source 1..2370: mol_type = other DNA; note = Synthetic coding sequence
atgtgtccaagcagccagagcccgcggcctccgctgcttcggccaccctgtagttacagggaggtcccttcttctgttcagtcaccagcccagcagcaggtgcctgcccgtccgggggcaccctccgtgcaggttccatccccttttttgttgcagaatcagtacgaacccgtgcagccccattggttttattgcaaagaagtcgaatacaagcagctgtggatgccgttctccgtgttcgatagtctgaacctcgaggaaatatacaacagtgtgcagcccgacccagagtcagtggtgctggggacagatggaggtcgatacgacgtgtatctgtacgatcgtatccggaaggcagcctactgggaggaggaacccgctgaagttcgtaggtgtacctggttctacaagggggataccgattcacggtttatcccttatacagaagaattttcagagaagttggaagccgagtacaaaaaagcagtaacaaccaatcaatggcaccggaggcttgaatttcccagcggcgaaaccatagtcatgcacaatcctaaggtgatcgtacagttccagccgtcaagcgtacctgatgaatggggcacgacccaggacgggcagacacggccgagagtggttaagcggggcattgacgataatctggacgagattccagatggcgaaatgcctcaggtggatcacctagtctttgtcgtacatggcatcggccctgtgtgcgatctccgctttaggtccattatcgagtgcgtcgatgatttccgagtggtttctcttaagctgttaaggacccactttaaaaagtctctggacgacgggaaagtgagcagggttgagtttctgcctgtgcactggcactcttccctgggaggcgatgccacgggcgtagatagaaacatcaaaaaaataacactgccctctattggtcggtttcgccactttaccaacgagacgctgctggatattcttttttataatagcccgacttattgccagacaatagtggagaaagttggtatggaaataaaccacctccatgcgctcttcatgtcccgtaatccagatttcaagggaggcgtgagcgtggccggccatagcctgggcagcctaattctatttgatatccttagcaaccaaaaggatttgaatctatccaaatgccctgggccattggcagtggcgaacggcgtggtcaagcaacttcatttccaagaaaagcagatgcccgaagagccaaagctaactttggacgagtcttatgatctcgttgtcgagaacaaggaagtgctgactctacaagaaaccctcgaagctttatcattgtctgaatatttcagtaccttcgaaaaggaaaaaattgacatggagtcactgcttatgtgcaccgtcgatgatttgaaagagatgggcatcccattaggacccagaaaaaagatcgcaaacttcgtggagcacaaagcggccaagttaaagaaagcagcctccgagaagaaggctgtagccgcaacatccaccaaaggacaagagcagagtgcccagaagactaaagatatggccagcctgccctctgagtcgaatgaacccaaacgcaaactgcctgtcggagcctgcgtatcatcagtgtgtgttaactacgaatcatttgaagtgggagcaggccaagtctcagtggcctataattctctggattttgagccagaaatcttttttgctctcggcagccccatagcaatgtttctgaccatcagaggagttgacaggattgacgagaattactccctgcccacctgcaaaggctttttcaatatatatcatccactcgacccggtcgcctaccgcctggaacctatgatcgtgcccgatcttgacctcaaggcggttctaataccccaccataagggacgcaagagactacacctcgagttgaaggaatctctgtcacgcatggggtccgacctgaagcagggcttcatcagctctctgaaaagtgcctggcaaacactgaatgagtttgcaagagcgcacacttctagcacccagctgcaggaagagctcgaaaaggtcgccaaccagattaaagaggaagaggagaagcaggttgttgaagctgagaaagtcgtggagtcacccgatttctccaaagatgaagactatctgggcaaagtcgggatgctgaatggtggtaggaggatcgactacgttctccaagaaaaaccaatcgaaagcttcaacgaatatctttttgcactccaatcccacctatgctactgggagtccgaggatacggccctgcttctcctcaaggaaatatataggaccatgaacatctccccagagcaaccgcaacattag

SEQ ID NO: 17940 - DNA, 828 bp, synthetic construct
  source 1..828: mol_type = other DNA; note = Synthetic coding sequence
atgtccgcggaggtgaaggtcacggggcagaaccaagagcagttcctcttgctggccaagagcgcaaaaggagccgccctggccactctcattcaccaggttctggaggccccaggagtgtatgtgtttggagagctgttggacatgcccaatgttagagaacttgcggagtctgattttgcttctacctttcgcctcctgactgtgttcgcctatggaacgtatgctgactatctggcagaggcccggaatttgccgccactcaccgaagcgcagaagaataaattgcgccatttgagcgtggtcacgctggccgctaaagtcaagtgcattccatacgctgtgctcctcgaagctctggccctacggaatgtgaggcagctggaggacttagtgatagaagccgtctacgccgacgtgctgcgagggagtctcgaccaaaggaatcagcggttagaagtggactactccataggccgtgacatacagcgacaggacctctccgcgattgcccgcaccctgcaggaatggtgtgtagggtgcgaggtggtactgagcggaattgaggagcaggtttctagggccaaccagcataaggaacagcagttgggtctcaagcaacagattgagtctgaagtggccaatctgaaaaagaccattaaggtgacgacagccgctgccgcggcggcaacttcgcaggaccccgaacaacatttgacagagttgcgggagcccgcccccggcacgaaccagcgacaacctagcaaaaaagcgtccaaggggaaaggcctacgcggttctgctaaaatatggagtaaaagcaactag

SEQ ID NO: 17941 - DNA, 240 bp, synthetic construct
  source 1..240: mol_type = other DNA; note = Synthetic coding sequence
atgaacgggaccctcgaccacccagaccagcctgatcttgacgcgataaagatgttcgtgggtcaggtccccaggacttggtccgagaaagatctgcgcgagctttttgagcagtacggcgccgtgtacgaaatcaatgtgttgcgagaccgtagccaaaatcctccacagtcaaagggttgttgtttcgtaactttctacactcgcaaagccgctctggaggcccagaacgcgttgtag

SEQ ID NO: 17942 - DNA, 738 bp, synthetic construct
  source 1..738: mol_type = other DNA; note = Synthetic coding sequence
atggttctgctgcacgtcaagcgcggcgatgaaagccaattcttacttcaggctcctggaagcaccgagttggaggagctgacagtgcaagtagccagggtctataatggccgactaaaagttcagcgactgtgtagcgagatggaggaactcgccgaacatggcatttttctcccgcctaatatgcagggtctgaccgatgaccaaatcgaagaacttaaactgaaggacgagtggggtgagaagtgtgtacctagcggtggggcggtcttcaagaaagatgacatagggagaagaaatgggcaggcaccaaatgaaaagatgaaacaagtcttgaaaaaaactatcgaggaagccaaggcgatcatctccaagaagcaggtcgaggcgggagtctgcgtgactatggagatggttaaggatgctttggaccagctgcgcggcgctgtgatgattgtttaccccatgggactaccgccctacgatcctatcagaatggaattcgagaacaaggaggacctcagcggaacacaagccggccttaacgtgataaaagaagccgaagcacaactgtggtgggcagccaaagagctcagacggacgaagaaactttcagactacgtgggcaagaatgaaaagaccaagattattgccaaaatccagcaggtgagcaccttctgttttaatgtctctgtggtctttgtgatctcccttcagaccgacaagaacgtacagtag

SEQ ID NO: 17943 - DNA, 396 bp, synthetic construct
  source 1..396: mol_type = other DNA; note = Synthetic coding sequence
atggctatgaccgcgggcaccacgactacgttccctatgagtaatcacaccagggagagagtgacagtggcgaaattaacactggaaaacttttacagcaacctgatcctgcagcacgaggaaagggaaaccaggcaaaaaaaactggaggttgcgatggaggaggagggtttagctgacgaagaaaagaagctgcggcgctcccaacatgcccgcaaggagaccgaattcttgcgactgaagaggactaggctggggcttgacgactttgagagcctgaaggtgattggtagaggcgcatttggtgaagtgcgattggtacagaagaaagacaccgggcatatctacgcaatgaagattctccgcaagtccgatatgctcgaaaaggaacagtag

SEQ ID NO: 17944 - DNA, 2517 bp, synthetic construct
  source 1..2517: mol_type = other DNA; note = Synthetic coding sequence
atgacaggtgcagagattgaaccatccgctcaagccaagcccgagaaaaaagccggggaagaagtgatagcaggaccagaacgtgagaacgacgtgcccctcgtcgttcgccccaaggttcgaacccaggcaaccacgggcgcacggcctaagaccgagacaaaatcagtgcccgcagctaggcccaaaactgaggcccaagcaatgagcggcgctcggcccaagacagaggtgcaggtcatggggggcgctaggccgaagacggaggctcaggggatcacaggcgcgcggccgaagacagacgcccgggccgtggggggggccagatcaaagacagatgccaaagccattcccggggccagacctaaggatgaggctcaggcttgggcccagtccgagttcgggactgaggccgtgtctcaggctgaaggcgtgtcgcagactaacgctgtcgcatggcctctggcaaccgccgagagtggatcagtcaccaaaagtaagggcctgtccatggacagagagcttgtaaatgtggatgcagagacgtttcccggaactcagggacaaaaaggtatacagccctggtttgggccgggcgaggagaccaacatgggtagttggtgctactctcggcccagggcccgagaagaagccagtaatgagagtgggttctggtctgccgacgagacttctaccgcaagcagcttttggacgggtgaagagacgtccgtccgaagctggcccagagaagagagcaatacgcggagcaggcacagagccaagcaccagaccaatcctaggtcgcggccacggtccaagcaggaggcctatgtcgacagctggagcggctcagaagacgaagcttccaatcctttctcattttgggtaggggagaatacgaacaacttgttccgaccgagagtgcgtgaggaagctaacatcagatctaagctaaggaccaatagagaggattgcttcgagagcgaaagtgaagacgagttctataagcaatcgtgggtgctaccaggcgaagaggcgaattcgcgcttccgtcatagagataaggaggatcctaacaccgccctgaaactccgagctcagaaggacgtggattctgaccgggtaaagcaagaacctcgattcgaagaagaggtgattataggctcatggttttgggccgagaaagaggcaagtctggagggcggcgcctctgcaatttgtgagtccgagcccggcacggaggagggtgcgatcggagggtcagcttactgggcggaggaaaagtccagtttgggagctgtcgctagagaagaggccaagcccgagtccgaagaggaggccattttcggtagctggttttgggaccgcgacgaagcatgtttcgacttgaacccctgtcccgtgtacaaagtgagcgacagattccgcgatgccgccgaggagctgaacgccagctcaagacctcagacctgggacgaagtcaccgtggagttcaaaccaggcttgttccatggcgtggggttccggtcaaccagtccctttggtataccagaggaagcaagcgaaatgctggaggcaaaacctaaaaatctggagttgtctccggaaggagaagaacaggaatctttgctccagccagaccagccatctccagagttcactttccagtatgaccccagttatcgctcagtgagagaaatccgggagcacctgcgagccagggagtcagcggagtctgagtcctggtcttgtagctgcatccagtgtgagttgaagataggaagcgaagaattcgaggaattcctcctgctcatggacaaaatcagggatcccttcatccacgagatctctaaaatcgccatgggcatgaggtcagcttcacagttcactagggatttcattcgtgactcaggcgttgttagtttgatagagactctgctgaactacccttcatcaagagttaggacctctttcctcgaaaacatgattcacatggcccccccctacccaaacctcaacatgatcgaaacatttatctgtcaggtgtgtgaagagacactagctcactctgtggacagcctggagcagttaactgggattagaatgcttaggcacttaactatgactatcgactatcatactttgatagccaattatatgagcgggttcctgtctttgctgacgactgccaacgctaggactaagtttcacgtgctgaaaatgctactgaacctatctgaaaatcctgccgtcgctaagaaactgttctccgctaaggccctctcaatcttcgtgggtctattcaatattgaagagactaatgacaatatccagatagtcatcaaaatgtttcagaatatcagtaacatcattaagtccggcaagatgtccttgatagacgacgactttagccttgagccactgatcagcgccttccgggaattcgaagaactcgcgaaacagctgcaggcccagattgataatcagaatgaccctgaagttggccagcagtcctag

SEQ ID NO: 17945 - DNA, 1215 bp, synthetic construct
  source 1..1215: mol_type = other DNA; note = Synthetic coding sequence
atggatttcaacatgaagaaattggcctctgatgctgggatcttcttcacacgcgccgtgcagttcacagaagaaaagttcggccaagccgagaagacggaactcgacgcacactttgagaacctcttggcgcgagccgacagcacaaaaaattggactgaaaagattctcagacagacggaggttctcctccaaccaaacccaagcgctagagtggaggagttcctctatgagaaactggacagaaaggttcccagtcgggtaacaaacggagagctgctcgctcagtatatggccgacgcagccagcgaactgggtcccaccactccatacggaaaaacactaataaaggtggccgaagccgagaaacagcttggggccgccgagcgtgactttatccatacagcttccatctcatttctgacacctctgcgcaattttctcgagggagactggaagaccatctccaaggaaagacggctgctgcagaatcgacggctggacttggatgcctgtaaagccaggttgaagaaagctaaggccgctgaagcgaaggcaacggccgagggtcccaccgtgcctgatttccaggaaactcggccaaggaattacatactgagtgcaagtgccagtgctctgtggaatgacgaggtagacaaagccgaacaggaattgcgcgtggctcagactgaattcgatcgccaggccgaagtgactcgcctgctcctcgagggaatttccagcacccacgtcaaccacctacgctgtcttcatgagtttgtcaaaagccagacaacttactatgcccaatgttatcgccacatgcttgatctgcaaaaacaactggggtcatcccagggcgccatctttccgggaacgttcgtggggaccacagagccggctagtccaccgctgagctccacttcgcccaccactgccgcagctacaatgcccgtcgtgccatccgtcgcgtcactggctccccccggtgaggcctccctgtgcctggaggaggtcgcacccccagcatccggcacaagaaaggctcgtgtgctgtacgattatgaggcggctgacagctccgagctggccctgctggcagacgagctgatcacggtgtatagtctccctggaatggacccggactggctgatcggggagcggggtaataagaaggggaaggtgcccgttacttacctggagctcttgtcttag

SEQ ID NO: 17946 - DNA, 495 bp, synthetic construct
  source 1..495: mol_type = other DNA; note = Synthetic coding sequence
atgacatgctgccagacctccttctgtggctaccctagcttctcaattagtgggacatgtggctcttcgtgctgccagccgtcctgttgcgagacttcgtgttgtcaaccccgaagttgccaaacgtccttttgtggctttccgagcttttcaactagtgggacctgttcttctagttgctgtcagccttcctgctgtgaaacctcctgttgccagccttcatgctgccagatctcaagctgcggaaccgggtgtggtatcggaggcggcatttcctacggccaggagggctcctccggcgccgtgtccaccagaattcggtggtgtcgccctgactcaagagtcgagggtacatacctgcccccgtgttgcgtggtttcgtgcacaccacctagttgctgccagctacaccatgcgcaagcatcctgctgcagaccgtcttattgcggccaatcttgctgtcgtccagtatgttgttgtgaacccacttgctag

SEQ ID NO: 17947 - DNA, 846 bp, synthetic construct
  source 1..846: mol_type = other DNA; note = Synthetic coding sequence
atgctgactaagttgcagattaaacagatgatggaagcggccacaaggcagatagaggaacggaagaaacagctgtcattcatctcaccaccaaccccacagccaaaaaccccaagtagcagtcagccagaacgcctgccaattggcaacacgatccaaccctctcaggcagcaacctttatgaacgacgcgattgagaaagctagaaaggcagccgagctgcaggcaagaatccaggcacagctcgcactcaagcctggacttatcggaaatgctaatatggtcggcctggccaatttacacgccatgggaatagcgccacctaaagttgaactgaaggatcaaaccaagcctacaccactcatccttgacgaacaaggccgcactgttgatgccaccgggaaggaaattgaattgacccatcgaatgcctactctgaaggcaaatattcgggcggttaagcgtgagcagtttaaacagcagctgaaggagaagccaagtgaggacatggagtcaaacaccttttttgaccccagagtgagcattgctcccagtcagcgccagcggaggacatttaaatttcatgacaaagggaaatttgagaaaatcgctcagcgattgcggactaaagcacagctggagaaactgcaggccgagatctcccaggccgcccgcaagacaggcatccacacgtccacgcgccttgctctgattgctcccaagaaagagctcaaagagggcgatatcccagagattgagtggtgggactcctacatcattcctaacggattcgatctgggcaagtcgcaggaacgtcggttgttctggaaccacaaaagttgctag

SEQ ID NO: 17948 - DNA, 693 bp, synthetic construct
  source 1..693: mol_type = other DNA; note = Synthetic coding sequence
atgcgtggccacgagtcatcagtgttttctatcagtgtgcatgccagtgggaagtacgcaataaccacgagtagcgacaccgctcagctgtgggacctcgacaccttccaacgcaagcggaagcttaacatcaggcagtctgttggtatacagaaggtattcttcctgccactcagtaacaccatcttgtcctgctttaaggacaatagtatctttgcctgggagtgtgatacactcttttgtaagtatcagcttcctgcaccacctgagtcgtcatcaatcctgtacaaggtgttcgccgtcacccgggacggcagaatcctggcagcaggcggcaagagtaatcacctgcacctctggtgtctcgaggcacgacaactcttcagaatcatccaaatgccgacgaaggtcagagcgatccgacatttagagttccttcctgatagttttgacgccgggagcaaccaggtcctgggagtcctctcacaggacggcattatgagattcattaatatgcagacttgcaagttgcttttcgagataggatctttggacgaaggtatttcaagttcagccatttcccctcacggcagatacatcgccagcattatggagaacggaagcctcaacatctactctgtccaggcactcacccaggagataaacaaagaggaagtaagagcacagaactag

SEQ ID NO: 17949 - DNA, 1212 bp, synthetic construct
  source 1..1212: mol_type = other DNA; note = Synthetic coding sequence
atggacagcaccatggacgatgcagtggcgggtgactttgcactgatcaataaactggatattcagtgcgacctaaaaacactctccgatgatatcaaggaatccttggagtctgaaggaaaaaactctaagaaagaggagccgcaggaattgcttcagagccaagattttgtgggcgagaagttgggctctggggaaccgagccattcggtgaaggtgcatacagtgcccaagccggggaaaggcgccgacttgagtaagcccccttgcaggaaggctaaagaaattcggaaggagagaaagagactcaagttgatgcagcaaaaccctgccggagagctggagggcttccaggcacagggacaccccccctctctgtttcctccgaaagctaagtcgaaccagccaaagagtctagaagatctgatctttgagtcattaccagaaaacgccagccacaaattggaagttcgggtggtgcgcagtagtccaccttcctctcagtttaaagcaaccctgctggaaagttaccaagtgtacaagcgttaccagatggttattcacaaaaatccccccgacacacctaccgaatctcagttcacacgcttcctgtgtagttcacccttggaggccgagaccccgcctaatggccctgattgcggatacggatcctttcaccaacaatactggctggacggaaagatcattgcagtcggcgtgatcgacattctgcctaattgcgtgtcctcagtctacctctactacgatcctgattatagctttttgtcactgggcgtatattctgctcttagagagatcgcgttcactcgccagttgcatgaaaaaacctctcagctgtcttattattacatggggttttatatacacagttgtcccaagatgaaatacaagggtcaatatcgcccttcggacctgttatgccctgaaacctacgtatgggtcccaatagagcagtgcctaccaagcctggaaaactccaagtattgtagattcaaccaggaccccgaggccgtggacgaagacagatctactgaacctgatcgattgcaggtgtttcacaaacgcgcaatcatgccatacggggtgtacaaaaagcaacagaaggacccgtccgaagaggccgcagttcttcagtatgcctctctggttggacagaagtgcagtgaacgcatgctgctgtttagaaactag

SEQ ID NO: 17950 - DNA, 909 bp, synthetic construct
  source 1..909: mol_type = other DNA; note = Synthetic coding sequence
atgccactctacgaggggctaggctccgggggcgaaaaaaccgcagttgtgatcgacttgggagaagcctttactaagtgcgggttcgcaggggagactggtccacggtgtatcattccctctgttattaaaagggctggaatgccaaagcccgtgagagtagtgcaatataacatcaacaccgaagaactttatagttacctgaaggaatttattcatatcctgtactttaggcaccttctagttaatccaagggatagaagagtggttataattgaatctgtcctgtgtccatcccacttccgggaaactttaacccgggttctctttaagtattttgaggtgccttctgtgctgctggcgccttcacacctgatggccctgttaacactagggatcaacagcgccatggtcctcgactgtggctatagggaaagcctcgtgctgcctatatatgaaggcatccctgtgctcaactgctggggcgctctacccctgggagggaaagcgctgcacaaggagctggaaacccaattgctggagcagtgcaccgttgatacctctgtagcaaaagagcagtccctgccctcagtgatgggctccgtgcctgaaggggtgctcgaggacatcaaggcgaggacttgtttcgtgtccgatttgaaacggggactcaagatccaggcggccaaatttaatatcgacgggaataatgagagaccatctcctcccccgaatgtagactacccgctggacggggagaagatactgcatattttggggagcatccgggactctgtagtggagattctcttcgagcaggacaacgaagagcaaagcgttgccacactgatcctggacagcctgattcagtgctgctcatgctgccctgggtggtctgcaatggcctag

SEQ ID NO: 17951 - DNA, 378 bp, synthetic construct
  source 1..378: mol_type = other DNA; note = Synthetic coding sequence
atgtcatcttgtgtctccagccaaccaagcagcaatcgagccgccccgcaggacgagctgggggggaggggctcttcctcaagcgagagccagaaaccctgtgaagccctgaggggcttgtctagcttgagcattcacctcggaatggaatctttcatcgtggttacagagtgtgagccaggctgtgccgtggatctcgggcttgcacgcgaccgacccttggaggcagacggccaggaagtgcccctcgatacaagtggaagtcaggctaggcctcatctcagcggccgtaaattgagcctgcaggagcgcagtcagggaggcctggcggctggcggtagcctcgacatgaatggacggtgcatctgcccaagttag

SEQ ID NO: 17952 - DNA, 1161 bp, synthetic construct
  source 1..1161: mol_type = other DNA; note = Synthetic coding sequence
atggcggacagcctcgagtctacccctctgcccagtccagaggatcgattagctaaactgcatccttccaaggagctgctggagtattaccagaaaaagatggccgagtgtgaagccgagaacgaagacctgttaaagaaactcgagctctacaaggaggcttgcgaaggccagcacaaactcgagtgcgatcttcagcagagagaagaggagatcgccgaactgcagaaagccctgagcgacatgcaggtctgtctgtttcaagagagggagcacgtcttacggctttattctgaaaacgacaggttacgtattcgcgagctggaggataaaaaaaaaatccagaatcttttggctctggtagggacggatgcaggggaagtgacctacttctgcaaggaacctccgcataaagtgacaattctgcaaaaaaccatccaggccgttggtgagtgcgagcagagtgagagctctgcatttaaagcggacccaaagattagcaaacggagaccttcccgcgagaggaaagagtcctccgaacattaccagagagatatccaaacactaatcctccaggtagaagccttgcaggctcagttgggagagcagactaaactgagtagagagcagattgagggcctgattgaggataggaggatccatctggaagaaattcaggtgcaacatcagcgcaatcagaataaaattaaggagctcactaagaatctgcaccacacacaggagctattatatgagagcactaaggacttccttcagctcaggagcgagaatcagaataaggaaaagtcttggatgctcgagaaagacaatcttatgtccaagattaaacagtatcgggttcagtgtaagaaaaaagaggacaagattgggaaggtgcttcctgtaatgcacgagagtcaccacgcacagtcagagtacattaaaagcttgaaggacaaattggtccaggaaaaaaaactgtcaaatatgtaccaggaacaatgtatcagtcttgaggaggagctggccagaatccgggaggaggaagggatgcgccgcgaaatcttcaaagaccgaaccaataagatgggaaagcgtttgcagatcatgactaagcgatatgaggccctcgagagacggcgcatccttgaggtcgagtag

SEQ ID NO: 17953 - DNA, 999 bp, synthetic construct
  source 1..999: mol_type = other DNA; note = Synthetic coding sequence
atggagtacttaggaggcggaagtgcgctcgacttgctgaaaccgggtccactggaggagacatatattgccaccattctgcgtgaaatcctgaagggtctcgattacctacatagcgaacggaaaattcatcgtgatatcaaagctgccaacgtgttgttgagcgaacagggagacgtgaaactggccgatttcggcgtggcaggacaactaacggatactcagatcaaaaggaacacatttgtcggcacacccttttggatggcccctgaggtaattaagcagtctgcttacgactttaaggccgatatttggtcgttgggcatcacagcaatcgagctagccaaaggggaaccaccgaacagcgatttacacccaatgcgcgtactgtttctgattccgaagaactccccccccacgcttgaagggcaacacagcaaaccgtttaaagagtttgttgaggcctgcctgaataaggatccaaggttccgtcctacagccaaggaactgctgaagcacaaattcatcacccgatacaccaagaaaacaagctttctcacggagctgatcgataggtataaacggtggaagtcagaagggcatggggaggagagcagtagcgaggacagtgatattgacggggaggcagaagatggggagcagggtccaatatggaccttcccacccacaatccgcccctctccacattctaaactgcataagggaacagccctgcattcctctcaaaaaccggcggagccggtcaaacgccagccccggtcccagtgcctctccactctggtgcgaccagtatttggagagcttaaagaaaagcataagcagtcaggaggatcagtgggcgcattggaggagctggagaacgcattttccctggctgaagagtcctgtcctgggattagtgacaagctgatggtgcatctcgttgagcgtgtacaacgcttcagccacaaccgcaaccatctgactagcaccaggtag

SEQ ID NO: 17954 - DNA, 1524 bp, synthetic construct
  source 1..1524: mol_type = other DNA; note = Synthetic coding sequence
atggaggaggtggagcgccaggtgctgcctgatcctgaagtgctggaagccgtgggggacagacaggatggcctccgtgagcagctgcaggccccagtgccgcccgactcagtgccttctctgcaaaatatggggctgcttctggacaaactggcgaaggagaatcaagatatcagactcctgcaggctcagctgcaggcccagaaagaagagcttcagtccttgatgcaccagcccaagggcttggaagaggaaaacgcacagttgcgaggcgcgctgcaacaaggcgaggcctttcagagggctctcgagtccgagttgcaacaactccgtgcccggctacagggcctcgaggcagattgtgtgcgtggacctgatggcgtctgcctttccggcggccggggcccccaaggggataaggcgatcagagaacagggaccaagggaacaggagccagagctgtcattcttgaagcagaaagagcaactggaggcagaagcccaggctttacgccaagagttagagagacaacgacgcctcctcgggtccgtgcagcaagatctggagaggtccctgcaggacgctagcagaggggaccccgcacacgcaggcctggccgagctcggccaccgtctagctcagaagctacagggtctcgagaactggggtcaggatcccggcgtctcagcaaacgcctccaaggcttggcaccagaagagtcactttcagaactcaagggaatggtcagggaaggagaagtggtgggatgggcagcgtgatagaaaggcagaacactggaaacacaagaaggaggagtctggacgcgagagaaagaaaaactggggaggacaagaggacagagaacccgccggcaggtggaaggagggccgccctcgggtggaagagtccggatccaagaaagagggtaaacggcagggcccgaaagagcctcctcgaaagagtggttccttccattcaagcggcgagaagcagaagcagcctaggtggcgagagggcaccaaggatagccatgatccgctcccgtcatgggctgagttgctccgcccaaagtaccgggcccctcaaggatgcagcggggttgacgagtgcgccaggcaggaaggactgactttcttcgggacagagctggcccccgtgagacagcaggagctggcatctctgctccggacttatctggcacgcttgccctgggcggggcagctgacaaaagagcttccgcttagtcccgcttttttcggggaggatggcatctttcgtcatgatcggctcagatttcgggacttcgtcgacgcgctggaggacagtttagaggaagtcgcagtgcagcagactggggacgatgatgaggtagatgactttgaagactttatatttagccatttctttggtgacaaggccttaaaaaagcgctcaggtaaaaaggataagcatagtcaaagtcccagagccgcaggtcctcgcgaggggcactcacactcccatcatcatcaccatagggggtag

SEQ ID NO: 17955 - DNA, 2472 bp, synthetic construct
  source 1..2472: mol_type = other DNA; note = Synthetic coding sequence
atgactcttttaagttcacagtcctcttcgctagtggcccccagcggaagcgtcagcgccgaaaacccagagcagcggatgctggagaaaagagccaaggtcatcgaggaattgctacaaacggaaagagattatataagagatcttgaaatgtgcatagagcggatcatggtgcctatgcagcaggcccaagtgcctaacattgacttcgaaggccttttcggtaatatgcaaatggttatcaaggtttccaagcaactacttgctgcgctcgaaatcagcgacgccgtcgggccggtcttcctgggccaccgggacgagctggaaggcacttataagatctactgtcagaatcacgatgaggctattgcattgttggagatatatgaaaaagatgagaaaatccagaagcatctccaggacagcctggcagatctgaagagcctgtacaacgagtggggctgtactaattatattaaccttgggtcctttttgattaaacccgtgcagcgagtgatgaggtacccactgcttctcatggaactccttaactctacccccgaatcacacccggacaaggtgcccttaacaaatgccgtactcgctgtgaaggagataaacgtgaacatcaatgagtacaaacgcagaaaggatctcgttcttaagtataggaaaggggatgaagattcccttatggaaaaaatttccaagcttaacattcatagtatcataaaaaagtccaatcgcgtgtcgagtcatttgaagcacctcaccggtttcgccccccagattaaagatgaggtcttcgaggagaccgagaagaatttcaggatgcaggaacgtcttataaagagcttcattcgagatttgtccctgtacctgcagcatatcagggagagcgcctgtgtcaaggtagtagcagctgtatctatgtgggacgtttgtatggagagggggcatcgtgacctggagcagttcgaaagggtgcaccgctacatctcagaccaattatttacaaatttcaaagagcgcaccgagagacttgtcattagcccacttaaccagctgctttcaatgttcacaggcccacacaaactagtccagaagcggttcgacaagcttcttgatttctacaattgcactgagcgagcagagaaactcaaagataaaaaaaccctggaagaactacaaagtgcccggaataactacgaggctctaaatgctcagctgcttgatgaactccccaaatttcaccaatatgcacaggggttgttcaccaattgtgtgcatggctatgcagaggctcactgcgactttgtgcatcaggccctagaacagctgaagcccctgctgtcactgctcaaagtggccggacgtgagggcaatttgatcgctatctttcatgaggaacactcgcgggtgttacaacagcttcaagtcttcacattcttccccgagagcctccctgccacaaagaagccttttgagagaaaaaccatagaccggcagtcagcccgcaaaccattactgggcctcccaagctacatgctccaaagcgaagaacttcgcgcatcactattggctcggtatccccccgagaagctgttccaggccgaacgaaacttcaacgctgcccaggacctagacgtatccctgttagaaggggatctcgttggcgttattaagaagaaagatcctatgggttctcagaatagatggctcattgacaatggcgttactaagggcttcgtgtatagtagttttctcaaaccgtataacccccggagatctcattccgacgccagtgtcggcagccacagctccacagagagcgaacatggcagcagctccccaagatttccccggcagaattctgggtccacgctgactttcaacccatcctccatggcagtaagcttcacgagcgggagctgccagaagcagccccaagatgcatctccaccacccaaggagtgtgaccaaggcacgttgagcgcctccttaaacccatccaactctgagtcatccccctcacggtgtccgtcggaccctgattccacctctcagcccagatccggcgacagcgcggatgtggcccgggacgtcaaacagcctaccgcaacaccaagatcatacagaaattttaggcaccccgagattgtgggttattctgtccccggcaggaatgggcaatcacaggatctggtaaagggctgcgcccgtaccgcccaggcacccgaggataggtccacagagcctgacggatccgaagccgaggggaaccaggtgtatttcgctgtttacaccttcaaagcccggaacccaaacgagttgagcgttagtgccaaccagaaactgaagatactcgaattcaaggatgtgacagggaacacagaatggtggctagccgaggtcaacggcaagaaaggttatgttccttcaaactacattcgcaagactgaatacacctag

SEQ ID NO: 17956 - DNA, 492 bp, synthetic construct
  source 1..492: mol_type = other DNA; note = Synthetic coding sequence
taggacaaattccgcgcgtctcccgactgtatcactatcttgtgcaagccaaacggacaggcaattgcgtggtacacgcctatccattggaagcaggcttgggaaaagctggacgccgacgtggaattcaacaggtgtagcgttgtgagtcccacattcaggaaacgcgtcttccagtggacagcatccaccgcgacgatcaccaaggagaaacaggatcagccaaagaaggatatttccaattatcaggtggagcaggctcaggttcttctgaagcgcgaaaaggaaatcccccccaccgtgtttccaaaccgaagcccctggtgtcaaaacccctacgtgagcgctcacccatactgtcccttgattgagccacataacacatccactgcaggaggccgtcttgatcgacagcccagaacccgcagtacaagaccgaatcgcgcaagtgggtcgaaaaagaagaaaacctcggaatctcagaagcagtag

SEQ ID NO: 17957 - DNA, 771 bp, synthetic construct
  source 1..771: mol_type = other DNA; note = Synthetic coding sequence
atggctactcagagaaagcaccttgttaaagatttcaatccgtatatcacctgttacatctgtaagggatatctgatcaaaccaacgaccgtgactgagtgtctgcacacattttgtaaaacttgcatcgtgcagcacttcgaggatagcaacgactgtccaagatgcggcaatcaggtgcacgagaccaacccacttgagatgttgagactcgacaatacattagaagagatcattttcaagttggttcctggcctgcgcgagcaggagctggagcgagagtcggagttctggaaaaagaataaaccccaggaaaatgggcaggatgacacgtctaaggcggataaacccaaggttgacgaagagggcgacgagaatgaggatgataaggactatcacagatccgacccccaaatcgcaatatgtctggactgcctccgcaacaacggccaatccggggataatgttgttaaaggcctgatgaagaagtttattaggtgttctactagggtgacagttggcactatcaaaaagtttctcagtctcaagctgaagctgcctagttcctatgagcttgacgtgctgtgtaatggggaaataatggggaaggatcataccatggagtttatttatatgaccaggtggagacttcgaggggagaactttcgctgcctgaactgctccgcgtcacaagtgtgctctcaggacggacctttgtatcagagctacccaatggttcttcaatatagaccgcgtatagattttggttag

SEQ ID NO: 17958 - DNA, 2793 bp, synthetic construct
  source 1..2793: mol_type = other DNA; note = Synthetic coding sequence
atgtcagaatttagaattcaccatgatgtaaacgaacttctcagtctgctgagagtgcatggcggtgatggagccgaagtctacattgacttattgcagaagaaccgcacaccctatgttaccacaacagtctctgcccatagtgccaaggtgaagatagctgaattttctcgtacaccagaggacttcctaaagaaatatgatgagttgaagtctaaaaacactcgtaatttggacccacttgtgtaccttctcagtaagctcaccgaggacaaggagacactgcagtatttgcagcaaaatgccaaagagcgcgctgaactggctgccgccgctgttgggagtagcactacatctatcaatgttcctgcagcagcgtctaagatctctatgcaggagctggaagaactgcgtaagcaattaggttccgtcgcgacaggaagcaccttgcaacagagcttggaactaaaacgaaagatgctgcgcgataagcagaataagaagaatagcgggcagcaccttccaatttttcctgcctgggtttacgagagacccgcattgataggagacttcctgattggggccggcatctccacagataccgcactgcccattgtcttgctgcgatggaacttggctctgagcccccggctgaagtgtagcggagtcattagcgcccattgcaatctgcatctcccgggtacgttacccctggcctctcaagaatccgctgtagtcgaggatcttctctacgtacttgtcggagttgatggacggtatgtgagtgcccagccacttgctggaaggcagtccagaacttttcttgtggatcctaacttagacctgagtatccgagagcttgttcatcgcatccttcccgtggccgcgtcttatagcgcagtgaccaggtttattgaggaaaagagcagtttcgagtacggacaggtgaatcatgcactggcagcagctatgcggacactcgtcaaggagcacctgatcctggtgtcccaactggagcagttgcacaggcagggcttactctccctccagaagttatggttttatatacagccggctatgcgtaccatggatatccttgcttctttagcaactagtgtggataagggcgagtgtttaggaggctcgacgttgtctcttctgcacgaccgttccttctcctacactggtgatagtcaggcccaggaactgtgcctttacctgaccaaagcagcttctgcaccctacttcgaagtgttagaaaagtggatctatagaggaatcatacacgacccttactccgaattcatggtggaggagcatgagctcaggaaagagcgcatccaagaggactataatgacaagtactgggaccagaggtacactatagtgcaacagcagatcccatcattcctacagaaaatggccgataaaatcctgagtacaggcaaataccttaacgtggtcagggaatgtggccacgacgtgacctgtcccgtggccaaagagataatttacacattgaaggagcgggcctatgtggaacagatcgaaaaggccttcaactatgcctctaaggtactcctggactttctgatggaggagaaggagttagtcgcccacctcaggtccataaagagatactttttaatggaccagggagactttttcgtgcatttcatggatctcgctgaagaggaactgcgcaagcctgtggaggacattacacccccaaggctagaggccctcctcgagttggctctcagaatgagtacggccaatactgatccttttaaggacgacctgaaaatcgatttgatgccccacgacttgattactcaactgctgagggtgctcgccatcgaaactaagcaggagaaggcaatggcacacgccgatccaaccgaactcgccctctcgggtctcgaagcgtttagcttcgattacattgtgaagtggcccctgtccttaatcatcaatcgcaaggccctgacaagatatcaaatgttatttaggcacatgttctactgcaagcacgtagaacggcagctgtgtagcgtttggatctctaataaaaccgcgaagcagcattcactgcattccgcacaatggtttgccggggcattcactttgagacagagaatgctaaattttgtgcagaatattcaatattacatgatgtttgaagtaatggagcctacatggcacatcctggaaaagaatctgaagtctgcctccaacatcgatgatgtcctgggccaccacacaggctttttggacacatgcctgaaggactgcatgttgaccaaccccgagctgctgaaagttttttcaaaactgatgtcggtctgtgtgatgtttaccaactgtatgcagaagtttacccagtcaatgaagctggacggagagctcggggggcaaacccttgagcatagtacagtcctgggcctgcccgccggggccgaagaacgagcgcgcaaggagctggccagaaagcacctggctgagcacgctgataccgtgcagctagtatccggatttgaggccaccattaataaatttgacaagaattttagcgctcacctgcttgatctcctcgctcggcttagtatttattctacctctgattgtgagcacggtatggcgtccgtcatctcaaggttggacttcaacggcttttacacagagagactggaaagactgtccgccgagcggtcccagaaggctacacctcaggtgccagtcctccgcggcccccctgccccggcaccaagagtcgcagtaaccgctcagtag

SEQ ID NO: 17959 - DNA, 129 bp, synthetic construct
  source 1..129: mol_type = other DNA; note = Synthetic coding sequence
atgtgcctgctgcccatccgggtcaaggaggctgaagaagtgtgtaggcaaaagaagggcaaaagtttgtacaagattaagcctaggcacgacagcgggattaaggccaaaatttcaatgaaaacatag

SEQ ID NO: 17960 - DNA, 456 bp, synthetic construct
  source 1..456: mol_type = other DNA; note = Synthetic coding sequence
atggactgtcgggagatggacctctatgaggattatcagagcccttttgactttgacgcgggcgtgaacaagtcttacttgtacctctcaccctccggcaattcatcaccacctggcagtcctactcttcagaagttcggcctgctccggacggatccagttcctgaggaaggagaagatgttgctgccaccatcagtgccacggaaacactcagcgaagaggagcaggaggaactgagacgagaacttgctaaagtggaggaggaaatccagactctgagtcaggtcctggccgctaaggagaaacacttggcagaaatcaaacgcaaactgggtattaattcgctgcaggaactcaaacagaacatagctaaggggtggcaggatgtgacggctacctctgccagatccaagctcctggccgctgaaacggaactgttgtgcttgttatattag

SEQ ID NO: 17961 - DNA, 627 bp, synthetic construct
  source 1..627: mol_type = other DNA; note = Synthetic coding sequence
atgtctgcaggcggagattttggcaacccccttagaaagtttaagctggtgtttctcggcgaacagagtgtcggaaagacatcactgattacgagatttatgtacgactcattcgacaacacatatcaggccaccatcgggatcgactttttgtctaaaacaatgtaccttgaggacagaacagtcaggctacagctgtgggatactgctgggcaagagagatttagatccctcattcccagctatataagagattctacagtggcagtggtcgtgtacgatataacaaacttaaatagctttcaacaaacaagcaagtggattgatgatgtgagaacggagcgtggtagcgacgtgataatcatgttagtgggaaacaagaccgacctggcagataaacgccagatcacaatcgaggagggcgaacaaagagccaaagagttatccgtcatgttcattgagacatctgccaaaaccggctacaacgtcaagcagctttttagacgggtagcgtccgcactacccgggatggaaaatgtacaggaaaagtccaaagaggggatgattgatatcaaactggacaagcctcaggaacctccagcaagcgagggaggctgttcttgctag

SEQ ID NO: 17962 - DNA, 1575 bp, synthetic construct
  source 1..1575: mol_type = other DNA; note = Synthetic coding sequence
atgaagcgttctagcgtctcgtccggaggagccgggagactgagcatgcaggaactcaggagccaggatgttaacaagcaagggctgtatacaccccagaccaaggaaaaacccacattcggcaagctgagtatcaacaagcccacatctgaacggaaggtctcactgtttgggaagcggacctcaggtcacggtagtaggaactcgcaattaggcatatttagcagcagcgaaaagatcaaagaccctagacccctgaatgataaagcttttatccagcaatgtatccgacagctgtgcgagttcttgacagaaaatgggtacgcccataacgtgagcatgaagagtcttcaggccccatccgtgaaggatttcctcaagatctttaccttcttgtatgggttcctgtgtcctagctacgagctgcctgacaccaagtttgaggaggaggtcccaaggattttcaaggatctggggtatcccttcgccctaagcaagagttctatgtatacggtgggtgcaccgcacacttggccccatatagtggccgctctcgtgtggctgatagactgcatcaaaattcacactgccatgaaggaatcctcccctctgttcgatgacgggcagccatggggcgaagagactgaggacggcatcatgcacaataaactgttcctcgactacaccatcaagtgttatgaatcattcatgtcgggcgcagacagttttgatgagatgaatgctgaactacaatctaaattgaaagatctgtttaacgtggacgccttcaagttagaaagcctggaagccaaaaatcgagccctgaacgagcagattgcgcgattggagcaggagagagagaaagagcccaatcgccttgaatcccttcggaagctgaaggcatctcttcagggcgatgtgcagaagtatcaggcctacatgtcaaatctagagtcccacagtgcgatacttgatcagaaactcaacggactcaatgaggagatagcacgcgtggagctcgagtgcgaaactataaagcaggagaacactcgtctacagaatattatcgataaccagaaatactctgtcgctgacatcgagcgcatcaaccacgagcggaacgaactgcagcagaccattaataagcttaccaaggatctggaagccgagcagcagaagttgtggaacgaggaactcaaatatgccagagggaaagaagccatcgaaacgcagctggctgagtaccataagctggcacgtaagctgaaactaatcccaaagggtgcagagaattccaagggttacgatttcgaaatcaaattcaacccagaggctggtgcgaattgtctggtcaagtatcgcgcccaagtgtacgtccctctcaaagaactactgaatgagaccgaagaggagataaataaggcactgaacaaaaaaatgggtctggaagataccctggaacagcttaacgctatgatcactgagtctaaaagaagcgtgcgaacactcaaagaagaagtccagaaactggacgacctttatcagcagaaaattaagaaagaacggaagaagtag

SEQ ID NO: 17963 - DNA, 1248 bp, synthetic construct
  source 1..1248: mol_type = other DNA; note = Synthetic coding sequence
atgatgctgggaccagaaggaggtgagggctttgtcgtaaaactgcggggactaccatggtcatgctccgtggaggatgttcaaaatttcctctccgattgtacaatccatgacggggccgccggcgtgcatttcatctacactcgcgagggcagacaaagtggcgaagcatttgtcgagctggggtctgaggacgacgtcaagatggctctgaaaaaggaccgagagagcatgggccacaggtatatcgaagtcttcaagtcccacagaacagagatggattgggttctgaagcactccgggcccaactctgccgactctgcaaacgacgggttcgtgaggcttcgggggctccctttcgggtgtactaaggaggaaattgttcaattcttttccgggctggagatcgtgccaaacgggatcactcttccagtggatccggaaggaaaaatcacaggggaggctttcgttcagttcgccagtcaagagttagccgagaaagcactaggtaagcataaggagagaatcgggcacaggtatattgaagtatttaaatcaagccaggaggaggtgaggtcttactccgatccacctctcaagtttatgtccgtgcaacggccaggcccatacgatcggcctggaaccgctaggcggtacataggcattgtgaagcaggcgggtctggaaaggatgaggcctggtgcctactccacaggctacggcggctacgaagaatatagcgggctgagtgacggttacggattcaccactgacctgtttggtcgagatctgagctactgcctcagcggaatgtacgatcacaggtacggggactccgaattcaccgtgcagtctaccaccggccactgtgtgcacatgcgaggactcccatacaaagcaacagagaatgacatatataacttcttcagcccattgaaccctgtccgggtgcacatcgaaataggtcctgacggacgggtaactggcgaagccgacgtggaatttgcaacacacgaggaagctgtggccgccatgtcaaaggatcgcgccaacatgcagcaccgctatatcgagctcttcctcaactccacaaccggggcttcaaacggcgcttattcatctcaggtaatgcagggaatgggcgtgtctgctgcacaggcaacctattccggacttgagtcccagtccgtgagcggatgctatggggctgggtactccggacaaaacagcatgggtggatacgattag

SEQ ID NO: 17964 - DNA, 1512 bp, synthetic construct
  source 1..1512: mol_type = other DNA; note = Synthetic coding sequence
atggctagtaaccacaagtcgagtgctgcgcgccccgttagccggggcggggtcgggttgaccgggcgtcccccaagcggcatacggccgctgtctggaaacatcagagtagcaaccgctatgcctccgggcaccgctcggcccggcagcagagggtgcccgatcggaacgggcggggtcctgagcagccagatcaaagtcgctcatcggccggttacgcagcaaggactcacaggcatgaagactggtactaagggaccacaacgccagatcctagacaagtcttactaccttggacttttaaggagcaagatttcagagctgaccactgaagtcaataagctacagaagggtatcgagatgtataaccaggaaaacagcgtatacttatcatatgaaaagagagctgaaacattggctgtggagatcaaagaactccagggacagctcgcagactataacatgctcgtggacaagctaaacacaaataccgagatggaagaggtgatgaacgactataatatgcttaaggcacagaacgatagggagacacaatctcttgatgtgatatttactgagcggcaggcaaaagaaaaacagatacgctctgtggaagaggaaatcgaacaagaaaaacaagcaaccgacgacatcattaaaaacatgtcttttgagaatcaggtcaagtatttggagatgaaaactacaaacgaaaagctcctccaggaactggatactttgcagcagcaactggactcccagaacatgaagaaggaatcactcgaggctgaaatagcacattctcaagttaagcaggaggcagtgctcttgcacgagaagctttatgagctcgagtcccatagagatcaaatgattgcagaggacaagtctataggctctcctatggaggagagggagaaattgctcaagcagattaaagatgacaatcaggagattgcaagtatggaaaggcaacttacagatacaaaagagaaaattaaccagttcattgaggagattcgtcaactggacatggaccttgaggagcatcaaggggaaatgaatcagaagtacaaagagctaaagaagagggaggagcatatggacacgttcatcgaaaccttcgaggagacaaagaatcaagagctcaagcgcaaagcacagatagaagctaacatcgtggccttgttagagcactgcagcagaaatatcaacagaattgaacagataagcagcatcactaatcaggagttaaaaatgatgcaggacgatttaaatttcaagtccaccgaggttcagaagtcacagagcacagcacagaacctgacctccgacatccagcgtctgcaattggatctccagaaaatggaactcctggagagcaaaatgaccgaagagcagcattctttgaaatctaaaataaaacaaatgacaacagacttggaaatctataacgacctgcccgcgcttaagtcatccggcgagaaaaagaaaaagaagaaaaaaaagtag

SEQ ID NO: 17965 - DNA, 1461 bp, synthetic construct
  source 1..1461: mol_type = other DNA; note = Synthetic coding sequence
atgacatgcgggtcttattgcggcggtcgagccttttcttgcattagcgcatgcggacctcgaccgggcagatgctgcatcaccgcggcaccttacagaggtatcagttgttaccgcggattaacaggtgggttcggctcccatagtgtgtgcggaggtttccgggccggcagttgcggaagatcatttggataccgtagtggtggagtctgtggacccagccctccctgcataaccacagtttccgtgaacgaatccctgctgacccctctcaatctagagatcgatccaaatgcgcagtgcgtgaaacaagaggagaaggagcagattaagagtctcaactcccgttttgcagcatttattgataaagtaagatttttggaacagcagaacaagctgcttgaaacaaaactgcagttttaccagaatagggaatgctgccaatctaacttagaacccctctttgaagggtacattgaaacactgagacgagaagccgaatgtgtggaggctgattcagggcgtctggcctctgaactcaatcatgtccaggaggtgttggaaggctataaaaagaagtacgaagaggaggtctcacttcgggcaaccgctgagaatgaatttgtggcgttgaaaaaggacgtggattgcgcctacctccgaaaatcagacctggaagcgaatgtcgaagcccttattcaggaaatcgactttctgcgccgactatacgaggaagagataagagtactgcaatctcacattagcgataccagtgtggttgtgaaactggataacagtcgcgaccttaatatggattgcattatagcggaaatcaaggcccagtatgacgacatagtgacccggtcaagagccgaagctgagagctggtatcgctcaaaatgcgaggagatgaaggccaccgtgatccggcacggtgagacccttagaaggacaaaggaggaaattaatgagctgaatagaatgattcagcgtttgaccgccgaggtcgagaacgccaagtgtcagaactccaagctcgaggccgcggtggcccagtctgagcagcagggagaggctgcactgtctgatgctaggtgcaaattggccgagctcgaaggcgcccttcagaaggcgaagcaggatatggcctgcttgatcagagaataccaggaggtgatgaatagcaagcttggtttggatatcgagatagcaacgtacagaaggttgttggagggcgaggaacaaaggctgtgtgaaggagtgggaagtgtcaacgtgtgtgtgagctcatcccgcggcggcgtggtttgcggcgatctgtgtgcatccacaaccgcgccagtagtgagtactagggtttcctcagtgcccagcaattccaatgtggtggtaggaacaacaaacgcctgcgcccctagtgcacgggttggcgtatgtggcggttcatgtaagcggtgttag

SEQ ID NO: 17966 - DNA, 1011 bp, synthetic construct
  source 1..1011: mol_type = other DNA; note = Synthetic coding sequence
atgtgtaccatgcataaggacgaaaaagctaagcgggaagtttcctcctggaccgtcgagggtgacataaacactgacccatgggctggctaccgatataccggaaagctgcgcccgcactacccgcttatgccaacccggcctgtgccgagttatattcaaagacctgattatgccgaccatcctttagggatgtccgaatcagaacaagccctcaagggtactagccagataaagctactgtcctccgaggatatcgaggggatgcggctcgtatgccggctggcgagagaggttttggatgtggcagcaggcatgattaaaccaggggtaacaactgaggaaatagatcatgccgtccacctggcttgcatagcacggaactgttatccttccccattgaattactacaactttccgaaaagttgctgtacatcagtgaatgaggtgatctgccatgggattccagacaggcgacctctgcaggaaggtgatatagtgaatgtggatatcacactgtaccgaaacggctaccatggcgatctcaacgaaaccttctttgtgggcgaagtcgacgacggggcgcgcaagcttgttcagaccacatatgaatgtttgatgcaggcaatcgacgccgtgaagcctggggttcggtaccgggagctggggaacatcatccagaagcacgcgcaggctaatggattttctgtcgttcgatcttattgtggacatggtatccataaacttttccacactgcacccaacgtgccccattacgcgaagaataaagccgtgggcgtaatgaagtccggacatgtgtttactatagagccgatgatctgcgagggcgggtggcaggacgagacctggccagacggatggacggccgtcaccagagatggaaagcgtagcgctcaattcgagcataccctgctggtgacagacaccggatgcgagatactcacaagaagactcgacagcgcgagaccgcacttcatgtcccaattttag

SEQ ID NO: 17967 - DNA, 3102 bp, synthetic construct
  source 1..3102: mol_type = other DNA; note = Synthetic coding sequence
atggcaggaatgattgatcgcttttctcctgctaacactggcatcagatcctgggacgtggaccccggggtctgtaacctcgacgaacagctgaaagtattcgtttccaggcacagtgcgacattcagcagcatagtcaagggacagaggtcattacatcacaggggggataatttggagacactagtgctgctcaatccatctgataagagcttgtacgatgaacttagaaatctccttcttgatccggccagccataagttgctggtgcttgcagggccgtgtttggaagaaactggagaacttctcctccagacgggcggattttcccctcatcatttccttcaggtgcttaaagatcgggaaataagggacatcttggctacgactcctccgccagtacagccaccaatcctcacgattacatgtcctacttttggggactgggcacaactcgccccagcagtgcccggtctgcaaggcgctttgagactgcaactgcgcctgaatccccctgctcagctgccaaactcagagggcctatgtgaattcctggagtatgtcgctgaaagccttgagcccccttcaccttttgagctcctcgaaccgccaacaagcgggggatttctaagactagggcggccatgctgctacattttccccggaggcctgggggacgcagccttcttcgccgtaaatgggttcaccgttcttgtcaacggtggcagtaatcctaaaagcagcttctggaagctcgtgagacacctggacagagtggacgctgtgttggttactcatcccggtgccgactcgcttcctggtctcaacagtcttctgcggaggaagttagctgaaaggtctgaggttgctgccggagggggttcctgggacgatagacttagaaggctcatctcccctaatttaggcgtcgtgttttttaacgcgtgtgaggctgcatctcggctcgcaaggggcgaggacgaggcggaactcgccttgagcctgctcgcccagttaggtataacccctctccccttgtctaggggccctgtgccagccaaaccaaccgtcctcttcgaaaagatgggcgtaggaagactcgacatgtacgtgttacaccccccatcggctggcgcagagaggacactggcctccgtgtgcgctttgctggtctggcatccagcgggaccaggggaaaaagtagtgagggtgctgttccctgggtgcacccccccggcgtgcctgttagatggactagtccgactgcagcatctgaggtttctgagggaacctgtcgttaccccgcaggatctggaagggccgggcagagcggaatcaaaagaatcagtgggctcacgagactctagcaagcgggagggcctcctagccactcatcctaggcctgggcaggagcgacccggggttgcccgaaaggagccggcccgagcggaggctcctagaaagactgagaaggaggccaagactccgcgcgaactgaagaaggaccctaagccttccgtttcgcgaacccagcccagagaggtccggcgagcagcctctagtgtccccaatctgaagaagaccaacgcccaggcagcccccaaacccaggaaggccccttctactagtcattcaggattcccccccgttgccaatggtcccaggtccccaccaagtttgcgatgtggtgaagcctctcctccatctgcggcctgtggctccccagcaagtcagctcgttgccacaccctcccttgaattagggcctatcccagcaggggaggagaaggctctagagctaccactggccgccagttccattccgcgcccgcgcactccctctcccgagtcccataggtcccctgccgaagggtctgagcggctgtccctcagcccactgaggggcggtgaggctggccccgatgcctcaccaaccgtgactacccccacagtgaccacaccatccttgccagccgaggtcggctctcctcacagcacagaagttgacgagagcctcagcgtgtcattcgagcaagtgctcccacccagtgctcccacctctgaggcagggctgtctcttcctctgcggggaccacgggcaaggaggtccgcaagccctcatgatgtggacctatgtctcgtgtctccctgtgaatttgaacataggaaggctgtgcccatggctccagcacccgcttctccaggttcatctaatgactcatcagctcgcagccaggaacgagctgggggcctgggcgcagaagaaacacctccaacgtccgtcagtgagagtctaccaacactgtcagattccgaccccgtgccacttgcccccggagcagctgactccgatgaagacacagaagggttcggagtaccacggcacgatccgcttcctgatcccctgaaggttcccccccctctgccagacccctcctccatttgtatggtggacccagagatgttgcctcccaagactgcgagacagacggaaaatgttagcagaaccaggaagcctctggcccgacccaactctcgggcagccgcaccaaaggctacgcccgtggcagcagctaaaacgaagggactggccggcggggaccgcgcatcccgccccttgagtgcacgctcagagccgtcagagaaaggaggaagggcccctctttcccgaaaaagcagtaccccaaagacggcaactcgcggccccagtggctcggcgtccagccgtccaggtgtctccgctaccccgccgaagtcacctgtctatttggatctcgcttatctcccttccgggagcagcgcacatcttgtcgatgaggaattctttcagcgtgtccgtgccctttgctacgtcattagcgggcaggatcagaggaaggaggaaggaatgcgagccgtcttggacgctctgttggccagcaaacaacactgggatagagacctccaagtcactctcattcctacattcgatagcgttgccatgcatacttggtacgctgagacgcacgccaggcatcaagctctcggaatcaccgtccttggaagtaattcaatggtgtccatgcaggacgacgcctttccagcatgtaaagtagaattttag

SEQ ID NO: 17968 - DNA, 2223 bp, synthetic construct
  source 1..2223: mol_type = other DNA; note = Synthetic coding sequence
atgcgcgacctagagggttatcgggaaacccgctatcagctcttgcagctgaggcccgctcaacgtgcctcctggatcggatacgccattgcctaccacttattggaagattatgagatggcagccaagattcttgaggagttcaggaaaactcaacaaacctcaccagacaaagtcgattacgagtactcggaattactgctttatcaaaatcaggttctgcgggaggctggtctgtacagagaggcattagaacacttgtgtacatacgagaaacaaatctgcgataagttagctgttgaggagacaaaaggcgagttgctcttgcagttgtgtcgtcttgaagacgcagcggacgtttatcggggtcttcaggaaagaaaccctgagaattgggcctactacaaagggctggaaaaggcactgaaacccgccaatatgttggaacgactgaagatttatgaggaggcctggaccaagtacccccggggactggtgcccaggcggctgcccctgaattttctgtctggtgaaaagtttaaggagtgcctggacaagttcctaagaatgaactttagcaagggttgtcctcccgtgttcaataccctcaggtcactgtacaaggacaaagagaaggtagctattattgaagaactcgtcgtaggatatgaaacatctctcaagtcttgtaggctgttcaacccgaacgacgatggtaaagaggagcctcccaccactctgctgtgggttcaatactacctcgcgcagcactatgataaaatcggccagccttctattgctctggagtacatcaacacggctatcgaatccacacccactctgatcgaactcttcctggtgaaggcaaagatctacaagcacgccggcaacattaaagaggcggccagatggatggacgaggcacaggcactcgataccgccgatcgcttcattaattcaaagtgcgctaagtacatgctgaaggctaacctcattaaagaagccgaggagatgtgtagcaaatttacccgggaaggtacctcagctgttgagaatctcaatgagatgcaatgtatgtggtttcagactgagtgcgctcaagcatacaaggccatgaacaagtttggtgaggccctcaagaaatgtcatgagatcgagcggcatttcattgaaatcactgatgaccagtttgatttccacacttattgtatgcgaaagatcactctgagaagttacgtggacctgttgaaacttgaggatgtcttacgacagcaccctttttacttcaaggctgccaggattgcaatagaaatctacctaaaactgcatgataatcccctgacggatgaaaataaagagcacgaagctgatacagcaaatatgtcagacaaagagctcaaaaaactgcgaaacaagcagaggagagcccagaaaaaggcccagatcgaagaagaaaaaaaaaacgctgagaaagagaagcaacagcgcaaccaaaagaaaaagaaggatgacgatgacgaggagatcgggggtcctaaggaggaacttatccccgagaagctggccaaggttgaaactcccctggaagaagccatcaagttcctcacacccctgaaaaatctggtcaagaacaaaattgaaacacacctctttgctttcgagatatattttcgaaaagaaaagttcctgctgatgttgcagtccgttaaaagagccttcgcgattgattctagccatccatggcttcacgagtgtatgatcagactgttcaataccgctgtatgtgaatccaaggatctgtcggacaccgtgagaactgtgttaaagcaggagatgaatcgcctgttcggagcgaccaatcccaaaaattttaacgaaacgtttctgaaacggaacagcgactcacttccccataggctaagcgcagcgaaaatggtgtactacttagatccctcaagtcagaagagagcaattgagttggcgaccactctcgatgagtcgctgacaaaccggaacttgcagacgtgtatggaagtactggaagcgctctacgacggaagtttgggcgactgtaaggaagcagctgagatctaccgggcaaattgtcacaagctgtttccgtacgccttggcattcatgccgcctgggtacgaagaagacatgaagatcacagtgaatggggattcttccgccgaagccgaagagcttgcgaacgagatttag

SEQ ID NO: 17969 - DNA, 183 bp, synthetic construct
  source 1..183: mol_type = other DNA; note = Synthetic coding sequence
atgtcctgtactatcgaaaaggcattggctgacgctaaagcgcttgtcgaacgattgcgcgaccacgatgacgccgccgagtctctgattgaacagacgaccgcgctgaataaaagggtagaagccatgaaacagtaccaggaggagatccaggagctgaatgaggtggcccggcaccgatag

SEQ ID NO: 17970 - DNA, 1419 bp, synthetic construct
  source 1..1419: mol_type = other DNA; note = Synthetic coding sequence
atggggaaagagcaggagctcttggaagcagcgcgtaccgggcacttgccagccgttgaaaagctcctgtccggaaaaagattgtcctctggctttggtggcggaggcggcggcggttcagggggcggcggcggcggttcagggggtgggggaggaggtctcggctccagctcgcatccattatcaagtcttctcagtatgtggcgcgggcccaacgttaactgcgtggatagtactggatacacccccctccaccatgcagccctgaacggacataaggatgtagtagaggtgcttctccggaacgatgccctgaccaacgtcgcagactcaaaggggtgctaccccttacatctggcggcctggaaaggggacgcccaaatcgtccggctgttgatccatcagggcccttcacatacgagggtaaatgagcagaataacgacaatgagacagctttacattgtgccgcccagtacggacatacagaggtagtcaaggtgttattggaagagctcacagatcctactatgcgcaacaacaaattcgagacgcctttggacctagcagccctgtatggaaggctggaggttgtgaagatgttactcaatgctcaccccaatctgctctcttgtaacaccaaaaagcacactccgctgcatctggcagctagaaacggacacaaggctgtagttcaggtcttgctcgatgcaggcatggatagcaattaccagaccgagatgggcagtgctctgcacgaagccgcactattcggaaagacagacgtggttcaaatcttgcttgctgccggaactgatgttaatatcaaagacaaccacggtctgactgccttggacaccgttcgggagctgcccagccagaagagccagcagattgccgcattgatagaagaccacatgaccggcaaacgctccaccaaggaggtggataaaacacccccgcctcagccacccctaatctcctccatggacagtatctcacagaagtcccagggagacgtcgagaaagctgtaacagagttaatcatagattttgatgctaatgcagaggaagaggggccgtatgaggctctttacaacgccataagttgccattcactcgacagtatggcctcagggcggtcaagtgaccaagactctacaaacaaggaggcagaagcggcaggcgtcaagcctgcaggggtacggcctagagaacgacctccaccccctgcgaaaccccctccagacgaggaggaagaggatcacatcgacaaaaagtactttcccctcacagcctcagaggttttgtccatgcgtccccggatccacggttccgcggcgagggaggaagatgaacacccttatgaactgttgctcacagccgaaacgaagaagaagaaaaaaaaaaagaagaagtag

SEQ ID NO: 17971 - DNA, 1392 bp, synthetic construct
  source 1..1392: mol_type = other DNA; note = Synthetic coding sequence
atgagcggaggcacgccctatattggctctaagataagcctgatcagcaaggctgagatccgatatgaggggatcctgtatactatcgatacagagaattctaccgtggctctggcaaaggttcggagcttcggaacagaggaccgcccaacggacagaccaatcccgcctcgagacgaagtatttgagtacatcatctttagggggagcgatatcaaggacctgacagtgtgcgagcctcctaagccccaatgctctctcccgcaagaccctgcgattgtacagagttccctcggtagctccacgtcaagttttcaatccatgggctcctatggcccattcggacgtatgcccacttattcccaattctcaccttcgagtctggttggccagcagttcggggctgtaggagtggccggttcctcactaactagcttcgggaccgaaacgtccaacagtggcacgctgccacaatcttctgccgtgggttcagcattcacacaggacacaagatcgctcaaaactcagctgtcgcagggtcgtagctcgccacagcttgatcccctcagaaaaagccccactatggagcaggctgtacagaccgcatcagctcatctccctgctccagccgctgtgggccgtcggtctccagtatctactcggcctcttcccagtgcttcacagaaggctggcgagaaccaggagcataggcgcgccgaagtccacaaagtgtcccgacctgagaatgagcaactccggaacgacaacaagcgacaggttgccccaggagccccttccgcccctagaagaggtcgcgggggccacaggggtgggagaggtcgcttcggaataagacgcgatggacctatgaaattcgagaaagatttcgactttgaaagcgccaatgcgcagttcaataaggaagaaatcgaccgggagtttcacaataaactcaaactaaaggaggataagctagagaaacaggagaagccggtgaatggcgaagacaagggagattcgggcgttgacactcagaacagtgaaggcaacgcggatgaggaggaccccctagggccaaattgctattatgacaagaccaaaagtttctttgacaatatctcatgtgatgacaatcgggaaaggcggcctacctgggctgaagagcgtcgcctgaatgcggagacttttgggatcccattgcgcccgaacaggggtagaggaggttacagagggagggggggcctgggcttcagaggagggagaggtcggggcggcggaagaggagggaccttcactgccccaaggggattccgcggcggcttcagaggaggaaggggaggacgggagttcgccgatttcgagtatcgcaaggacaacaaggtggccgcctag

SEQ ID NO: 17972 - DNA, 1287 bp, synthetic construct
  source 1..1287: mol_type = other DNA; note = Synthetic coding sequence
atgggtgggggggttggtgcctcaagtagtggcgggggaccaggggggagcggaggtggaggaagcggcggaccaggcgccggtacctctttccctccgcctggtgtcaaactggggcgcgatagtggaaaggttacaacagttgtcgccactctcgggcagggcccagaacgctcccaggaggtcgcctacactgatattaaggtcatcggaaacgggagctttggcgttgtgtaccaggcgcgcctggccgaaacccgcgaattggtagccattaagaaagtgctgcaggataagcgtttcaagaaccgagagctgcagatcatgcgcaaactcgaccactgtaacattgtgcgcctccggtacttcttttactcttcaggtgaaaaaaaggatgagctttacctgaatcttgtccttgaatatgtacctgaaactgtctaccgagtggcgaggcatttcactaaggctaaactcactattcccatcttgtatgtcaaggtctatatgtaccagctgttcaggagcctggcgtatattcacagtcagggcgtctgccaccgcgacatcaagccacagaacttactcgtagacccagacaccgccgtcctcaaactgtgtgattttggcagtgctaagcagctagtgagaggtgagcccaacgtttcgtatatatgttctcggtattaccgggctcctgaattgatttttggggccactgactacacaagttctattgatgtgtggtctgcgggttgcgtgctggccgaactcctgctaggtcagcccatcttccctggagactccggggtggaccagttggtggagattatcaaggtgttgggaactccaacccgggagcagattagggagatgaacccaaattacacagagttcaaattccctcagattaaggcacacccctggacgaaggtctttaaatctagaacaccgcctgaggctatagcactttgtagtagtctcctagagtataccccttcttcacgcttgtcccccctggaagcctgcgcccacagctttttcgacgagctcaggtgtttagggacacagctgcccaataatagaccattgcctccccttttcaacttcagtgccggagagttatcaatacagcctagtttgaacgccattctgatcccaccacacctccgatccccagccggcactaccacgctgacaccctcttcccaggcactgaccgagactcccacgtcatccgactggcaaagcacagatgctaccccaacactgaccaatagcagctag

SEQ ID NO: 17973 - DNA, 657 bp, synthetic construct
  source 1..657: mol_type = other DNA; note = Synthetic coding sequence
atggatgccgaacatccagaacttcgctcctatgcacagagtcagggatggtggaccggcgagggcgaatttaactttagcgaagtgttcagtcccgtggaagatcacttggattgtggtgccggcaaagactctttggagaagcaggaggagtccatcaccgtgcaaacgatgatgaatactttaagggacaaagctagtggggtatgtatcgactccgaattcttccttactactgcctctggagtctctgtgcttccacagaacagatcgagcccatgcatccattacttcaccgggactccggacccctcccgatctatcttcaagccttttatctttgtcgacgacgtcaagctggtccccaagacacagtccccatgcttcggggatgacgaccctgccaaaaaggagccaaggtttcaggaaaaacctgatcggaggcatgagctctataaagcccacgagtgggctagggcgattattgagtctgaccaggagcaaggacgcaaacttagatctacaatgctagaattggaaaagcagggcctggaggccatggaggaaatcctgacgtcctcagagcctctcgatcctgctgaggtaggagacttattctacgactgtgtggacaccgagattaagttctttaagtag

SEQ ID NO: 17974 - DNA, 573 bp, synthetic construct
  source 1..573: mol_type = other DNA; note = Synthetic coding sequence
atggccctcctggctgagcacctgctgaagcctttgcccgccgacaagcagattgagacgggccctttcctggaagcggtgtcccacctgcctcctttcttcgactgcctgggaagcccagtgttcaccccaattaaggctgatatctctggcaatatcaccaaaattaaagccgtgtatgatactaacccagcaaaattccggactcttcagaatatcttagaggtggaaaaggagattggtttacgattcatccaagtctttctgcagagtatctgcgacggggagcgagacgaaaaccatcccaacctcatcagagtgaatgccactaaagcttacgaaatggcactcaaaaagtaccacgggtggatcgttcaaaagatttttcaagctgcactgtatgctgctccttacaagtctgactttcttaaggcactgagcaagggtcagaacgtcaccgaagaagaatgccttgaaaaaataagactgttcttggtgaattatacagcaaccattgatgtaatctatgagatgtacacacagatgaatgctgaactgaattacaaagtctag

SEQ ID NO: 17975 - DNA, 762 bp, synthetic construct
  source 1..762: mol_type = other DNA; note = Synthetic coding sequence
atgtccatctgcagtagcctggcacggaaatttccaaagcttaccataattggcgaagaggatcttcccagtgaagaagtcgaccaggaactcatcgaggatagccaatgggaagaaatactcaagcaaccttgtccatcacagtattctgccattaaggaagaagacctggtggtctgggtggatcccctcgacggaaccaaggaatacaccgagggcttgcttgacaacgtcacggtgttgattggcatcgcgtacgaaggtaaggctatcgcaggtgtcatcaaccagccatactacaactacgaggcgggccccgatgccgtgctagggagaactatttggggcgtgctgggcttgggggccttcgggtttcagctgaaagaagtgcccgccggcaaacacataataactactacacgcagtcattccaacaaactggtgaccgattgtgtggccgctatgaaccccgatgctgtgctccgcgtggggggcgcagggaataagatcattcagctgatcgagggaaaagcaagtgcttacgtgtttgcgagtccaggctgcaagaaatgggatacatgcgcacccgaggtgatcctacacgcagtcggggggaagttgaccgatatacacggaaacgtgctgcagtatcataaggacgtcaagcacatgaattcagctggtgtcctcgccacattgcgtaattacgactattacgcgtctcgggtgcccgaatccatcaagaacgcccttgtcccgtag

SEQ ID NO: 17976 - DNA, 1590 bp, synthetic construct
  source 1..1590: mol_type = other DNA; note = Synthetic coding sequence
atgggcgcctacttgtcccagcctaacactgtgaaatgttctggcgatggcgtgggcgttagcatggaagatgctcacaactgcatccccgagctggactctgagacagcgatgttctccgtgtacgacggccacggtggagaagaagtggcactctactgcgctaaatatctcccagacatcattaaagaccaaaaggcctacaaggagggtaagcttcagaaagctttggaggatgccttccttgcaattgacgccaaactgaccaccgaagaagttatcaaagagcttgcccagatcgcaggtagacctaccgaggacgaggacgagaaggagaaggttgcagacgaggatgatgtcgacaatgaagaggcagccctgctccacgaggaagctacaatgaccatcgaggagttgctgactcggtacggccagaattgccataaagggcctcctcactccaagtcaggggggggaactggcgaagagcctgggagccagggcctgaacggggaggcaggacccgaagactcaacacgtgagaccccatctcaggaaaatggcccaacagcaaaggcatataccggattttccagcaatagcgagcgggggacagaggcgggccaggtgggggaacctgggataccaaccggggaggctggccccagttgctccagcgctagtgacaagctaccccgtgtcgctaaatccaagttctttgaggacagcgaagacgagtcagatgaggccgaggaagaggaagaggactcagaggagtgttctgaggaggaggacgggtactcttcagaagaggcggaaaatgaggaagacgaagacgacaccgaggaagctgaggaggatgacgaagaggaagaagaagagatgatggtacctggcatggagggcaaggaggagccaggatccgacagcggtaccaccgccgtggtggccctcattcgggggaagcagcttattgtagccaacgccggagactctagatgcgtggtgagcgaggcagggaaggcattagatatgtcttatgatcataagcccgaagacgaggtagagctcgccaggataaaaaatgccgggggaaaggttactatggatggcagagtgaacggtggcctaaacctgtcgagggccatcggggaccacttttacaagcgaaataagaatctgccaccggaggagcagatgatcagcgccttgccggacatcaaagtgctgactctgacggatgaccacgaatttatggttattgcttgtgacgggatatggaatgtgatgtcctcacaggaggtggtggactttattcagagcaagatctctcaacgggacgaaaacggcgagcttcgactgctgtccagcatcgtggaggaacttctggaccagtgcctggcacccgatacatctggagacggcaccggatgtgataatatgacttgcatcattatctgcttcaaaccccgcaacaccgcggagttgcagccagaaagtgggaagcgcaaacttgaagaagtgctgtccaccgaaggggccgaggaaaacgggaactctgataagaaaaagaaagctaagcgggattag

SEQ ID NO: 17977 - DNA, 1293 bp, synthetic construct
  source 1..1293: mol_type = other DNA; note = Synthetic coding sequence
atgacttttgagctatatgatgagtggatccaggcaagtaacgtccaagaacaagacaagaagctgcaggccctgtggaatgcctgcgaaaagctcccaaaggctaaccataataacattcgttacctcatcaagttcctgagcaaattaagcgaataccaggacgtcaacaagatgacccctagcaatatggcaattgtgctaggacccaacctgctctggcctcaggccgaaggtaacatcaccgagatgatgaccactgtctctctgcagatcgtgggaattatcgagccaattatccagcatgcggactggtttttccccggagagattgaatttaacatcacaggcaactacggctctcccgtccatgtaaaccacaacgctaactattcttccatgccaagtcccgatatggaccccgcagataggcggcagccagagcaagcccggcgacctctgagcgtcgcgactgataatatgatgctggagttctacaaaaaagacggtatgggcgtgcgcgtgatggatacaaattgggttgcccgacggggaagcagcgctgggcgaaaggtgtcctgcgctcctccgtcaatgcagcccccagcaccacccgccgagctggcagcaccactaccctcgccgctgcccgagcagccactggacagtccggcagcccccgccctgtcaccctcggggctgggcctccagccagggcctgagcgcacctccacaacaaagagcaaggagctctctcctggtagtgcacagaagggaagccccgggtctagccagggtacggcatgtgctggaacacagccgggggcccagcctggggcccagcccggcgcctccccctcgccatcacagcctcccgccgaccagagcccccacacactacgaaaagtgtccaaaaaactggcccctataccaccaaaggtaccctttggccagcccggcgccatggcagatcagtccgccggtcagccctctcctgtgtctctgtccccgactccaccatccactcccagcccctatggcctttcatacccacaaggctactcactcgccagcgggcagctgtcaccagcagccgccccacccttggcttcaccaagtgtgtttacatctacgctctcgaaatcacgccccactcccaaacctcgccaaaggcccactctgcctccgcctcagccgcccacggtcaacctgtcggccagttctccacaaagtacagaagccccaatgctcgacgggatgtctcccggggaatctatgtctactgctgtttag

SEQ ID NO: 17978 - DNA, 846 bp, synthetic construct
  source 1..846: mol_type = other DNA; note = Synthetic coding sequence
atgcccggaccaaggaggctgaggtcacccggggggagcggatgcagtagccgtgggtccggccctcgcctgagcacacgacggtggcggccatgctgctactgtggcgggagtggagtctggcttcttcgcactccacccagccctagcgcctggccagccaggcggtgcccaagacatcgcttcgagttttgcgaacctgcattcgtggtgggcaactgcttacaaatagcttccgacagtcaccagtatgatcgtatttactgcggggccggcgtgcagaaagaccacgaaaattacatgaagatacttttaaaggtgggcggcatcctagtgatgcctattgaggaccagcttacacaaatcatgcgcaccggtcagaacacgtgggaatccaagaacatcttggccgtatccttcgctcctctggtgcagccgtctaagaatgataatggtaaaccagactccgtggggctgcctccctgtgcagtccgtaacctccaagacctcgcgcggatatacatccgacggaccctcagaaatttcattaacgatgagatgcaagctaaggggattcctcaaagggctccgccaaagcgcaagaggaagcgagtcaagcagaggataaatacctacgtgtttgtgggtaaccaactgatccctcagccgctcgatagcgaggaggatgagaaaatggaggaggacaacaaagaggaggaggaaaaagatcacaacgaggctatgaagcctgaggaacccccgcagaatttactgagggagaaaataatgaaattacccctgccagagtccctgaaagcctatctgacttactttcgagataaatag

SEQ ID NO: 17979 - DNA, 1251 bp, synthetic construct
  source 1..1251: mol_type = other DNA; note = Synthetic coding sequence
atgtctccggcaatgctgtcggtgctggtaaagatgatgctcgcccaggcccaggagtcagtgttcgagaaaatttcacttccaggaatccggaacgagttttttatgctcgtgaaggtagctcaggaagcagcaaaggtgggcgaggtctaccaacagctgcacgccgcaatgtcccaggcgccagttaaagagaacattccatattcatgggcgagtcttgcctgcgtaaaagctcatcattacgctgccttggcgcactattttactgctattctcctgatcgaccaccaggtcaaaccaggcacagacctcgatcaccaggagaagtgcctcagccagctgtatgaccatatgcccgaaggccttacacctctggcaaccctgaagaatgaccagcagagacggcagttgggaaaaagccatttgcgccgggctatggcgcaccacgaagagtcagttagggaagcatcactttgcaagaagctccgttcaattgaggtcctgcaaaaagtgctctgcgcagcacaggaacgttcccgcctcacttacgctcagcaccaggaagaagacgatctcttgaatctgatcgacgccccctctgtcgtggctaaaactgaacaggaagtggatattattttgccccagttttctaagttgacagtgactgattttttccaaaagctcggccccttatccgtcttttccgccaataaaagatggacacctccacgcagcattaggtttactgctgaggaaggagacttaggattcactctccgtggtaatgcccctgttcaggttcacttccttgatccctactgtagcgcctcagtcgctggtgcacgagaaggcgattatattgtatctatccagttggttgactgtaagtggttgactctgtccgaagtgatgaagctgctgaagtcctttggcgaagatgaaattgagatgaaggtcgtcagcctgttggactctactagctctatgcataataaatctgccacatacagtgtggggatgcagaagacttactccatgatttgcctcgccattgacgatgatgataaaactgacaagaccaaaaaaatatccaagaagctttcattcctctcatggggcaccaacaagaacaggcaaaagagcgccagtacactgtgcctccctagtgttggagcagcaagaccgcaggtgaaaaaaaagttgcctagcccattttccctccttaactcagactcctcgtggtactag
